United States Patent Application Publication US 2006/0154250 A1 - sequence listing, part 3

SEQ ID NO: 253 - DNA, 4147 bp, Homo sapiens
cgcccctcctcccctcggcgggtgtgatcgagtggcctcgcctcatcgcctagcgcccccctcagtcgccgccgcctccgcccgccggccatgtcccccggccgccgccgccgccgcccgagcgcggcgctcccgcggccccgcgcgcagtgagcgcgggcccgtcttgccgttcgcccgccccagggcccccttgttctccgcgccgccgccgccgccatgttgggtttggagctgcagcggagccgccgccgccgccgcgggtgagggaggccgagagcggagcccgccccgccccggggcccagggagcggggccgcttcggagcccggcctctccccgccagccgccttcccggcccgccgtgcagccagcgagccagcgagcgagcaagcaagcaagcaccggaccccggccgcgccttcagctacggcccgagcgagcccgccgccgccgggcccggccacagcctgcagcggagcccacgagaggcagcgccatggcggagcagacctactcgtgggcctattccctggtggattccagtcaagtgtctacatttctgatttccattcttcttatagtctatggtagtttcaggtcccttaatatggactttgaaaatcaagataaggagaaagacagtaatagttcttctgggtctttcaatggcaacagcaccaataatagcatccaaacaattgactctacccaggctctgttccttccaattggagcatctgtctctcttttagtaatgttcttcttctttgactcagttcaagtagtttttacaatatgtacagcagttcttgcaacgatagcttttgcttttcttctcctcccgatgtgccagtatttaacaagaccctgctcacctcagaacaagatttcctttggttgctgtggacgtttcactgctgctgagttgctgtcattctctctgtctgtcatgctcgtcctcatctgggttctcactggccattggcttctcatggatgcactggccatgggcctctgtgtcgccatgatcgcctttgtccgcctgccgagcctcaaggtctcctgcctgcttctctcagggcttctcatctatgatgtcttttgggtatttttctcagcctacatcttcaatagcaacgtcatggtgaaggtggccactcagccggctgacaatccccttgacgttctatcccggaagctccacctggggcccaatgttgggcgtgatgttcctcgcctgtctctgcctggaaaactggtcttcccaagctccactggcagccacttctccatgttgggcatcggagacatcgttatgcctggtctcctactatgctttgtccttcgctatgacaactacaaaaagcaagccagtggggactcctgtggggcccctggacctgccaacatctccgggcgcatgcagaaggtctcctactttcactgcaccctcatcggatactttgtaggcctgctcactgctactgtggcgtctcgcattcaccgggccgcccagcccgcccttctctatttggtgccatttactttattgccactcctcacgatggcctatttaaagggcgacctccggcggatgtggtctgagcctttccactccaagtccagcagctcccgattcctggaagtatgatggatcacgtggaaagtgaccagatggccgtcatagtccttttctctcaactcatggtttgtttcctcttagagctggcctggtactcagaaatgtacctgtgtttaaggaactgccgtgtgactggatttggcatttaaagggagctcgtttgcaggagagaggtgctggagccctgtttggttccttctcttcctgcggatgtagaggtggggccccttccaagagggacaggcctctccccagcgcgccttcctcccacgtttttatggatctgcaccagactgttaccttctgggggagatggagatttgactgtttaaaaactgaaaacagcgaggagtctttctagaacttttgaacactaaaaggatgaaaaaaattagcaaaccgaagtttcttcaatgacccctcgagaactttgggaccagtttcctataggggactcagtttcagagaactgagacagaagctcttctgtcgttatattcttctttcctttttttggatttattaaatattttctgtggtgtgaagtgacttattaaatccacagacattgagtgacttcttacaacatccacataagaatttgttgtaatgagttcatgtccacccagatgttgtgttggcagtgaacaagggcacggtttttatacatacgtacatatatatatataaacacacacatagatatatatgaataaacaaaaatgaaatcctgctaagatcacgctgtgtagctgacaggggcttgctgtcgttttgagcatgtcgagcagtttactgtggcttccttgtatatggataagctgctgtccttccccttcacaactgaccccgcagttacaaactagtatagcatttgtgctgattgatgatagactcatggacttcaggagcccttacttggttttgatcagtgtagcaaattagggatgaagagttcaaaccttttggccctttctttcttttctaggcttctccctcgcagggtgttccgtagtttcttctcgagccaatgcatgtattatagcagcaggtgtctttgtgctttctcatcatagtaacgtactacttgtaaatacatttttctattttctatttttttgtatttttttttttgacattttgtttcattggtgtgctgtatattttccatgccctcactcctttaagaaaaaaaaaaaaaaggaaaaaagcaacacaatcctgtccttgctgttgtgattatagtcttggtttacctgtggtgacaaccgggtgttggggacacatgtcaaatgcccctctgagatgggccctaaattccagtaactggggaaagaaccagctgctgtgtcctgagagcctggccctgtgctgtggtctctgctgcaagcccagatttctgggagtaactagtgttaggtctgctgacctttacctaagcagcccctgcctggtaagaaggtgcccattgttcagaggcaaagagaagcctgcggttggcatgaggatgcctgacaacaaaggctggagaagggccctgagttccagcctctccccaagggtccccgccccagtggctgcctctgtcttgacctgtgtaatgaattagtgtgctgtgtcactgtggcttgaagtcactgtggatcaagctcacagggggcacccatcctgttgtcaacagagtctgaagcagtcagggtgttggattcctctgttgttgtcatcaattcctgctgaggggtttctggggttttgtttttaataaatgactcctttgtagcctttgtcacataatcttcactttggttgttggtaccaaacagagctcccagccatctcctccctgttctggaagactgatgggaagactctgtctgtccccagacctggtcatctgcagctctggcccagtcatagatacatcaaagaactgaagcttctgctgtccacagaactcaaaactgcctctgcattgggtgaagactaaaaatccacttgcggactctcccttccttccttctcagccctcgaggatgcatatagctaattaagcaggcccagagacagagaggggggctccaaaatgactcggattaagggcaagtgccagtgatgggtagaaataacgttatccttcatgcctgtaatcccagcactttgggaggccgaggcaggtggatcacaaggttgggagctcgagaccaacctggccaacatggtgaaaccccgtctctactaaaaacacaaaaattagctgggcatggtggcaggcgcctgtaatcccagctatttgggaggctgaggcagaagaatcgcttgaacctggaaggcggaggttgcagtgagcagagattgcgccactgcactcaagtctgggcgacagggtgagactccatctcaaaaaaaaaaaaaaaaaggaaatgttatcctggcagtgggtcattttaatttttctgtctttgttttcataagaaaattaaattccagacagaaggaacgtcg

SEQ ID NO: 254 - protein, 540 aa, Homo sapiens
APPPLGGCDRVDHRLAPPSVAAASARRPCPPAAAAAARARRSRGPARSGPVLPFARPRAPLFSAPPPPPCWVWSCSGAAAAAAGEGGRERSPPRPGAQGAGPLRSPDRQPPSRPAVQPASQRASKQASTGPRPRLQLRPERARRRRARPQPAAEPTRGSAMAEQTYSWAYSLVDSSQVSTFLISILLIVYGSFRSLNMDFENQDKEKDSNSSSGSFNGNSTNNSIQTIDSTQALFLPIGASVSLLVMFFFFDSVQVVFTICTAVLATIAFAFLLLPMCQYLWCSPQNKISFGCCGRFTAAELLSFSLSVMLVLIWVLTGHWLLMDAMGLCVAMIAFVRLPSLKVSCLLLSGLLIYDVFWVFFSAYIFNSNVMVKVATQPADNPLDVLSRKLHLGPNVGRDVPRLSLPGKLVFPSSTGSHFSMLGIGDIVMPGLLLCFVLRYDNYKKQASGDSCGAPGPANISGRMQKVSYFHCTLIGYFVGLLTATVASRIHRAAQPALLYLVPFTLLPLLTMAYLKGDLRRMWSEPFHSKSSSSRFLEV

SEQ ID NO: 255 - DNA, 20610 bp, Mus musculus
  misc_feature (1)...(20610): n = A,T,C or G
aatcccagcgctggggaggcagaggcaggcggatttctgagttcgaggccagcctggtctacaaagtgagttccaagacagccagggctatacagagaaaaactgtcttgaaaaaccaaagagagagagagagagaaaaagagagagagagagggagagaatttgggcttgaggggtagtacagtgcaagagtctggcttgttcagggccctgagtttagtccctggcacaagaaggaaaaatcaaaaaccaaacaaataagcaaacaaaaccaggaaagtgaaaactttcactagggcttgagaagctgagtatacttacatttttttcttacaatttttttttaccatttctatttttttataatttattctaccatcttaaatgtatgtgcatgtgtgtgtgtgtgtgtgtgtgtgtgtgtgtgtgtgtgtatgtgcgcacattgtgtgcgcgagctcacaggagccagagagagcaacggaccccttggagctggactcacaggagaatgcgagccatcagtgtgggaactaagcgcccacctctgacccctgagtgagctctctgtgctttatctgttggatcctctcttcagccccaaggcactttttaaaaaatttattagatatttaatttatttacatttcaaatgctgtcccctttcctggtttcccctctaaagacctcctatcccctcccctttcccctgctcaccaacccacacactcccgcttcctggcctcggcatttcccttcactggggcatggagccttcacagaaccaacaaggccatcctctgctacatatgcagctggagccatgagtcccccactatatgttttctttggttggtggtttagtccctggaagctctgggggggggcactgattagtttatattgttgttcctcctatggggctgttaaccccttcaattctttgggtcctttctctagctccttcattggggaccctgtgctcagtccaatggtaggctgctaggatccacctctgtatttgtcaggcactggtggagcctctctggagacagctataacaggcttctgtcagtaagctcttgttggcatctgcaatagtgtctgggttttgttgggagccgccctcacatttgccattataagatggcactgacagctgtgttctaagtggtaaacataatctgcacacgtgcaggggcagttttcccgccatgtgttctgcctttcccgtgatgacaactgggccgatgggctgcagccaatcagggagtaatacgtcctaggcggaggataattctccttaaaagggacggggttttgccattttttctctctctcttgttcttgctttctttctcttgctttcttgttcttgttctttttctctctcttgctcttgctcttgcactcttgctctcttgctctctggctcctgaagatgtaagcaataaagcttttgccgcagaagattctggtttgttgcgtctttcctggccggtcgcgtgaacgcgggtaagagttggtgctgagacccgggacgggacgagaagacccgggacgagaagacccaggacgagaaaacctgggacgggacgagaagacctgggacgagaaatcctgagacgagaaaacctgggacggttaccatcaccggcgcaaggaagatccctcattccggaaccagaactgcgggtcacggtaatggagtgttcccgtaaaacagactgttgagaaggattcaactgcgtgaattcagaactcttcagctggggaatggtggtaatgaagtgttcccgtaaaacagactgttgagaaggatccagtgtggattcagaactcttcagctggggaatggtggtaatgaagtgttcccgtaacacagactgttgagaaggattcaactgcgtgaattcagaactcttcagctggggaacagggtacccgtaagtatagctttacaaggtaagtctggtcttgaactttctaacgaaattcaagacagtctatcagaagtaaagtgggaaatagctttacaaggtaagtctggtcttgaactttctaacgaaattcaagacagtctatcagaagtaaagtgggaaatagctttacaaggtaagtctggtcttgaactttctaacgaaattcaagacagtctatcagaagtaaagtgggaaatagctttacaaggtatgtctggccttgaactttnnnnnnnnnnnnnnnnnnnntcctgccttcaaacacagtcacacagtgggttagaatctggcatgtgagcggctgcaggcattgggctgctgcatttctcagaagaaactccgggataatttcagctagaaactgacagacctgagtttcaaaatgatatttcaagtttaaaaatcagaaaataccgatgtcccagctctcaagaggttgaggcatgaagctcctccctccagcctctgttgtactcaggtcttcagataaagatgagccctgccctcaaacatatacctgctccactgaggtctacaaattcatctcattcacacaggtcgtcaccaacacatccagaagaacccctgagaaaactcacggcccctcacggccctgtcaggtctacacgtaaagtgaaacaccagtaaataaaaaatctgggtcaacgcatccctttgatgataaaaatgagaatttgggccgggcgtggtggcgcacacctataatcccagcactggggaggcagaggcaggcggatttctgagttcgaggccagcctggtctacaaagtgagttccaagacaaccagggctatacagagaaaaactgtcttgaaaaaccaaagagagagagagagagagagaaaatttgggcttgaggggtagtacagtgcaagagtctggcttgttcagggccctgagtttagtccctggcacaagaaggaaaaaccaaagaccaaaaaccaaacaaataagcaaacaaaaccaggaaagtgaaaactttcactagggcttgagaagctgagtatacttacatttcttttcttacaattttttttttaccatttctatttttttataatttattctaccatcttaaatgtatgtgtgtgcgtgcgtgtgtgtgtgtgtgtgtgtgtgtgtgtgtgtgtgtgtatgtgcgcgcaccatgtgcgtgagctcacaggagccagagagagcaacggaccccttggagctggactcacaggagaatgcgagccatcagtgtgggagctaagtgcccacctctgacccctgagtgagctctctgtgctttatctgttggatcctctcttcagccccaaggcactttttttaaaaaaaattattagatgtttactttatttacatttcaaatgctgtcccctttcctggttttccctctaaaaaccccctatcccttcccctttcccatgctcaccaacccacaaactcccgcttcctggcctcggcatttcccttcactggggcatggagccgtcacaggaccaacaaggccatcctctgctacatatgcagctggagccatgagtcccccactatgtgttttctttggttggtggtttagtccctggaagctctgggggaggggggacactgattagtttatattgttgttcctcctatggggctgttaaccccttcaattctttgggtcctttctctagctccttcattggggaccctgtgctcagtccaatggtaggctgctaggatccacctctgtatttgtcaggcactggtggagcctctctggagacagctataacaggcttctgtcagtaagctcttgttggcatctgcaatagtgtctgggtttggtggttgtttatgggatggatccccaggtggggtagtttctggatgatcattccttcagtctctgctccacactttgtctctgtaactccttccatgggtattttgttcccctttctaagaaggatcaaagtgtccacactttggtcttccttcttcttgcatttcatgtggtttgtgaattgtatcttgcgtattctgagcttctaggctaatatccacttatcagtgagtgcataatatgtgtgttcttttgtgattgggttacctcgctcaggatgatatcctccagatccatccatttgcctaagaatttcataaattcattattttaatagctgtgtagtactccattatgtaaatgtaccacattttctgtatccattcctctgttgagggacatctaggttctttccatcttctggctattataaataaggatgctatgaacatagtggagcatgtatccttattacatgttggagcatcttctgggtatatgcccaggagtggtattgctgggtcctcaggtagtactatgtccaattttctgaggaactgccaaactgatatccaaagtggttgtaccagcttgtagtccccccagcaatggaggagtgttcctctttgtccacatcctcgccagcatctgctgtcacctgagtttttgatcttagccattctgactggtgtgaggtggaatctcagagtttgatttgtatttccctgatgactaaggatgttgaacattttttttttaggtgcttctcagccattcagtattcctcagttgagaattctttgtttagctctgtacccatttttttaatagagttatttggttctctggagtctaacttcttgagttctttgtatatattggctattagcccctaaggtacttttaaaatagttatgaggctggagaggtggctcaggggttaagagccttactattctacaggacatgtaaaggtttgaataagaatggcctccatagggctggagagatggcgcagaggtttaaaaagtactgagtggtcttccagaggtcctgaatttcaattcccagcaatcacatggtggctcacaaccatctgtaatgggatctgatgccctctgctggtgtgtctgaagatagctactgtgcgctcgtataaattaaataaataaataaatctttttttttttttttaaagggtaggggtgggaaaaaggaaaaaaaaaaccaacaagctggagagatggcttagaggttaagagcactgggctgttcttccataggttctgagttcaaatcccagcagccacatggtggctcattactatctataatgagatcagtaataatatctataataatattatgacctacaggcatacatgcagccagagtgttgtatacataataaatctttaagagagagagagggagagagggttcagcggttaagagcactgactactcttccaaaggtcccgagttcaattcccagaaaacaaccacctgtaatgagatcagatgccctcttctggtgtctgaagacagctacagtgtattcatatacataaaataaataaattttaaatatagttttaaaaaaataaaaagaatggcctccataggttcatgtttgaacacttagttcctagttggtaaaactgtctgggaaggattagatggagtggccttgttggaagagatgttattactgggctgggctttgaggtttccccagtgactcgcctatctcctgctttgcagatcaggatgtgaactcctagctgttcctttgctccgccatcatggcctctaaccctctggaactgtgagcaagcccccagtttaatgccttctttgatgagttgccttgaaaggtaactaagacagacaagactgatgttcctttcccagtaccagtccaaggggctcacaaccacccgaaactccggctttggggaaactgatgctctcttctggcttctctaggcacacacagacccatagacacgcaaacaaacacatactcataaatataaaataaatatttcttaagcttcaaactttccactcagattggaagaaacaggtgtcaaatttcagagactagttttcctctgtaaatatgtaaatatgacttggatggtaagtcatgctctcttttctcttctccacatttaaaagctttcttcttttcgataagtttcttccaagaagggaaaggttgaatttcaggtcatttgtccactgacttcccaaaaaaaaaagccacttccttcatcagcatagtggacctgcctgagaccaggggannnnnnnnnnnnnnnnnnnnattttccttctttaaagaatgggtatgggtgggattatttggagatacactttgctgtggattagtgttgcttctttggttggtctgtaagcttaaggcttaaactaggagagacaaggtggttattgcccaggcacttgcagctctagaacatggtgctttccctgatatatctatgcttaagcaataggtcgctggccactcagctcttgcaccccatgaggctagtctcattgcacgggatagagtgagtgtgcttcagcagcccgagagagttgcacggctaagcactgcagtagaagggctctgcggcatatatgagcctattctagggagacatgtcatctttcatgaaggttcagtgtcctagttcccttcccccaggaaaaacgacacgggagcaggtcagggttgctctgggtaaaagcctgtgagcctaagagctaatcctgtacatggctcctttacctgcacactggggatttgacctctatctccactctcattaatatgggtggcctattgctcttattttcttattaaaagaaaagggggagatgttgggagccgccctcacatttgccattataagatggcactgacagctgtgttctaagtggtaaacataatctgcacacgtgcaggggcagttttcccgccatgtgttctgcctttcccgtgatgacaactgggccgatgggctgcagccaatcagggagtaatacgtcctaggcggaggttaattctccttaaaagggacggggttttgccattttttctctctctcttgttcttgctttctttctcttgctttcttgttcttgttctttttctctctcttgctttcttgttctttttctttctctctcttgctctcttgctctctggctcctgaagatgtaagcaataaagcttttgccgcagaagattctggtttgctgcgttcttcctggccggtcgcgagaacgcgtgtaagaaggtttggtggttgtttatgggatggatccnnnnnnnnnnnnnnnnnnnntgggaatcgaacccaggtcttcaatgctcttaaccactgagccgtctctctggccccatgaactcaccttcatacccacagagttagtgtatctctccaccctcatcagctaagtctctgtttgcagtaatggtgattaatacagagacccacaaggtcaaggtggagagatgagacttcaggatatttggccctaagtggagcaggcatataacactaccccttctcaaggtctggagcgcattgccaaagaggagacagagagagtataacagccagaggctgtgaatggtcaccaggaaaccgtgtcttatggacacagctgagcagctgcacgtggggactcacggcagttgggacagctcaggaggtctagacaagctcaagccagagcaaatcccagtgtgaaatcctcttcccagccgagaagccactggcaaatgttagctgctgggggaaggaaaggcagtttccactaaaagtgtagcccttgggaagtcaactcaactcaactggaagattatacatgcatgaatattcgagaaggttttatgggttttaaaaaaagatactaagctaggtgggtggcttagtcagggtttctattcctgcacaaacatcatgaccaagaagcaagttggggaggaaagggtttattcagcttacacttccatactgctgttcatcaccaaggaagtcaggactggaactcaagcaggtcagggagcaggagcagatgcagaggccatgaagggatgttttttactggcttgcttcccctggcttgctcagcctgctctcttatagaaccaagactaccagcccagagatggtaccacccacaaggggcctttcccccttgatcactaattgagaaaatgccttacagttggatctcatggaggcatttcctcaactgaagctcctttctctgtgataactccagctgtgtcaagttgacacaaaactagccagtacagtgggtaagcaagcagggaggtaggagtgggtctagaatgcgtgggggtgggtggtgactgtgatcaaaacaggttgaattaaattctcaaagtaataataataataatagtaaataataataataaataatagtaataataataatagaattctacttctgtcagccatacatgtctttaattcttgtgctccgaaagaagagacagggagacctctgtgaccttgaggccaatctggtctatacagtaagaccctgtctcaaaacaacccccaaactgtcccacttctcagtgaggtttaccttagcgatccagctcacaagccttctgcacttactctgtctgctaatgtacttgagtgaggccttcagctacttagaatttttccccatttatgtgtgtgtccagatgtgcaggcatgtggaagccagaggctgttttcaggtaccttcttcaactgttctcaggcttacttacttactttatttatttatttttgacacgaggtctccccctgagtctgaagctctctgttttggtcagagtggctggtcactgagctccagggtcctcctgtcttcacaccctcccaggtgctgggttaaagactcgtgttgctgtgccggactcagtgggtgctgtgtgcaccaagcccatcactaaggagccgtctcctcacccttcttgaactgctttttggcatgtgtatgtttgcgtatgtgtccttcttgaccaactgtaagagcttcacaggcatagctgtgcgaggcacaagcgcaccaggctgagcacagagtcttggagagcctccgggagagtggcctctctgcttccccttctcagaaagctctaggactccgactcactgacagctcatccagctctctccttagccagaaaggaacatcattagcctatggtttgttttctttcctctccagagggttgagagaacccaaggaatgtctgtcttttatacaaaggataagaatgaagcagaggcagaggctattgtgagccacctagtgaggtttctgccagaacccacctctgtccagatcactagagtttctttgaaaattgaacacagctgaacgatttgtttttttgtttttgtttttgtttttgtctttatgtaaagaaaactttgcttagtctctctctgggtgtggttcccaagcatttgagagacttcatctttttattattattatttaatagttattggtatacaaagttgaggatatggagacaggagagctgggcttgctggacccaggtctatgctgatttgaataggaagggtccttgtatgtttatatatttgaaggcatggtcattagggagtggcactacttgacaggggttttatatgaggtgttgttagagtaagtgtggccttgtggagggagtgtgtcactaggggtgtactttgaagttttaactgctcaagccaagcccagtgcttctctattcttgctgcctaattattcagaggtagaactctcagctccatgtctgactgcaatatcaccatgctttctgccatgacaataatggactaaacctctgaactgtaagccaacccaattacattttttttctttgtaagtgttgctgtggtatctgggcgtggtggtgcacgcctttaatcccagcactcgggaggcagaggcaggtggatttctgagtttgaggccagcctggtctacaaagtgagttccaggacagccaggaaatacagagaaaccttgtctcgaaaaacaaaacaaagagttgctgtggtagctcttctggtcccggtccctggagctgggagagccgcgggttaccatgcaggcgtggccaagtccaagaaccacaccacacacaaccagtcccaaaaatggcacagaaatggcatcaagaaactccagtcacaaaggtacgaatctcttaagggggttgaccccaagttcctgaggagcatgcgctttgccgagaagcacaagaaaggcctggagaagatgcaggccagcagtgcaaaggcggtgagtgcgcgcgcagaggccatcaagaccctggtgaagcctcaggcatcaagcccaagatgccaaagggccccagccgcaaactcagccatctggctttcatcgctcaccccaagcttgggaagcagattcgaagctacacagccaagggtcagaggctctgccaacggaagcctaaggtccaaaccaaggcaggggccaaagctccagctaaggcccaggcttcagctccagcccaggcccccaaaggtgcccaggcccctgtgaaggccccagagaaaaggctcctgccagtgtgaagacagacggactgctgtgacacacctacccacacactatttgcagatggctagtgtcctatgctgtttttacaaataaactcaggcaagatctgttaaaaaaaaaaaaaaaaaaaaaaaaggagttgttgtggtcacggtggctcttcaaaaacaaaaacaaaacaaagtgcgtagctcctgcagtttaccttgaaccatcacaggctcacactcagattaccctggcctgttaccctccctatgtagtccaggttggcctcaaactcacaaagattctcctacctctgcctcttgagtattgggattaaaggtatgactgtactataccataccttttcttaaaaaaaaaaaaaaaaaaaaaaaaacagtttctctcggtgtagcccaggcaagcttcaaactcctcactatgtagctcaggctagcctcaaacttgagaatccttctgctccagcctcagaagtatggagattgcaagcaggtactatcatgcgtagtccctgacagcagtgtggaccaccagcccccagagccctgaaggaataaattttgctgctcagacctcctggtttatgggatttttctgtgcccacagggacgacagtaaacactagaacacacgtcctctgcccactgaactctgagcagcatccaatgctaaaaccacaaaacacacatcgagagcggataagtcaccaacaccaaccctcccttaaaggctcacccccacaggcctatgcggcttcatactcttccgtttctgtggacaacagccttgaaaacgccagtggatgctagagtaaagctgtataagcatgttcaaaaataaatttcatttgagacaggatcttagcccagggtggccttgaactcactttctgcctctacttcctgaatgctgggattacaatagtcatgtccagccacactcagtttatgctgcatggggatccaaccctgggccttatgcattctatgacgactctaccaactgagctacatccctgaccttgtggggttttgtttgtctttctttctttctttgtttttgtttttaaagcaaaaatcatttttagaatagctttaggtttatgggaaaactgcactggcagtagagaaagttctggagagccgagcctggtcgctaacatgttagcgacaactgatggaccagtgccgccaactgatggactcagtttccccggcctttacgggacaccctttcttacctcagagttccatcagcctgtcatgccttcttgggttcctctagaccttggctgtttcttacactttcctccattttcgctaacctggcagttttaagtacagacgaggtaacttttagagtacttcttttgaggtttttctaactatttgtggagtatggttctagagaggaagaccccagaggtgaggtccattgtcaaaagaccgcaagggttggcagcatcaggtgacatcggtgcaaataccgcccttgatcacatattgaggctcggtctgtagtaccggaggcggggtctgtggtactgaggtgggggtccacagtattccttacctcaaagactttccttcacatttccttcctataatttaaagattttttttttactttatgcagatgagtgtttgcctggatgtatgtcggggtgccctgggagtgcccagtgttcacagaagtcagaagagggcatctgagtccctagaactggagttatagacagttgtgaactgacacatggctcctgggatccaaacctgggtcttcttcaaaagcagccaatactttttaacctctgagctatttctccagtccatactacacaggccacgtttgagtggggcttgtaattcctctgcttgggggcactgcctgatcacctccgttcatttattcacaaccttgagggggttctcttcagtagattttattttttagagtattacagattcacagaaaaactgagtgacaaggagagtcagcacatgcatggtaaaacatcaaataaacatactcaacaggcaaaagcccgaagagatcacaaaacaacaacaacaaaaaaaaactgatgaaagaacacaagcactggacactctaagctgaaaagggcaagccaaagccacatcgaggtgctgcctcacagtgtcaagagtgtggagagcagagaccgtgcacacagctgcgagcatccattacacaaccgttatagagggccagctggaggtgtctcaaaaagtaaacaacagagcaaggaatgccacgcggtcgcactcatgatatagtacacgcacaggaagtggaatgggcttgtcagagatctctgcccgctcatggtcactgtgaagtactcaaaacagccatgacttgggaacagcctgaatgtccaccagtttggatccctcatcatctggcaggaagtgacctgcttcctggcaaagaaactcccaccaacagctcctgtccaggaaagagaacgcacatcaggggcatgcggtttccttttcacaactggtcctgctgggctcacggagaggcttttgctaggacccggaaggcccaggtttctagtggaatttcctggggctggaatctggtttcctatttactctctgtccctgggaaaccttccacagggcacaggcaaagccaggttaataatgggcaaatgtcttttatttttccttgtttaagtgaggattcaggcaggacactgcatcaaaccagccatgccatggggttagagagagatttgagtttccttctaagaagcacgagccataaaacatagagccagcgtgctcccacaacagcatgctaccacaacagcatgctccaccccacaacaaacaaaaacttcagttctgtgtatacaaaagtgtcttactttgtgtaaaatacttacacaaagtaaattgacttttttattcatctactatttaccacttatcatttctggtcattttaaacctttgcatggttccagatttttacctggtattattttccttctgcctaaagcaattctttttatttgtgtatcttccagtagcaaagtctttcagtgccccatccccttgaggaaatgacaggcccaggtcactgagaacagcctgaaaatgtcttccgttttgttcttctttccaaaagacattttttgtagcatccagagttctgagttgacattttttatccttaatggagtaggatgtcctcctccttcctcgtttgtgatgtctctggtaagacacggttgtccctcgggagctagataacttggtttttctttgtttgttggtggagggtctctctttgggacctagggcttcccaactagtcaaggctggccatccagcaagcccaagaaatcccactgtccacctccccagcattgagactatgaccatgtaccactgtgacctataaaatcgaaagcaaacaaaacaaaacaaaagaccacaggctctgggtgcaaactaaagtcctcatgttgcatggaagagctctattgactgagctcttgagctgtgtctctagcctcatttagaattatcgtagcatgacattccaggaaaggattttcatgtcaggggctgatgccctgtggccctcttcatccagaagtaacccttttctttcctggctattatcatgcattcttgtcaactcatacaaggacgtccggagcacctctgcatgggctggtattggtgcttctcctgcctggagtcagtggccatgtggactctgaatgccgctgcccccttgctgtgcaagacacacgccagggcacttttgtacactgaatctcgcagagggaccaggttaggcttcctcctgaagccacactcctgttcagctctgcacctctgtcttttccttcttctgttgtttcagggttctcctataacacccccaagtcttgcacaagaatcctgcacttctcagagcctctaggcaacctcacgtaagaccaggagatgaagcttttgaaggctccccgtttactaaatcccactggtaaacactactgattgttattatggggagggctctgtaagccacagtgtgtgtgcagagctcagaggacaattttgtgggctcatttcctttcttccacctttccatggtttgggagattaaacttaggatatcatcttctgtggcaaacaccttatcctctgagccacatggttggcccagtccctcactttttaaaaagcagatgtcagctagatgaagtagctttagtccgaacacttgggaggcagaaggaccctggtctgtgtagtgattcctaggaaagacagagctacatagtgataccctatctcaaaaaaacaaaacaaaacaacaacaaacgaggaggaagacttcgagcacaaggaaggaaggaaagaaagagagaaaacagagagagatgtccactgaagacaattagaatttacccagttggcatgaagtctatggctctctggaatgtgtaggcggttgaaggaagatagagagaggcctaaggtgaaggcctaattgtgatttgctagtgactaaacatttgtgcaaactttggcttcatttgtaggttgaacactaatactccgtggctggggttaggaggtgggggcctctgggaggtgattaggtaataaggctgatacatcccattttcaggatgatggtagaagtcctggagccttctattctccttctaccatatgaaccaggaaatgggctttcatcagacacagaatatgccagagtcctaatattggatttcccagtctccagggctgcgagaaaattctgctgcttgtgagccacatggtgcatggtattttgttgctgtagcaactcagatgcactgctgtctatgtggggtgaggtctgtatcccactgggtctggctggatcaagagcatatgcctatgttggcttgggaatcgtgaggccagtgtcaacctgaacgctgtttgaggtcacccacatgagcttgatctccttcccacttggccacctttgtctggagaaaacgctgtgagttatgattaaattactctagatttccttctgtattttgccttcatctctctgttttcctttacttttgtttaatcattgctctgaaccctagcaacaaggcaaacttgcaagttagccctctctggtctacccaaaagaactggccattgatccctgaggcccagtataagatttaaagttcagaaacactaaagccacagctaggaacagtgattaaatggaaaagcagagtagacaaaagcgaaggtacaaaataaggaaggaaatttagggtagttcagagtttaatcatggccccccaccatcttctccagaaaaatgaggctaaatggaaaagttgaagcatatgtgcacatacacacacacacacacacacacacacacacacacacaccagacacacacgcatatgctcactttgctacccactctgnnnnnnnnnnnnnnnnnnnnacagcagtctaatgttagtcttttctaggagccactattactttacgatgtgtcaccccacaaaagtattagtattagaaaagatcatctaaagacactaaatgattttcaaaaattattaggagatataaattggattagaccttatttaaggatccctacttcggagttaaaacctttatttcaaattctagaaggagactcacatattacctcattgagacaattaacacctgaggcttctgatgttcttaggaaagtggaaaaggcgatccaaacagcacagttaactcgtataaatgagcaagaacctttgtgcctatgcatattacgcaccatcaatctgccaactgctgtgttatggcaagatggtcctttagtatggatatacccacatatatcccctaataagactatagagcattatcccaccatggtagcaaacatggcacacaaagggataaaaacttcaatcactcactttggaaaaatgcctgatagcataattgtcccttatgctgtcgcacaaatgcaaatattgtgtgctgctatagatgaatgggccattcttagatgcagttattctggtttaattgataatcattatcctaaacatccgttattacattttatgttattacatccagtaatatttccaaaggtaatggctaatacccctataaagggagccattgatatttatacagatggatccaaaacaggagttgaaagttatgtaatcaatgaaaaggctgtaaggttgcaatttacaccaggagcccctcaattggtagaatgtttggtggttttagaagtctttaaaagatttcctatgcccataaatattgtctctgattctgtttatgtagttaatgcggttctagcattagagactgccggaaattttaaacagtccagtcctgtatctgaaattttgatgaaaatacaaaattgtattttgatgcgtgagcatcccttttatattcaacatattagagcacatacatcattacctggacctatggttaagggaaatgccattgctgactcagccacaagagacatggtttttctattacaaggttctatagaaagtgcaaaaaaaattttcatcaactttatcatgtccctgcttctacattacgacaaaagtttaagctcacaagaaaagaagcccgagatattgtcctacagtgtggtaaatgtgtagaatttgttaatgcaccttccgtgggtgttaatcctcgcggattgcgacccctagatgtttggcaaatggacgtaacgcatatcccatcttttgggaaattacaatatgtacatgtatccatcgataccagttcctggtgtcctacatgcctctcccttgacaggggaaaaagcagttcatgtcatatctcactgcttagaggcttgggctgcatggggcaagcccctagtgttaaagacagataatggtcctgcatatacttcttctaaatttagccaattttgcaaacaaatgcaagtaaaacatattactggattgccctataatccacagggccaaggcataattgagaaagcccatcgcactctgaaacaatatttgcaaaaacagaaagggggaatagaggctatgacgccaaagatggctctatcccttacaatatttactcttaattttttaaaattggatgatgctggaagatcaccagctgaaaggcacggacaatggcctcaatcgcccaatgaaatggtcaaatggaaaaatgtccttgataataaatggtatggcccggatcctattttaatcagatcccggggagctatttgtgtttttccacagggtgaagaaaatccactttgggtcccgacacgactgacaaggaccgtgaaagagcaagatgaaccccaagatgattctcctgctcctgatgattgagactgggataagtatacctttgtgggccatagtaagatcatggccagtacctttaccggtacattccaattcttctaccttgcctttattttttgcaacggaatgttatttggatgcgccttgtgcacgacaaactcctcaagagccacgggtgtataatagtactagttttcatttgaattatacactatgctttgtgcataatgtggataaaccttttacaccctgtatatttttaaagaaaaagattatctctaattgggcagatcccattagccaaaataaggggagctctggagtgttgtttaatgctttaacacaagttgctcaaggagcgcaatcaggctcaggtgatgttgaaaataatataacttcacctataaacatcaccactattatgataaagggaaaggtgaccattcccaaaagatcacgatggcctgttggcaatgctactgctatacgcagcatgccttggtgtcatccggacctcgcatttcctatagttttttcaccttgtcaatcaaaaatttttcctcgaaaagaaatagcaaagggttttgttttgtcacccccactagattttgctataatgaacgataaaggagatgctacagggaaagaaaatatttggccatattaccaatggattttaagcaatgaagcaggtgctagtaccagtctgtcagcctttgcattgctgactggaacctttcatgagatattgaatgtttctgccactctttccaatacctctactcatttagataatgtgacaactaatagaattatcagaaatatgactacttctccagtagaagtttgtgtcaatcctccatttttctttatattggctgaatttcaaaataatacagaatggttagattgtacaaatgtcacttgttttttgacgcaatgctggaatggaaccaaattcttagccttagtggttcatctaccaatctttgtccctgtgcctgttgaggcagatccagagaagttcccaataacgagtcttattcggcaaaagagaggttttggaatcacagctgccattattacagccattgtgatgtccgcggcatcagcagttaccgcaggaactgctatggcccatcaagttaatactgctgacaccataagtcagatagcagaaaaatcctctgaagcattgcttaccctgcaaaaggtggattctcatatcgcctcagggttaatgttagtgaatcagagagtggatattttacaacataatatgggaacggatgatgggannnnnnnnnnnnnnnnnnnnacttgcaagttagccctctctggtctacccaaaagaactggccattgatccctgaggcccagtataagatttaaagttcagaaacactaaagccacagctaggaacagtgattaaatggaaaagcagagtagacaaaagcgaaggtacaaaataaggaaggaaatttagggtagttcagagtttaatcatggccccccaccatcttctccagaaaaatgaggctaaatggaaaagttgaagcatatgtgcacatacacacacacacacacacacacacacacacacacacaccagacacacacgcatatgctcactttgctacccactctgcctcttctactctccctgggaagaaagactcttgcatgaactgtttggacaatcttacttttggactcaatcgacagtctgagcagattctaaatcccccccaaatgagagacatttctgaagaggctaacagtgaagaggatgaggtctagaactgctaatatgttctaaaccagaaggaccacttgcaagaaggccacccacctcaccctggattcttgtcgtgtttccatctaagtcagaactagaatagcaatagttagggatgagggtgtgccaggaaacttggtaagactgggcaggttaagaagccctggaacctctgggcagaaggtaggagcttcacctgtttctgaccagacccccatggagaggatcagaccatcagtcacttagggacagcaccccctaagtccctccacatgcagatgaggcatccctaacatctcagaccaagccaatagaacacatctgctgtcagaccccaacccatgccccaaatgtttataagatcctatccagaaggaataaaggtgtgtgagaattactccatggcctgagagcatctgttgcctaagggctgtaacactccctggggaagagagtccttttggcccactggaaactcctctgcaccttgatggatagttgagcccggagccctccgcaggctctgcacagggcagtgtctgggtcaaagcagcaggcatacttccctctctctgattgctccctctccccttcacttgaaagctcccagagggccagagatttccgtacaccgactgacataagaacacacctgaatattccttgtaggtgctgagaacacaatctttaataccctaggagaattcaccatgtggagatagtgtccagtgcacactgctgtgcctcactaaattatcatgggcacagtgataactaatggctgcagaggatattacagatttcaaaatatcttaccacagtttcttatcttccactgtcttaatccattcagaggctgaatggcttagaaacaacaggacctgtgcatttctggaggcgaggagaatcagtcagatcaaggca

SEQ ID NO: 256 - DNA, 494 bp, Mus musculus
gcgtggccaagtccaagaaccacaccacacacaaccagtcccaaaaatggcacagaaatggcatcaagaaactccagtcacaaaggtacgaatctcttaagggggttgaccccaagttcctgaggagcatgcgctttgccgagaagcacaagaaaggcctggagaagatgcaggccagcagtgcaaaggcgcttgggaagcagattcgaagctacacagccaagggtcagaggctctgccaacggaagcctaaggtccaaaccaaggcaggggccaaagctccagctaaggcccaggcttcagctccagcccaggcccccaaaggtgcccaggcccctgtgaaggccccagagaaaaggctcctgccagtgtgaagacagacggactgctgtgacacacctacccacacactatttgcagatggctagtgtcctatgctgtttttacaaataaactcaggcaagatctgttaaaaaaaaaaaaaaaaaaaaaaa

SEQ ID NO: 257 - protein, 123 aa, Mus musculus
VAKSKNHTTHNQSQKWHRNGIKKLQSQRYESLKGVDPKFLRSMRFAEKHKKGLEKMQASSAKALGKQIRSYTAKGQRLCQRKPKVQTKAGAKAPAKAQASAPAQAPKGAQAPVKAPEKRLLPV

SEQ ID NO: 258 - DNA, 22297 bp, Homo sapiens
  misc_feature (1)...(22297): n = A,T,C or G
gtcagggaaccccctcctggctgcggcaacattccctccaggcgccgcccccgcagcccccaggcccctcctctgcgccagggtgggagctcagtaattcaagttatttttagccaagctgcatcctccaggagattggagtcaaggggaagccacccccgcacctccaggagctgcttgcggaaagagtgatcgattaaaaccagtgctgcaagggccctgtgccaggcaggcagcaggcgctgagacaggcagagccaggaccgtgggcctctcacccgctggctcctaggcactggtgccgcgttgttaggagtggtgggggtccccacatgtccctcactgccaccgctcagcagctgcttgtcagcccaacctcatctgaccctgtccccagcagccctgcccacggggaggagggccaccgcagagccatccccttctcttatccccactctgggcgggattctttgcctctgtccccaccagcctctgcccaccaggggagattggggagggcagagaaggacccccattttgcctgcctggtcatctgtccaatctgagccttgtcctaggagacctgctgggtgggcagggacaaccctgaccccctgactgccagcacctggccctgaggattactgggaaatggggaccaaagccgcaggtgggcacaggagtaggcaggtggctgggggattaaccagggctgaggagtgcctgggtgagccagtgactgagcaatgtccacaggccaggccctggtaggtgctcggaatgaacaggtccctggatccccaccacagcctgccaagtaagtgatgccctgctccccctctcccagatgaggaagctgagccttggggttgagtctctgctcaaggtcacccagctgcctggcatccaggcaggtctggaccgtgctccccagccctcgccagtggctgcctgctgagggggtgcctgagaatttgaagaactaatgagtgggtatggggccgatgtagaaagagggactaacaaatgcaatattgcagggggacgcctgctggatgaggtgggcccgagtctcctagcacctgtccccaccttccatggacacctcagcactgtccaccagagggtcactccttccggtaggcgtccccttccttttctcaagctgtcatcttgggatgacacttcctacacttgggtgacacacttcccacctgagtgtaagagtctcaggcagtgtccacgcccaggagagtttcaaggagcggctttgatggggagaaaaagctgggtgatcacgggcaagtcgctttacttttctgagcctgtttcctcctctgcaacgtgggattaacaggcgaggacactctgagggtgtggtgagaaccagccacaataaaggcaaagctcctgactccagcccccagcagcaggcccctttctctgctggcgcccaggacttgggctgtgtgcgggaaaggcaagagcaccctcttccggccaggccttggggtcttcagggtcgcagcgacagctcagggaggtccggatcagctgggagagctatgagagcaaatgccaaccttcaccctctccagcccactgtgttctctccacctccacctgatcgcacagggcctgcctcatcttccagggaggctcccagggcgctcctccaaccccagaaggtttctggagcctgctggcctggcttgaatggagccctctctggtctacatctaggggtgctgtgcccacagcttcctcccctcccagcctccccggctctgcataccgtaggtgctccaagtgatcatggcagtagccctggcacagcagatacaagaggtttggggctgggaccccctcccaggacctgtccatagctctgtgtctgccgcctcatgggaatcttgtgtagcctgtgtggccgaccttgtttacgtggaggtgggattgggccatttagcagcctctgagaagttgagtgacttgccagggacacagtcaagaaagggctgcccttgggccagaacctgctgcctgcagccacaagcccttcgtgctcaggggacactctcaatgggacctttagaatccccagccctctcagaattctagctcctctctgatcttgctagagtcccgtgtgccgccctaaacagggccagaactcattctccttccttagcctatgttgcgctggggcctgggagggggttactgaagcactaagtttaggaaacccaggaacaccaatggtagggaggcaggcacctctcagggaacaaaagtgggtgagggcagccaggggctttctctggactcaggagagaaacatcagcaactgccttcccatggggtgcaggtctcctgtggccctctgtacctagccactcctcgggccaacggtagcaaatgcagcctccaccctcatcccggctcaggcctctctggttccctccctgactctccaatactcactgtgtgcccttgagtaaattcctcctcctcttagacctcagtttccccacccattggcttagagaggggaactagatgatcttcaaacccccctgctccagcgcttgtttcctaaactccgccaggggctcctgggtcacagcctctgtctcctgggagggagtgaggactgggagacttggggcttgaaatctttgggagaagacagctcccttgttcattcagaataattctttcaaaggtcatttcgtcctgtcctgtctccatcttaaagagttgtccatctgatccctaggaaggggcggtcctgggatgcagccagggcattaaccccaggactgcttggtgagcagagaagtcctttctccccagcccgccaagtctctctttagtctgagctgggaagagagggagggagggtacaggcgagaggtgcatccaggcaggatggggttaaaggagaaagggagctagaagggggctgtggttgccaaggcaacgacattgctggggccattggagcctgctggggagggaaaggagaggggtgtccctcccaaccctcagcttcattcttccttttcagatgctctttgttaaaagggaatctccgtagcctccttttgtggctgggaacaggagtggggagagatacttcgggcttccatccagccctgtccaacaccctcatgtcacccacctaccctatcccttccctcccatccttcctagcaggtcggttttctgtgctgctggacttttcttccatttatacttggccagtccttggctgcctgaggccaactgaccccagcccaggcctgctcaggcagcagcctgccctccacccaaggacactaccacctcctttgtaggcctgctctggatgtggcaggtgtgtctggcagaagcaggggctggcacagaggatgccctcactctgggcatccgttggccataaaggccacgggcttctctcgtcacatggcagtcactgtcacaaggccccctccatggcctcattgggtacaaaccaccccgtgcccccccagattctggtaggtgcctggactgcagtagctctccatttggctgtgggacctctagccagtcatgcccaaggactccatctccccacctgtgaagtggggtgataaaaaccataccccctccaaaggctgctgtgcggtctcacaatcaaacccgcgggcctcccaaatgcacagcgaggctctgggaggcttcctgcctcctcagccctggtgctactcgcctccactgtggcaggcaggctccaagaggtgaagatgctctgctggtgagtggcagtcagaatcgaaaaccaagtctgtctgatgccaaagcctgttcctttaacccacaagaggcatcgcccttgggtaagtctaaagtgggccaggaggggctgtgcccagggatgcccacaggctctacttcctctgccttgaaccctctctgggggaagacaactcaccaccaccaccaggaacttggagctgagggagacctgacccagcctagagaacctgttcaaaatagacaggcactgaatctggaggtgggggtggtggggcgtgctgagaagcgcagctgtgaaaggcctgggaggctgcaagagtgtcccgccggaggggagcgggtgcctgtctacagcccacctgcagcaccagacttcatccgcggtcccactctgcccccttgcggacgataggctcacatcccggctcactcctgggctaggtgggccaggtgcgcccccagagggagatcaggcctggggctgaaaggggcgcgcgcgcgatgacctgaggaatgggccgcaccttccagtttctgctggaaatgactctcttttgacagatactgagcaccagcctggcgttgcatgcagcccatggccctttccttctaccaggagctttgaatcccaggctcctggtggggagtgaacttaactctattttccaaccctgcattccactttttttttttttttttgagacagagtttcactcttgtttcccaggctggaggacaatggcgcgatctcaactcactgcaacctccgcctcctgggttcaagcgattctcctgcctcagcctcccaagtagcagggattacaggtgcccacccccacacccatcttaattttttgtattcttagtggagatggggtttcatcatgttggccaggctggtcttgaactcctgacctcaagtgatccacacagctcagcctcccaaagtgctgggattatgggcgtaagccaccatggctggccccctccatcccatttttaaacccccaaccccagggcattcaatcgctgctggcaaaacccttgtatcaggaagctcactactgctgggagcagcccatattttggagggaattctgattgcaaaaatgccccttgtccacgaagctggcatttgctgtcctcagtcacagctctgtcttctagggacacacagaatcaggtagcccctccctcagaaagttctaagcagatccaaagtcccaaagcccaccccacctccacacttctgtcttgtgggggtaaaacaaccagataaaacaccctggttctgacaaccttcacagtccctcttacctgaaaacactggtagtccctgtatctcaggaacctcagaggctgaagggacccagcccccgcgagcaccgccactttcctccaccttggctttctcttgttgttccttggatcttgtccttatttttagcatccacttgccactgattttctttccccaagccccgtctccctcacctgaggccttgtggggaagatgcatggatgggactaacaatgattgagcacctactgtgtacttaacatagtgttctgtgctttactcaaattatccagtttagccccaagaggttattactatttttatccccacgttacgctgggaactgaggcttggcaagcaaggctctgggtccaggagaagagctgactcttatctctgagaaatccctccaggccagctggcttctccaccctgattctgtcatcttcctggatttgtgaaatgtgcacatttaactcctcaaacatgtatcaggtccccatatactcctgggactgtgacaggaactgcaaaaacaaccccaggggtctccaaccccatcactttgctgaggagacactatgggatcctactcgggctttgaattgggtaatgggtctggacaaggcctggtcaagacaacacccttgcaggccacatgggttgggctgatcacatccagccccatccagccctatcttgtcacccaggctcacatctttctctgccttgtgcccaaggcatttgagagagacctggcttatgctctgctgagtccagatagtggctctgcccaagtctactccatggaggaggcaagtggagcccggcctccaggcagatttgagatggagcaagaaccactcactcatggagggtgagagtgtgtcaaccctagaggaaaggttaagttctttgcctttttgtatgtgtgtgccagagactccattgacatatggtgatatttattgacctcttctcaaaataatgtttcaaaatatgtaaaatagattaagattacaaaagattttcatgagcagagaaagatgtccacaaattatgactaaatgcataaaatcaggttacagaagagttcatatagtgtaagtttccatttatgaaagagaggagtgaaaaagggagggaggaagaaaagaaagaaaggagggagggagggagggaggaagaaaggaaggaagggagaaataaagaaaactatccctagaaagaatactatctttatagacatggatgaccctaccatccatcccactttgaaaagcatgacagggactaggcgtggttggtcacgcctgtaatcccagcattttgggaggccaaggtgggtggatcacttgaggttaggagttcaagaccagcctgaccaacatggtgaaaactcatctctactaaaaatacaaaaattagctgggtgtgatggcaggcgcctgtaatcccagctactcaggaggctgagccaggagaatcgcttgaactggggaggcggaggttgcagtgaactgagatcgtgtcattgcactccagcctgggcaacaacagcaaaactctgtctcaaaaaaaaagaaaaagaaaagaaaagcatgacaggtcagtggctccaggtcatggtcccctttggctcctggacaggtcccctcaggtcacagccaaagttcctcattcttgtcactgactcccccttgcctaacagctgggatttaactctgggccaatccctaacacagccccagtggtactgcatgaccatcgtccatctctgaatctgcctcccccgtcagaccgtggctttctgctcactgctttttctgcctctgtcgtaacagtctagctaaaccaagtcactactcactttttaggagctgcgggagtcgctacccagctggaaggccacatagcagggcagcctggttcttttaaagtcatcacaggctggacatggattacaggctcacgcctgtaatcccagcactttgggaggccaaggagtgtggatcacctgaggtcaggagttcgagaccagcattgccaacatggtagaaccccgtctctactaaaaacacaaaaattagctgggcatggtggcaggtgcctgtaatcccagctactcgggaggctgaggcaatagaatcgtttgaacccaggaggtggaggttgcagtgagccaacatcgcgccattgcactccagcctgggcaatgagagcaaaactctgtctcaaaataaataaataaataaataaaataaataaaagtaaataaataaagtcatcactgcccccgctgtcagcctctaccctgctggcttctctttctcaaggatgtggcagtcagacctcctcctccctgtcccagtctccacagccacctcttcaacttcctgagctgaagtcctgacttgctgtcaggcatcacaccacccccacctcctgtagccccctgtctttgcccaccaggttctctacctgtgctcagcaccccacagggannnnnnnnnnnnnnnnnnnnnnnnnnnnnnnnnnnnnnnnnnnnnnnnnnnnnnnnnnnnnnnnnnnnnnnnnnnnnnnnnnnnnnnnnnnnnnnnnnnnnnnnnnnnnnnnnnnnnnnnnnnnnnnnnnnnnnnnnnnnnnnnnnnnnnnnnnnnnnnnnnnnnnnnnnnnnnnnnnnnnnnnnnnnnnnnnnnnnnnnnnnnnnnnnnnnnnnnnnnnnnnnnnnnnnnnnnnnnnnnnnnnnnnnnnnnnnnnnnnnnnnnnnnnnnnnnnnnnnnnnnnnnnnnnnnnnnnnnnnnnnnnnnnnnnnnnnnnnnnnnnnnnnnnnnnnnnnnnnnnnnnnnnnnnnnnnnnnnnnnnnnnnnnnnnnnnnnnnnnnnnnnnnnnnnnnnnnnnnnnnnnnnnnnnnnnnnnnnnnnnnnnnnnnnnnnnnnnnnnnnnnnnnnnnnnnnnnnnnnnnnnnnnnnnnnnnnnnnnnnnnnnnnnnnnnnnnnnnnnnnnnnnnnnnnnnnnnnnnnnnnnnnnnnnnnnnnnnnnnnnnnnnnnnnnnnnnnnnnnnnnnnnnnnnnnnnnnnnnnnnnnnnnnnnnnnnnnnnnnnnnnnnnnnnnnnnnnnnnnnnnnnnnnnnnnnnnnnnnnnnnnnnnnnnnnnnnnnnnnnnnnnnnnnnnnnnnnnnnnnnnnnnnnnnnnnnnnnnnnnnnnnnnnnnnnnnnnnnnnnnnnnnnnnnnnnnnnnnnnnnnnnnnnnnnnnnnnnnnnnnnnnnnnnnnnnnnnnnnnnnnnnnnnnnnnnnnnnnnnnnnnnnnnnnnnnnnnnnnnnnnnnnnnnnnnnnnnnnnnnnnnnnnnnnnnnnnnnnnnnnnnnnnnnnnnnnnnnnnnnnnnnnnnnnnnnnnnnnnnnnnnnnnnnnnnnnnnnnnnnnnnnnnnnnnnnnnnnnnnnnnnnnnnnnnnnnnnnnnnnnnnnnnnnnnnnnnnnnnnnnnnnnnnnnnnnnnnnnnnnnnnnnnnnnnnnnnnnnnnnnnnnnnnnnnnnnnnnnnnnnnnnnnnnnnnnnnnnnnnnnnnnnnnnnnnnnnnnnnnnnnnnnnnnnnnnnnnnnnnnnnnnnnnnnnnnnnnnnnnnnnnnnnnnnnnnnnnnnnnnnnnnnnnnnnnnnnnnnnnnnnnnnnnnnnnnnnnnnnnnnnnnnnnnnnnnnnnnnnnnnnnnnnnnnnnnnnnnnnnnnnnnnnnnnnnnnnnnnnnnnnnnnnnnnnnnnnnnnnnnnnnnnnnnnnnnnnnnnnnnnnnnnnnnnnnnnnnnnnnnnnnnnnnnnnnnnnnnnnnnnnnnnnnnnnnnnnnnnnnnnnnnnnnnnnnnnnnnnnnnnnnnnnnnnnnnnnnnnnnnnnnnnnnnnnnnnnnnnnnnnnnnnnnnnnnnnnnnnnnnnnnnnnnnnnnnnnnnnnnnnnnnnnnnnnnnnnnnnnnnnnnnnnnnnnnnnnnnnnnnnnnnnnnnnnnnnnnnnnnnnnnnnnnnnnnnnnnnnnnnnnnnnnnnnnnnnnnnnnnnnnnnnnnnnnnnnnnnnnnnnnnnnnnnnnnnnnnnnnnnnnnnnnnnnnnnnnnnnnnnnnnnnnnnnnnnnnnnnnnnnnnnnnnnnnnnnnnnnnnnnnnnnnnnnnnnnnnnnnnnnnnnnnnnnnnnnnnnnnnnnnnnnnnnnnnnnnnnnnnnnnnnnnnnnnnnnnnnnnnnnnnnnnnnnnnnnnnnnnnnnnnnnnnnnnnnnnnnnnnnnnnnnnnnnnnnnnnnnnnnnnnnnnnnnnnnnnnnnnnnnnnnnnnnnnnnnnnnnnnnnnnnnnnnnnnnnnnnnnnnnnnnnnnnnnnnnnnnnnnnnnnnnnnnnnnnnnnnnnnnnnnnnnnnnnnnnnnnnnnnnnnnnnnnnnnnnnnnnnnnnnnnnnnnnnnnnnnnnnnnnnnnaatgtaaaaattagccgggcgtggtggtgggcgcctgtaatcccagctactcgggaggctgaggcaagagaatcgcttgaaaccggaaggcggaggttgcagtgggccgagattgtgccactgccctccagcctcggtggaagagcgaaactccgtctcaaaaaaaaaaaaaaagaaaaagaacacagatcttcttgcccaacaacatccctcaaggactcctttctttttcagtatcttgaataagacttaagagacaggtcctggagaaacagagaagggaggaggcagcctgaagggggcggaggcaagctcgtagcaccgcctccacgtctggcttgcgttcttccgggcttcggaacttttcttcgcggagcctggggaagcttttccagtagtactttccggcgttgttgaccctatttcccgtgctgcaccgcagcccctttctcttccggttctaggcgcttcgggagccgcggcttatggtgagtgttggccgcgcggcatccgatgccatccgcgacttacgggtggcggcggggcgcgggctgcggagaggactggtgaccgaccgtgtgtctgtcgggagcaaaagctgcggggtgggaatggtgcttctaggtcctaggagggggatggcagggaaagccactttattggggaatgcagctttccgggggtaaggagttgatttcagggcatcattacctgggtttgggaggccaggactggcgtttggtcgtgcagagtaagccgagactcgtggaggctgcacattctctgcctgcaggctcattctgaccagaatggggggggcagaggtggcccagcctggcgagcccttaaccctgatctccacttttgtcttccaggtgcagacatggccaagtccaagaaccacaccacacacaaccagtgtaagttttttgggccctgcctacatcccagaccctggcaaggactggttcaggcaaactgggacagagatgaaggggcacgtttccattgtgggcctgaggctgattgatttcacccagtaataactttagggtttataggtttagagatctacttgagatacagagtgttttgcatttagtagtaagggtttcccatatctcaagtgtagctgctgtaggaagtgttggttctcccagacttgccagctgtgatgttgggtggtcttattagaggaaagttctttgttggcttaattccctttttttctcccacagcccgaaaatggcacagaaatggtatcaagaaaccccgatcacaaagatacgaatctcttaagggggtgagtgcactgaatcacatggaagtgtcttttcttggttccaggtgcacagtcaaggcctctcatgtagtttttctctagctttggcttctgcctgagcacagcctaactggcccacccaaagcctgcaattcctttttctaccctaccagacccataataaagctttccttggtctccacagcctgaagtgtaaccctctggtcagggtgtaacctgcctcctgagggcagtttggctatctcccttgcttggcagtggcacttagggtaaggagtggccttgtctgagtgcgtgcagggcacattcccacactgaccagccttatgacctccatctgacccagtgctggagttggggtcagcttctcttcctgtgtcagggggttctaaggattagctgagaaggctggagggtctaggggagagctgagcatgtccccagtctgttccttccctttacttttgctctctgttccgtggagtgaatcacaaactctgagcctcagtttccccatatcccaccttggctataagtcttttggaccagacttggtatttaattgacaccttcttctaaagaggggagggggtgtccctgaggggatgtcaggaaaaaacttggtcgaacccctgctgtaggaagttgaagccccacaaccttggcagacagggcagcaaagcagcttgtaattttgttcttgaaggaggtctgcacagcattacccaggtggcgtattggctccctggggtggtggtacactttctctggaaatagtttcaagaggttgggtatttccacatttgaggttgacttgatgctgtctttagaatgctgggtacccctatggagaggggcagcagggagagacttggggacccacatgctgccacctgtacctttcctgcttttcaggtggaccccaagttcctgaggaacatgcgctttgccaagaagcacaacaaaaagggcctaaagaagatgcaggccaacaatgccaaggccatgagtgcacgtgccgaggctatcaaggccctcgtaaagcccaaggaggttaagcccaagatcccaaagggtgtcagccgcaagctcgatcgacttgcctacattgcccaccccaagcttgggaagcgtgctcgtgcccgtattgccaaggggctcaggctgtgccggccaaaggccaaggccaaggccaaggccaaggccaaggatcaaaccaaggcccaggctgcagccccagcttcagttccagctcaggctcccaaacgtacccaggcccctacaaaggcttcagagtagatatctctgccaacatgaggacagaaggactggtgcgaccccccacccccgcccctgggctaccatctgcatggggctggggtcctcctgtgctatttgtacaaataaacctgaggcaggatttgttagcctctgtctatgatcctggggatgggtttggttgctccatctgttggtgtgggagaagacatgggtctggatggtggggtgtgggtgggagtcaggagatggggccctgaagtgcaagaggaggacctaatgaatgagaaatgattgggggcttttgggaagctcgggcacatagcttgctggactgtgtaacctgccgagcaaagggagaaatttttttttttttttttgagacagaatcgtgctctgtcacccaggctggagtgcagtggtgccatctcggctcactgcaagctccgcctcccaggttcacaccattctcctgcctcagcctcccaagtagctgggactacaggtgcctgccactacacccggctaattttgtttttgtatttttagtagagatggggtttcactgtgttagccaggatggtcttgatctcctgaccttgtgatctgcctgcctcggcctcccaaagtgctgggattacaggcgtgagccagtgctcctggcccaaagggagaaatcttaaacatcctcatgaggtcttaaagcttactgcaagggaggggaaggggccccgctgagcagctctgcactctggcctgaggtgtcccagatttgggctcttttggtgcacctggtcagcatccactgctctgggctatgttagtcccccaacagctagggacccaggaaggcaggtggtagtggcactgccttactcccgtgactggttctgacccttctgtgcccctgggtcagctgcttcacatggaggtctttatcctcagcagtcagtgaagaaagtactgaagtaatagtaagcctttgtggaggctgcctatagaaggcaccacgtgggcacttcctggccgcacttaatcctcaaaaccagccttggtccaacctcggacactttagaaactcctaaaggggtgctgttatgctacagctgcaggtgcagcccatggcatgtgatcccctacttctgaagtaggtattatgattatctttgtttcacgggtgagaaaatattgaagataatgaacctacgaaggggtgggggtagcatttgatctaggcagtccatgtggggccctaggaggtttcaattgcccaaccagagctggggctgctagctcttgactgtaatcctggaagtctctgggtggccaactgccccttgccaaggcatgacaggtggaggtgggtttgaaagggagcaagagcaggttctgtgttctgaaggtggtttggcccagacaggccaccaggttgatgacttccaaagtgaggtctctgtgctggtgtcctggacatggggtgtgaaggttctcctttccccagccatcctgccatgaaaaaggagtgatccctttaccaagttccggtctgaggggggaggccaggtcagggcttcagctgggcttaaggttacagccaactgctaccctcagcctccagcttgtacatggaacctgccttgtgctcaggaagcacaaattcccagttcttgagtttcaactccttcacctccaagctctgttgtctggggcaaactatattagtggaacctgtttctttttcctttttttttgagagagtctcgctctgtcgcccaggctggtatgcagtggcgtgatctcggttcactgcagcctccatcccctgggttcaagcaattctccagaatcagcctcttgaccacaggcacatggcaccatgcctggctactttttttatattttcagtagagagggggttttgccatgttgcccaagctggtcttgaactcctgagcttaggcaatccgcctgcctcagcctcccacagtgttaggattacaggcatgagcaaccgcacccggccaatggagcctgttcctgcatcactagtgggacccggcttccatcacaagactgctgtaagggttcaatgaaaagcaagccagtctaggccgggcgcggtggctcacgcctgtaatcccagtgtgtccggaattgggttcttggtctcaccgacttcaataatgaagctgcggaccctcatggtgagtgttacagctcttaaggtggcgtgtctggagtttgttccttctgatgttcagagttttttccttctggtgggttcgtgatctcgctggcttcaggagtgaagctgcagaccttggtggtgagtgttacagctcataaaggcagtgtggacccaaagagcaaaagaacaaagcttccacggtggggaaagggaccccagtgggttgctcctgctggctccggcagcctgcttttattctcttatctggccccacccacatcctgctgattggtagagcccagtggtctgttttgacagggcgttgattggtgcatttacaatccctgagctagacataaaggttctccaaggccccaccagagtagctagatacagagtgtccattggtgtattcacaaaccctgagctagacacagggtgctgattggtgtgtttacaaaccttgagctagatacagaatgccgattggtgtatttacaatccctgagctagacataaaggttctccacgtcccccaccagactcaggagcccagctggcttcacccagtggatcccgcaccggggctgcaggtggagctgcctgccagtcctgctccgtgagcccgcactcctcagcccttgggtggtggatgggactgggtgccgtggagcggggggcggcgctcatgggggaggctggggccgcacgggagccagtggagggggtgggaggctcaggcatggtgggctgcaggtcccaaaccctgacccgcgggaaggcagctaagacccggtgagaaatcgagagcagcgccggtggcctggcactgctgggggacccagtacaccctccgcagccactggcccgggtgctaagcccctcattgcccggggacggcggggacggcagggccggccggctgctccgagtgcgagtgcggggcccgccaaacccacgcccacccggaactccagctggcccgcaagcgcggcgggcagccccggttcccgctcgcgcctctccctccacacctccctgcgaactgagggagccggctctggccttggccagcccagaaaggggttcctacagtgcagcggtgggctgaagggctcctcaagtgccaccaaagtgggagccgaggcagaggaggcggggagagcgagcgagggctgtgaggactgccagcacgctgtcacctctcaccagcactttgggaggccgaggcaggcggatcccctgaggtcaagagatcgaaatcatcctgttcaacgtggtgaaaccgtctctactaaaaatacaaaaattagccggccgtggtggcacgcgcatgtagtcccagctacttgggaggctgaggcaggagaatcccttgaacctgggaggcggaggtgaaaccccgtctctactaaaaatacaaaaagctgggcgtggtggcgggggcctgtagtcccaactactcaggaaactgaggcaggagaatggcgtgaacccaggaagcggagtttgcagtgagccgagatcgcgccactgcacgccagcctgggcgacagagaaagactccatctcaaaaaaaaaaaaaaaaaaaaaaagccagtcaagtcctggctccttgtcaactgtgagcaggagtgattgttatttctattagtactaagcctgcagcccagagccaggctctggacttctggctacaactagaaacttaaaaaatccaactatcccaccccagccctgtctctcctgccccatgctcagggaagtcagaacaggatagagcagatctggctagatcaggctctgctactggggccatagtttactcttggtactacctgggggtcctagcaaggctgagatgaaagcccagttcctgggcctctgcacacacagatccagggtgctgaggcctctaagatgaactgacctagtctaccagggaccctgcccctctgtggcccctgctgccaacacaagggtgtacaggttttgacaggagccagcagtcaccgttggccctctgcctgcccctcatctagcaggggcccagctggtgctattctggtactgtctcaggatcccagatgtacacccaggaagatgggagtggttcctgaggtccttagtatccctctttaatgggaatggaatccctgataggtcagaactaagtatggtggccactcaaataggaactgtggccctttcttgctaggcacagacatggctggatggtactgaatgggtgtgctgtgtcaaggggcacagagcagtgtggggtagtggggaagtgctaacagccaggctcagtttcctcatctgtgaaatggagatggtaacatgtccccaggaaaaggaaaattcttgctccacgagtgtccttgtgttagtacttcagagacagccctgtccatagactttattatttggaagggggaagaggaggtccttggcactggttgggatggaagccccaggggcaaaggtttaggagttccagggctcagctgtcactgggcagggcaggcacactggcaagggcaggcagcaggcgtgtatatatgtccaccccacggaggaacacagcctcatgcagccgttcatcgtggtcgtgcagcagcacaggtgtgcggttcatgggtgagaagcctagagctgggacccccacctgcaggggtgaggaagagccgttagggaaaagccagcactcaggcccagtccactgcccaggcactatatgcaagtggctcaccgcgcggatatagcggttgtcagtggcagcaggcatgatctcaggctccagagtgaggttcctgtaggagaaagagcctgatgaatggggagggagaaagcgaagaattgaaggggcaaaggaaggtgggaaagaggtgggagaaggagggagaagggagggggcagcaggaaggagaggagtagggggctgggctgtgaggagagctggccagcgtgctcacatatccttgcagacccggctaaaagctgcccaccaagggtttgagtcatcagtaggtgtcacttgggggtgcatccacttctgagggacaggaagaatggcaggatcaggacatgggcctgggcatcttgccctatttcccatagagtgggctgtgcctagtacataacacctccccacccccactccttcacctacccagacatctgggtagccagtccagccacaggtcctctttcagcccctcaaatgtcctaggtctgggaccttcccaccctccgtctacttacctcctgtccatccttcagatcctagcccaagtgccccttcctcaagatggctcccccagacctctcagactagttggatactccagttacaggttttcagagtgcaaggggccaccctttcctgtaccacatgggttatatgaaagtacggctgggcgcagtggctcatgcctgtaatcccagcattttgcgaggccaaggtgggtggatcacttgaggccaggagttcgagacaagcctggccaacatggtgaaacactgtctctactaaaaatgcaaaaattagctgggcgtggtggcaggtgcctgtaatcccaactactctggaggctgaggcacaagaattgcttgaacccgggaggcggaggtgagccgagattgtgccactgcactgcagcctgggtgacggagtgagattctctcagaaaaaagtaatatcacataaatgtttgatttatatctccccgtttcaccatacaagggcatgaactgtgcctaattttactccccacagcattccccagcacccacagtggcctctacaatgaatgcttgttggaataaaatgtgtctgtcacagataaagaaatgcccagacatatgcagacacaccaagcacacactccactgttgcacacttgggtctcccccggctcccacactctcccatcacatgtcccaagtccatacctgagcaaactctagggtgaccccctcgccagctgcctggcaccagctctgcagctgctcctcaaaagcctaagagaagggagacgagctgatccttcaggctttccagaggcctctaggacaagactgaggacccaggatccctcctccaaacccaggtggaggtggcaccttgaagtccacatccggtgccacacggaagtcaaagctggcgctcatggtggcaggtatcacgttataggccacgccaccctctagcttagtcaggttcacggaggtcacggacccctctttcaggtgggggtttgactgcagcctgtggtgtgggggcagggtagcggcagcaacagataaaagaggtggctcagactctatcctctgtggtaccgcctcccagagccaccccactgcctcccaggctgcctcacctctgccattccttctcccggaatgccaggatggagtttacaaccttgtgctatgagaatatgaggttaaatgggacagtggcctcaggatagagcctcctgaactcccagactccctcctggggtgccacgtaccagcttctctgctgctgtgtcctccatgaagcgtgaggcatggcctggcctcccagtgctggtaacccgcacccctggggaggtgtagggggaaggcagtgtcttcagcctgaggggctggagacacaatcagcctggggtgggcccaggtctccccctcattccaggctcctctggcagggtcctgtccccactcagggcccgtagcatacagctggtttctgcccattcagggcttgccctcagagaagctcagataggaaagagctgggaggtagaggccctgggttcaaggccttctcaggcctcaactttgctgtgcaaccctgcataggaccgtgccctttctggcctagcctcccgcctgtagagtgagccctccctccaagctcatacttacaccagggactccgctcactataaaagacagtgaaggcatcagtgggattggctatgcctgaggagggaaagggggttcagagggtggagcagctcagtccccactagcagcctcctactccctgcctggctgctcattggcttgccaacctgctcaccctcatccagggcaaagcctgccctcagggcgtggaactcaggccgctgcacgaacagctccatgccttggtgacccccaacctcctcatctgtaaaagcagcagggacgtgagatgaggaggctgccccgccccaccctcccctttcccaaaggtatctgagccactcctaccaggcacaaaggtcatgtggatggttctggggaaccggtggccctccaccttcagcctcctcacagcttccaggtacctgagggggcataagccaggtgctgggggagccaccagatgcgcaggctggccccacaggcagggccagcaggctggagtcctgtgtcctggactttaccctgccacaccctgatagggactccagaaagtccctgcccctctctggtctgaatctccctatccatgcaatggtcatggcagtagttcctgtccaagaggtcacggtgttccttggccttgagtttctccaatcaccccctcaggtcctgcttcaatccactggaccagtggggacattgtggaggagtaggaatggaggacactcactggatgctgacgcacttcatgtcctgggcacccctggcatagatgtagccctcagaatccttgaaggcctcaaaggggtcgtgactccaatgttcctgggggcagggatgggaagaggggcccaaaccccaaatttagccattaatccactctggtcaacagtggccctgccctaggagcccaccatagggttggagtgacaggtggagtggtgggagaggaaagacgggggctgaagaaggcagctgattgccatcccccattgctgtctcctgcttcccaccccccagtccccaccccactctggcccagaacttgctgctggatgaaggctgcttgagtggtgtaatgtcataaggatgttgagagttagtgtcaggactggggccaggaccatgagcaacttgaggttgaatcctggggtctgcatcatgtctgtccccaaggcctgcactgcccacctccccagccccttacacaccttgaagacaggcaccacatccgtgtgggagttgagcaagatggaggagagtgtagggttggtgcctggccaggtcaacacggtcaccacatagccaggtgccacctggagatggtcaggagggtaggtggtctgagcagggtgaggaagtgcccaggcccacctcccttccccgcttagggccccaggctcacctctactttctgacagcccaggcccagctggcgggctgtctcctcaaagaaagccacagcagctcctggaggcacagagtgtcttggggctgcttctgcctacccacagcttcccaccagcccaggcagcccggagagtggagcatacccagaaatgggctgctgcctccccgacacactccatatccctcagagatgcttgcatttccatccccaagaaagaagatatttttggctactcagtgaccctttctggaagtccagggggatgtctggacacagggttggaggaaggtgttatcttccttaaatatgggaaactatggcacagagacatgaagagattcacccaccatctctcagctgattaatcacagaggaggaatttggacccatgtacacaattcccagccactaagttttttttttttcttttcctttttttttttttttttttgagacagggtctcactctgtcaccaaggcaggagtgaagtggtgcgatctcggctcactgcagcctcaacctcccaggctcaagcgatcctcccacctcaacctctggagtagctgggactacaggtgtgccaccattcctgactaatttttgtattttttctgtagagacagagtcttgccatgttgctcaagctagtcttgaactcctgggcccaagcaatctgccagcctcaacctcctgaagtgctgggataacaggcaggagccacctcccaggccctagccaccaagcttgactccctaagggctgtggcctttgtccagccccagtgggcttctggagggcctctcctttccctgtggctgcctcaggcttcccccaccactcctgccctggagagtgaggtgaagtttttctttaaccagctgccaggagtaaccttggtcagcagcagagtctctggggaaagggttcctccctaacctggaggggctgcctcagtctatttacttggggaatggctggaggggttggggagccatttgggacagcagagtggggctcagctgggtgacaggggttggaggctggtttagagcacagtccccgtcccttaggccccgtcacaggctctggaaccaccgtcttctcaccatagtcaggcttgggctggacagtgcggatacgcaggtactggcggaagagcgtcaccgatgggtgctcctcctcgggacccttgctggtcatggcgctgcgcgtggtgagctgggggcaaagtgaatggctaactacccctccaagaccctggaaatggtgagctcctgcacacagcctgtccccacggcggctcccggacttcccacaggggtaggataccgtgtttcggagcccccattaaggagcacccattctgtttcaggcgctgggctgtctgcttccagcacatttccttatttaatccccaaaagagccccatgaagtttgtgctcagaatgcccactttacagaggagaaagctgagaggctcagagaggttcaaggacagctcatagagtagctgagcaaggtttgaacccagacttgtactccccccgccctcctaaaaaaaaaaaaaggcaaaaacaaaaacaaaaaacaaacaagaaaaaccccaacgcctcccagttgcccggctttcaagccacggagccccagtccctctatccc

SEQ ID NO: 259 - DNA, 594 bp, Homo sapiens
tccggttctaggcgcttcgggagccgcggcttatggtgcagacatggccaagtccaagaaccacaccacacacaaccagtcccgaaaatggcacagaaatggtatcaagaaaccccgatcacaaagatacgaatctcttaagggggtgagtgcactgaatcacatggaagtgtcttttcttggttccaggtgcacagtcaaggcctctcatgtagtttttctctagctttggcttctgcctgagcacagcctaactggcccacccaaagcctgcaattcctttttctaccctaccagacccataataaagctttccttggtctccacagcctgaagtgtaaccctctggtcagggtgtaacctgcctcctgagggcagtttggctatctcccttgcttggcagtggcacttagggtaaggagtggccttgtctgagtgcgtgcagggcacattcccacactgaccagccttatgacctccatctgacccagtgctggagttggggtcagcttctcttcctgtgtcagggggttctaaggattagctgagaaggctggagggtctaggggagagctgagcatgtccccagtctgt

SEQ ID NO: 260 - protein, 60 aa, Homo sapiens
MAKSKNHTTHNQSRKWHRNGIKKPRSQRYESLKGVSALNHMEVSFLGSRCTVKASHVVFL

SEQ ID NO: 261 - DNA, 614 bp, Homo sapiens
tccggttctaggcgcttcgggagccgcggcttatggtgcagacatggccaagtccaagaaccacaccacacacaaccagtgtaagttttttgggccctgcctacatcccagaccctggcaaggactggttcaggcaaactgggacagagatgaaggggcacgtttccattgtgggcctgaggctgattgatttcacccagtaataactttagggtttataggtttagagatctacttgagatacagagtgttttgcatttagtagtaagggtttcccatatctcaagtgtagctgctgtaggaagtgttggttctcccagacttgccagctgtgatgttgggtggtcttattagaggaaagttctttgttggcttaattccctttttttctcccacagcccgaaaatggcacagaaatggtatcaagaaaccccgatcacaaagatacgaatctcttaagggggtgagtgcactgaatcacatggaagtgtcttttcttggttccaggtgcacagtcaaggcctctcatgtagtttttctctagctttggcttctgcctgagcacagcctaactggcccacccaaagcctgcaattcctttttctaccctacca

SEQ ID NO: 262 - protein, 48 aa, Homo sapiens
MAKSKNHTTHNQCKFFGPCLHPRPWQGLVQANWDRDEGARFHCGPEAD

SEQ ID NO: 263 - DNA, 677 bp, Homo sapiens
tctcttccggttctaggcgcttcgggagccgcggcttatggtgcagacatggccaagtccaagaaccacaccacacacaaccagtcccgaaaatggcacagaaatggtatcaagaaaccccgatcacaaagatacgaatctcttaagggggtggaccccaagttcctgaggaacatgcgctttgccaagaagcacaacaaaaagggcctaaagaagatgcaggccaacaatgccaaggccatgagtgcacgtgccgaggctatcaaggccctcgtaaagcccaaggaggttaagcccaagatcccaaagggtgtcagccgcaagctcgatcgacttgcctacattgcccaccccaagcttgggaagcgtgctcgtgcccgtattgccaaggggctcaggctgtgccggccaaaggccaaggccaaggccaaggccaaggccaaggatcaaaccaaggcccaggctgcagccccagcttcagttccagctcaggctcccaaacgtacccaggcccctacaaaggcttcagagtagatatctctgccaacatgaggacagaaggactggtgcgaccccccacccccgcccctgggctaccatctgcatggggctggggtcctcctgtgctatttgtacaaataaacctgaggcaggatttgttagcctctgtctatgat

SEQ ID NO: 264 - protein, 161 aa, Homo sapiens
MAKSKNHTTHNQSRKWHRNGIKKPRSQRYESLKGVDPKFLRNMRFAKKHNKKGLKKMQANNAKAMSARAEAIKALVKPKEVKPKIPKGVSRKLDRLAYIAHPKLGKRARARIAKGLRLCRPKAKAKAKAKAKDQTKAQAAAPASVPAQAPKRTQAPTKASE

SEQ ID NO: 265 - DNA, 77530 bp, Mus musculus
  misc_feature (1)...(77530): n = A,T,C or G
cctttaatcccagcactctggaggcagaggcagcctggtctacagagtgaattctaggacagccagggctacacagagaaaccctgtctgaaaaaaccataaataaataaataaataaataaataaataaataaataaataaataaataaataaataaatctaaggaaaggaaatgagctggggctgtacgaagctctcaaattctgggttccagcccaggtaacactggtgggggctgggggctggcataggaattacacttaacttgcagataatgggaagtgggggatggacaggtggctcagcaattaagaccactgactgctcttacagaggacccaggtttggttcccaggaccaacatggctgctcacagccatctttacttccagctccagggaacccgggtctctcttttgatataaaatacaatatattttttgaaataaataatctgggttgaagagatggcttaggggttaagagcactggctgctcttccagaggtcctgagttcaattcccaacaaccacatgatggctcataaccatctgtagtgagaactaatgctctcttctggagtgtctcaagggagtagcagtttactcatataattaaataaaataattctttaaaaaaaatagccgggcatggtggcgcaagcctttaatcccagcacttgggaggcagaggcaggtggatttctgagttcaaggccagcctggtctacagagtgagtgtcaggacagccagggctaaacagagaaaccctgtctcaaaaaaccaataataataataatcataataataataataattttataagggggtgtaggagttaaaaataagagaaagcaactggcttttttttgactcttcaaatgtgttatgtttcattttgtatattgtacaggtgtgtgtgtgtgtgtgtgtaaagcagagcatttgtggaggtcggaggacacttacaggaagttgactctctcctcccactctgagtctcgggggattgaactctgaccatcagacttcgcagcaagcccctcctctatctgctgaaccaaactatcttgttggtccatggtttttgttgtttgtttgtctttagattcacttatttattttcgtgggtgtatgcttgagtgtgtatgcttatggatagatagatacatagagggggagagggagaaagagagagaggtgaatagatagatgaataaacatataataggtaggtacatagagacagatgaatagacagttggtagatagataataggcagataggtatatatggatatacagatagatatgagtatgtatatagatacagatggatatagatatatagaaataacatatacatcatatacacatacaaatacatataggtagatactacatgtgtgtagaagcccaaggaaaccactagatagtattgtgttcctgcaactggagttacagacagttgtggatcaccatgtggattctgggaactaaatccagatcttctaaaagggaaatgtatcagtcagagctctctagattaacagaatttataggatgaatctatctatccatctatccatccatccaatggggatttattagaatgatttacaagccgtggtcaagctaataatctagcaattgatgcctatgcattaaatttaggttcaagaacacggtagttgttccatccatgaagctggatgtctcagctggtcttcggtgtattctaaaatccttaagaagtaggctccgaataccagtgaaggaatgggcttgccaacaagatgagagcaagcaggcagagcaagagcttccttcttccatgccctttatataagccacagacaggaggtgtggtccagactagaagtgagtcttctcacctcaaagatctggatccgagatggatcttcccacttcaaatgatctaactacgcaaaaatccctcacaggtgtgttctgccatctttgggttttagttagttccagatgtggtcgagttgacaagcaagaatatctatcaaagatggcaaggactttaacctcgaagccatctctccaccccctactttttattgtttgagacagcatacttgttttttttttttttttttttttttggttttttttgtttttgatttttgagacagggtttctcctgtaatagccctggctgtcctggaactcactctgtagaccaggctggcctcgaactcagannnnnnnnnnnnnnnnnnnnnnnnnnnnnnnnnnnnnnnnnnnnnnnnnnnnnnnnnnnnnnnnnnnnnnnnnnnnnnnnnnnnnnnnnnnnnnnnnnnnnnnnnnnnnnnnnnnnnnnnnnnnnnnnnnnnnnnnnnnnnnnnnnnnnnnnnnnnnnnnnnnnnnnnnnnnnnnnnnnnnnnnnnnnnnnnnnnnnnnnnnnnnnnnnnnnnnnnnnnnnnnnnnnnnnnnnnnnnnnnnnnnnnnnnnnnctcctcctccacttcctcctcctcctgctcctccactccttctccttcctctctctctttctctctctctcctctctctctctctctctctctctctcgtgtgtgtgtgtgtgtgtgtgtgtgtgtgtgtgtgtgtgtgtgtctagtgcatgcatgccagggcacctgtgatggtcaaagggcaatacccaggactcagttctttcccttaatccatcttgctggcccccgataaagtatcgataaagtatctttaagtgaatgcatttgaacttgttataaaccagttgctgtgttaggctctgggtacatgttgtggagggagcctttgtcactcaaggagcttgcggtctgacagaagacacagaaagttcagccctagcgacactgatgtgtgtgaggggctgatagagttgtgaacagccactgttgagggaggccacaggaaagaggcttttacttatttttggaaagtggtcaaggggtgtgtccagagggttagccctacttacatggaatttagtactgcctgacctttagttttctagctggtcgaagctttgaagaccatgccatagccaggtggaagtggtgtatgcctttaatcctaacctaacactggggagggagaggcaggcagatctctgagttcaaggctagcttgtctacagagtgagttccagtatagccaggactatgatgagaagtcttgtcttgaaaaacaaacaaacaaacaaactaactaactaactaactaactagcagatcgttccagactttggctggtaatgtagcttacatggcagaatactttcctaacctgtataaagccccaagtttgattcccagcattgcatgactcttgtgtggtggtacatgacaggaatcccagaacttagaggtagaggcaggagaattgcaagtttaaggtcatactcaattacacagagagagctcaaagccagctcgggatacccgagaccctgtttcaaataaaaggctgttcaaataaaagggggtgcggtggctggaaagatgactcacaaattaaatgcacttgctgaccttacagatgacctgggtttgttttccagcatccatannnnnnnnnnnnnnnnnnnnnnnnnnnnnnnnnnnnnnnnnnnnnnnccccccctcagtacacgtgcatacacataatttagcataaaataaatttctctatatatacctttttgggggtggagtttgaggtagggtttctctctgtgcagccctttgtatgactgtggtccttgacagtcagacatcttgccttttaaaataaattaattaaaaaaaaaggaagccccaaagaagtaacctttaaataggaacgatgccagaaacaggaagaggaagagcaatgatgcctttggcaactgttgggttgtgtgatggtactggccttgaccttatgtgaaaggatctggtgcaaatagaaagattgtagcttaacattcaaggcctccggcctccttctaagaacaaaaggagtgatataattccatttgtgttctagataggtctagatagttctagatagagcatacagcatcaccatacagcctagagtgtttcccgatgctgctcctgatctcttggaaaggatccaatgagacacatgtggaactgaggactcggtctaacaggcacacaccattctcaatgcttcactcactctgtagggcagagagggaaactggagtagaggaggcatttgggttgcctgtgacatccaggtaagctgatacaggacttaattgtcctgtgatccttcctcttagattcccaggaacgttgattctcggggaggacagctgtctttggaccaggaagataggggaggcttcttatcccagaggaagttgcctctagtctgaggttagaggcagaaacattgggtcctcttggaaggccatgggggaaaacccttcgtggggaggaaatagattactccatagtgtgtgggggtggagactgaagtctctcagcatgggaggagtgtcacagagtatgagataagtagggggaagacgagggattggagaggtgacctggcattagaccgtgcttttgatccaaatatttgggctgtacccttagaggctattgaaagattcaatataaacagcactggtgctgccctgtagatcagatcatgtactcctcagtgtctgtgaggaggagggattttatagcctgcatgtaaaatggtgcaggcataaaacctagacatggctgtcatatactttgaatccttctctagacactgtatacatagtgtctggtccattaaatatagttgtctggctgtattgtttaggagacgataatgagaaactgaggctggggctgtagctcagtgatagcatgcttgaccagcatgagaggggagctctgggtcaaccttatttaagcatgggaatagtgtgcctaaaatcccagcgctccttgggaggcagagacaggaggatcaggagttcaaggctagccttggttatatatcgagtttgaggctaactaagtgaaaccctatttcaaaagcaagcaggcaagaagataagagaggatgaagaaaaaggagtaaaaagaagccacctggattttggctattgtataaaggattaggaatggcagagctgttggggctctggagagatggttcagtggttaagagcactgactgctcttccaaaggtcctgagttcaaatcccagaaaaaaacaaaaaaacaaataggaatggcgcagctgtaactctaaagtcaatgtaactttacttacctctgtggcctggatttggtaactgcttgaacttttttttttttaatatagaatagagtttattcagggcatggagaggggagttaagagagtagcagaggcagagaaaggcagagagaaggagagagtagagaagtagaggccggccatgaccaccacgtgaagagaggggggaagggaatgggaagagagggggagcaagggggcaagagggcacgggagagaagcaggagtaagagtgcttgaacagtttttataaatatgatatagaaattaattggcaagccgggcgtggtggctcacgccttttatcccagcactcaggaggcagaggcgggaggatttctgagtttgagaccagcctagtctacagagtgagttccagtacagccagggctatacagagaaaccctgtttcaaaaaaagaattaaattattttgtcccagttaggctcacttatagtccaggctggccttgaactattataaagccaagaatgtcattgagagggctggagagatggctcagcggttaagggcaccgactgatcttccagatgtcctgagttcaattccctgcaaccacatggtggctcacaaccatctgtaatgggatccgatgccctcttctggtgtgtctgaagacagctacaatgtactcaggtatataaaataaataaatcttaaaaaaaaaaagaatgcaattgaatttctgatccttctgctcctagcttccgagtgctctattggcatgtgcactaagtgtgccttgctttacatgtgtacgtgtgtgagtgatgtgtgtgtgaatgtgtctgtgggattttttgatgtctgtgagtgtatgtgattgatgtgtgtgtgtaaatatgtaatgtgtatgtgtatttgtgcaaatatgtgtgtgtgagtgtgtgtatcatgtacatatgtgcttgctgatgtgtagactgagcagcacccaggtggaagtcagtggacaattttcagaagccagttctcaccttccatggtgaaactccatttccctgagtacaagccaaagctacagatagcctgcaggacagaagtccacaactaccctctcctctcctgacaccccagaagagggcatcaaatgtggttgctgggatttgaactcaggaccttcggaagagcagtccgtgttcttaacagctgagccatctctgcagaccaatatatattttttaattcaatttttttacttattcactttatatcccactttctgccccactcccaggtacccaatctcacaatccttcccctacccacccttctcttctcctctgagcaggtgaggccccctctgccctggcacttcaagtctcttcaaggctaggtgcatcctttcccactgaggccagacaagatagccctgctagaagaacatattccacatacaggcaacaacttttgggacagtccctgccccagttgttggggaccacatgaagaccatgctgcacatctgctatgtatgtgcagggaggcctaggtccagcccatgcatgttccttagttggtgttcagactctgagatccccaaaggtccaggttagttgattctgttggtcttcttgtggagttcctatcccctttgaggcccagcaatccttcccttcctcctactcttccataagagtccctaagctccatccactatttggctatgggtgtctgtatctgtctgagtcagctgctgggtggagcctctcagaggacaacttgatcctgtctgcatggttcaggagtctgatgaaggtggagggagaggtctaatttatctttttaagacagggtctttctatgtagtactggctgcctagagctcaccttgtagatagactaagctggccttaaactcacagagctcctcttgccactgccttcttctttttttnnnnnnnnnnnnnnnnnnnnnnnnnnnnnnnnnnnnnnnnnnnnnnnnnnnnnnnnnnnnnnnnnnnnnnnnnnnnnnnnnnnnnnnnnnnnnnnnnnnnnnnnnnnnnnnnnnnnnnnnnnnnnnnnnnnnnnnnnnnnnnnnnnnnnnnnnnnnnnnnnnnnnnnnnnnnnnnnnnnnnnnnnnnnncctctgcctgtactgggattaaaggtgtgtgctacggcgcctgactctccccttttctaagctcagctctttgtgttccttccttgtctttccacgttacacagagaccttttcacagttttccaagtacaggcgatgacccctgctttaggatctttgcagtagcctctttctttctttctttctttctttctttctttctttttttttttttgaatttatatcttctaaattatccctgcatattggtcttttacagacaagggttcatctgacatttcagtgaagcccatgctatctaaaacttaaaatggtcatatgagggcaacaagataccgcaataggtcaaggtgttatcagtacaggactgttgacctgagttagatccctgggactgactctaaaggtgttccctgacttccacacacacattctgaggcatgtacttgctccatgcccctcctcccagtaataataataaatgaaattaaagaaatggtcatagccaggcatgatagccaacacctttaatcccagcactcaggaggcagaggcaggtggacctctgagtttgaggccagcctggtctatttagtgagttccagggccagccagaactacatagtaagactctggctggaaaaaacaaaataaaataataaaaaatgatcatgttgttagttccttttgctttccagagttttgccttccctgttatccacagccaactgcagtctgaagccatgaaattggaaagtttcagaaatagttcaccaatttaatttaaaaaatctgtgtgtgggtgcatgcaggtgctcactgggctagaagagggtgtctggtcctttggagctggagataagatagttagttataagtagccaggttggtgctgggaattgaaacctagtcctctgaggagcaactatttctctctctctctctcaatctctctctctctctctctctgagacagggtttctctgtatagccctgactgtcctggaactcactctgtagaccaggctggcctcgaactcagagatccacttgcttctgcctcccaagtgctgggattaaaggcatgcactaccactgcctgacttttgggcagctaactctcttatctgctgatccatctatgtagcttccagttcatcagtttcataactttacacttcattaagatggagctgttcaagaaagccacattcatctaacaaagtccccctccccaacccccgtagcagcgtactggtactaacaatttggacatttggaaggagaagttatgaagtgtttctttgaagtgaaaaggtcagatttcttaatttagaaaaaggatcacttgttaggattgctaatcccggtatgggtgaaactgcaaaaaacatttgtgttaattttagttcaagttgtaaacgtatggccgtggtacataggttgtctcttttctcataaacaaacaaaacaaaaaatattcaacgggagaggctggtgagatggctcagcagttaagaatactgagtgctttttcagaggtcttaagttttgtttccagcacccacatgacagcttacaactgcctgtaactccagttccaggaactgttgttcttttcagatcttgggctctaggcactcatgcagttacacacatacttacatgcaaggcaaccactaatacactaaacattaaaaaatacaaaagtaatatatatatatacatatatatttctagccgggcgtggtggcgcatgcctttaatcctagcactcgggaggcagaggcaggcagatttctgagtttgaggccagcctggtctacagagtgagttnnnnnnnnnnnnnnnnnnnnaaaaaaaaaaaaaaaaaaagtaatatatatttctttttgacagggtctccctacttagatgtcctggaactcactatacagaccaggctggcctccatttcacagtgatccacttgctattgcctacctagtgctggaattaaaggcgtacgccaccttgccgggcaaaaggagtaaatcataaaacattatgtgtatggatatgtgcccgtgagtgcagtgcccgaggagccacaagaagagaacggcggatccggtagaaccaaatttacagaaggttgtgggctgccccatacaggtaggtgttgggaatcgaactcgtgttccccctcccttatttgtttgcttcttttcccgtgtgcagccgccctggatgcatattgtgtattgtgtcctcgcacctatgtgcgacgtccccgtttagaagaatcgtccaggcgttcacgggtgtagccgcaccgattcagaggaggaatcccacaccaaactccctagcactgctcagggccccgcaaaccggaagcagatagtggccgtggcggcggcgcgcgatgacgtcacgcaggcgccggcggccaggggcgggggcgcgggcgagggcggagcgagccgggcggcggggcggccgcgcagtgtccgggatccaggcctggcagggggttgtgcgcgcgcggccggccggctctgcccgcacccgtgtcggataccggagcggggcctcgctcgggccccctccatgtgacggtaccccgcggagcctgagcgagcagcgggtccgtgcggagccggagacgggaggaacatgacatcgcggaggtgagccgcccgcaggggccgggccgcggcctgggtccccgctgcctctggatgcgcgggccgccgggggtcacaccggggactccccgtcggcttggcttccccgccgccccgcccgcgggtccccattcatttcctgccgccccgagttcctgctcccgcggcccgggatgcccgtggggacacccgcggccccagccggccgccgcattcatgacccattgcctcatgagcgtcgcctcctggggattccgaaataaccccgcgcgctcggggaggcgcccgggccaccgcggggccttcacacaggaccctttcaggtgccccctttttgcgtcttcgccctcgcccccaagtgccagaagtgggaaaactgaagctctctgcagcggctgggagtgttccctccccactgtgatctttgctttgaaaggtgggaggaaagggaaccgtatctggccgtgggattgtcccctctgtttgacgaatgtggaaactgaggctcgggaataacgtgctcgtcacaggacaggatttgaagcttagattggaggcgaatgagtgagtttccacttcagggtaacgagactccattagtgacattgactttgctcttactagaagccagcttaacgcgtaccgcagtggtacgaggtgggtggtggaatccctttcctaaacatgaccaaattgagttttcaggatgaagtacattgtggcatgttacctggtaagaggtgcaagtctctcactgtgttgcccaggttagcatccagtgtacatttcccctttatctcaacccctttagcgctggggttacaggccggatcacactataaggacttgtttagttttaaaatcagctttaagcccgacgtggtggcgcacgcctttaatcccagcacttgggaggcagaggcaggcagatttctgagttcgaggccagcctggtctacaaagcgagttccaggacagccagggctacatagagaaaccctgtctcgaaaaacaaaaacaaaaaacaaaacaaaacaaaacaaaaaaaccaacatttttattgagataagttgcacctgattcggcggacagtttgattaaaccttgacttatgcgtatacttgagaccattacagcagtcaagataatgaacatatccacgactcctggtgaggtttccctcagcttggtcttaccagtcctctgctttccctccgaccacggttctgttgctacctttcttaggattttagattaatggcattacacaaatatgagctgttttttttttttgttttttgtttttttttttttttttgtttgtttgtttttttttgcgttgggggcggggagagtcctgatttttattattgaaagttttttttaaagatttatttatttatttattatatgtaagtacactgtagctgtcttcagacactccagaagagggagtcagatctcattatggatggttgtgagccaccatgtggttgctgggatttgaactccggactgtcggaagagcagtcgggtgctcctacccactgagccatctcatcagctcattttttttttttaaacatgtatttcttcattgtgtgtgggcccatgtcatggtaggcatttgtaggtcggaagacaacatgtagacattggctctctctctctaccattcaggttccagggatttaactcaggctgtcagactaggtaccacgtgctgccacaccccggcttagcggacttgttccggattgtctgagagttcattgctcgctgctgctgtttgaacagcatgccattgtagggctgcttattcttctgaggacctttggctgtctctagagtttgtcactcacatatggttctgtgactgctgctgcagaggcgtcagcgtggcctcacctctctgctgtagctctctgcaagctgaacggttggatctactgtgggcaggcacttgcagcctgtttgcaaaggggctgtcactgcttactttccagttttactcccagagagctgcatacagcttgtccatagctttgagtcctgatttccttgtttgataaagatttattctgattttacttgtatgggtatcttgtaggcgtaggcagcgtgtgcctgcctcattccctctggggctggtgattgattattgtgtgggtacctgctttctattccgagtggccgtccattgtcccagcaacactgctggggagcctctccacaggtagagtctgccccattgttgaagaacacttgtccttattgtgagtttgtttcttgactcggttttcttccatggatatttctgtatcttcatgtcagttccaaatggtcttagttcttttttttttttttaaagaaaattttttttttgtttaatttgtgtgtgtgtgtgtgtgtctgcagtgttcagaggagtgtgtcagatcccttggacttgtagttacgggtggttttaagttgcctcccatgagtgctgggagtgaaacttgggtcctctgcaagagcagccactgtttgtagctggtgcatattttgtttttttgtttttttccatgatctcagtggtgtgtgtgtaagtcagaaaacagttgcattctagggagaatctctggaactgaggttgttaggcggagtacagttaaacatggagccatcgtgctggcctgaggatctgagaacactcttgagttccgatggggattcagggaaggtcattttgaggaagtgatcataggaactgacacttggatggcagacaccatattgatgcttgttttacttaattgtcatggtaaagctagacggggtctcaccctgccattctggttggcctagaacttgctacgcagaacaagctgtccttgagtgcacagagatcttcctgagcggtaccagcgctagtcggaaaacggttcattttgatcagtattgcagactacgtttctgtgagcattccgaagccagcatgtgggtataatcaccgtgttggcttcccaaccttgaaggtggggagggaaaggaaagcatggagtaattgagtggctggtcccgggccatctagctgagaggacggtggacttagatgttcaagctgtcctgtgccttaccttgctctcccccagctgacaccactgcctgccctcgccagtcttctctcttcagtcgctttctgttcctctaagatacaagtgctggctggagtggagggtggaatgttgaactgtcctcagactggagggttctggtttgtcattgcagggcaagtacattttgtcccaggtgctccctggcagccacgttggttatctccctggggagaaccagcagtgcccgagtctctccggcgcgcctcgctgtctttattcttggtgtgaccctacaaagagtcggggtttgggctggcgttgcccaagggcacaggctgtaccaattgctttccattcttgatcatgctcaatgtgtacactgttaggagatgcacatgatcttggaaaggcagagccaactcttgtttgtaattgtcactaggaggccctggtggacataggcagtcacagaacaatagggacactgagctgagtgctctgtgctttaggagacacaggcagcacttgccgtctgagaatgacatttttaggggaagggcaagcactgttgttgggcagttactagggggtttccattgtatcggggcttaagaccctcagatgggttcagatgttttaaagtgcagcccagttcattatcgtgacttcgagaatattgtgtgtgtttagcaaagttgctgtggttcttggcagtgctgtcttgggaagggggctgtgattgtgcatctttgcaaggagcattgagtttatgaaggagtccaacaccaaatgaggtggatgaaactaataccaagttgagatctgcagctgatcggtgtgtgatgatgccatgtagaatgcatttgtttgactgcattgtaatgtacatttaggtgcaattatgtatgtttgtatgtacttaggtaatgtgtgtgtggggactggctcaggacctctaagaccaaattctcagcacaaggagatttatttgctccagagaaacagcgcaagaaataagagacaaagtcaggagatagaggatgaaggagaagagaaggcaggggtatttgtcccaggggactactgactctggatagagaggagacagcccatgacccataggaaaatggtggtttataaaggtaaaaagggtaaccatatgttaagatgaggtatttaattttttttttcccccgagacagggtttcagccagggtttagccctggctgtcctggaactcactctatagagcaggctggcctcgaacctcccgagtgctgggattaaaggtgtgcgccaccacgcccagctctgaggtgtttaattttaattaggcatgttaattaggtgagacaaaggggacttttgattgctagactacaatactttgatagctggaccttggtagtcagcctcaggaggaggaagtggccaaataagggaatagaccttggtggctagctttaagaatataatctaacagttatttagcaagtcagggaatgggaataagggcaagacctaccagaggcaggcctgtcagctatctagcgtcccctcactgtctgcacatagtctgttttaattagagacagggtgtctctgtatagttcagattggtctcagaatcctcctgcttcagtgtctcttgagtgctggccttacaggcatgtgctaccatactgtacttcagtgtttgtagtgctggccttggatccagagccttagcatattaggcaaacactatcaccaacctacatcttcaagtctacagaggatgtcgtctacaagtctgtgttaaagataattccaggtttgatggcgcacacctgtaatcccaacacccaggagcccgaggcaagagaattgctgtgaatttgaggcctgcctggggtgtaggaaacaaaacctgaaacaaaagcaagtccttactgtatcagccacagtaataaaatgtctgtccattcactggtgagtttattttgttcattgtgatgggttgagtgtagcttgtctggtctaaaacttagctgaggatgctttcaaactcttgatcctcctgcagccccgtagtgctgggattataggtgtgtgccacacgcctggctcatttgtttatttagagacagggtctcacctaactcatgctttttaggactcctgagtgttgcgattaggggcataccccacctcttgttccttgatctcaaggtggtgttactgtatgccagctcctgggctaggcactgagtgttccaggtctgaggaatctgtggtatagaagaactgagctggggaagtttcaggcgtgtttggtgagcaggagggagtagggcccctggaacgaggggtgcatatgtggtggggattaaaccatacaggaatccttttttttttaattaaaaaaattattttttcctttcttgtgctgggaatggaacctagggcctcttgcacagctgagcctgtgctctaccacttagctacccccgcagccccgtggatactcctaaggtcgtcagtgtcatgtgcaccccagagcagtgaaaagccttagaaggatgtgatggggagtgtcttgagctgatctgtttaaaaatatccttctggctcctgggaaggcaggagcgcaggagggggttcagtgagatcagacagagcgaggctttgaagtgggggagaagcactctgtggaaattggcttctggaggctgttttcttttattgccctgtcatcggagcggagatgctgaccagtgagacgccagaagacagggacttatctggacagagcgtctgctaccagactgagaagagctgctctcacatttttttttttttggtagcttagattgctcgtccctaatgactgcttttcttcctgacttagccttcctcatactcacatgtaactaggggaggggactgttgtcacctactcagagtaccaagctgtggtgttcctgctgcaaggcacgtgatttttctggggctagaggtgagaagggtagaacagggtcacttatttgctggcaaggagctgagaggagactgtggacctccaactctaactcctccttgctgcagctgctcttcctgtgtcctggggcgggaagctctcagagcagatgtcagcactgtcactcgggtcgcctgtggttacctcagcatttgttttactgagttctatctattattactgtgtggtggtgcacagctttgatcctaaagcttagattgattgattaattaattacttaatgcaatgctgaggattggacctaggctctcctgcatgttaggcaagtgctctaccactgagctatgtgcctggtctctaacccaggatttagattctctttgaatacccttctaatagtatccatcccacctctatggaatggaagatgaccttgaacttctcagtccatctacctccaccctgtgagtgctgggatgatagactctactctcacgccagattttgttcctttggtgtttcgagacagggcttcctgtacccaggctggcctccaagacttgctatgtagcagaactggccttgaacttagagtcctaattgctgggcttctgcctggcttgagtgtaacttaattgtatgccctttatttcttcaagtcctctcagcagagggcatgtttcagaagctgacttgaggctctttttcataagtacctctgctggggatgcttagatgcatgcacacacacactactccccggccatcctccagagtcttgttggtcagtaaatatcagccacttcattgataaactcaaatggacttgtgtgtgcctttcttccttagctagcatagacactgctcatggtggtgctactgtgatggtttgtgggatagtccctactgtggtaaactctgctagctaggtaccaggtgttggttttagtacctaatgtctgaagaacttgagccagagtctcaggtggtccatgtttagagttataacacttgggtggtggaggcaggaggatcaggagtttgagactggctagcttgggctacatgaaaccctgcttcaaaacaataacaacaaaaccagaaacgatcccctagaacaaaaaacaagtgcagggccttgtagaaggcacggcttgggctgcacatgcctaagcaacggaattcagtcctgactcccacagctgccctctgacctgtagcatactgtggcttgaagctacactcatacacacacttcacacacacatgataataataaatcagaaacgaaaaacaaccccaaaactccgtaagtgcatagagccctccatgctagtcctacaaatgcactttcctcttcatcccctcattagtctcccagctaacatctcagcggctggatctctccgcaccatcctcctagtcagcatgctaccgtctgcagagctagcttattatcctcatagttgagggaaggctttgctcatcagaaatgctatttaaaaaattagctaagagcagagttgactttctgtgtattcaggcccaagggggtgatggcacccagcatggaaacttcgattggtgaagatgtgtttgaaaaccatagggacagtccccgagccacatgaggaggaagcaaagtgtctggaaagacagtggagcataatgacacactaaatggctcgtggaaacgatcctaattacgcatgagagcgctgtccctccggacatccacagcggtgggaaactaatgcttattaaaccttgcctgtgttgggcctctgcactaaatactggttcctaccgttctcccaaacatcactctcttcttactctcaataacaggatgggcataattataagttgtaaatgaagtactgcagtttatttaatagaagggtaaggaaagggctacctgtcctgtcgcctgcttctgctactgctgaggggtaaagcgatgtttactggacctcacctgaggacctcacctgaggcacggaggtggctctcacagtacctcccacacctacatctgtgtccatagtggatgctgtagggaagggaggagactgagatagccagggtgaggacccagacagctctgagttagaaataagcagaccaatggttaaacttgcttccagatggcatatggttgcttactataatactagcagtttggaggctgaggcaggaggattgcaagttagaggctagcccaggttacacagtgaaacagtgtctcagaagagaaaggtgttttgttttcctttctccttcctcccccagccccctctttccaagataggattgcactgtgtagccctggctgtcctggaactcactctgtagaccaggctggcctcaaaaaaaagttaactttatagtgtttttaaaatatataaaccttttaaaatttatagtataatttagttttttttttttaatgtacttttttctttggaattttaatttgaacttaaagatttttactttttaaaattctgtgtgtgtctttaatgtggggtgggtgaatgtgagcacaggtgtaagggtggcaagagctccagccatggagccatccatatccaccccccaccccaatccttgtgaatccagttttcactcacctttatgtgtatgcatctctgtagtcctggacagcccgcctggcacaagctgtgggcagtgccgcttttccctcttgagagctgggggtgataggggcttaccaccatgtgtggctccaaattttagtaaggtttacaaaatgttatttatttttatgtgtatggacgttctgtttgtatgtatagctatgtactgtgtgcctctgaggaagccaaagcagggcgttggatctcctgggactggcattacagatatattggctctaaattttagttggagacaggatctcaccatgtttttcaggtgggcctggcacagtttatgtagcccagggtgacctttacctttatgtagcccaggctggccttgaactcacagtcctcctgcctcaacctcctaatagctgggaatacaggaatatgtcacatgctgtacatttcctttttctcctcctgagaggaggtgactttctgtgcagccctagctgtctgggaataaacaacccccggctttgttactgatgttatacacgttaaagtatctctgttccagttagattgtaccttgagaaaacttggggctggagagccagcttagtggttaaaagcacttgttactcttgcagaggactgtacgcacactcttggtggctaactccaccatggtcagtaactccagttctaggcgatcaacatcctcttcctgagccttcctctccacagtccccaggcacttcaggcaaaatattccatacataaaacaaaaataaagtctcaacaaacaaacagacaaatcccccaaacaaaaccaactcaaacttcagatctgcattctttcttctccttccttgtctgagtgtgtaggcccagaggataatctagcatttcagccttactctgcatatttaattttataaaagtacagctcatgataatgaatgaaaatggatatatatacatgttggctttgtggaagagaattccaaaatgtgggtcttttgtttttggttttaaccgttaaatgcactaagtagaaataatggctttctttttgtagttcaaggtcaaaggtgaagtttatctcctgtgtctgtactgacctctggagagctgttatgactgggccctttcctgtctggctgagcacagtagaccttcccagttatgccgggaacttcaagcctttgcctgggcgctgcttggtgctcttcaccatgtggtccacttgagctgcccgctgtgtgggaagagccttggcccctattgttctaagtttgtattgattatggatatacaccgctgtgtaaggctgggcttgggacagagaactgggacaagtgctgttaggatgcagtacaacagtgcagagagagatggctgagggttccctccagccaagttagtgagagtatggaaattccatagttctcatttggaacaagcttgtagcttatgccaagtccttagatagccactgtctaaatttgtgctttttgagaaaggatctcatgtagctcaggctacccttatgctttttatgtagctgaggttgcccttgaattcctgatgtttcttccttcacatctctggctgaccgtcaagttctttttctttttttcttttttcttttggttttttgagacagggtttctctgtgtagccctggctgtcctggaactcactttgtagagcaggctggcttcgaactcagaaatccgcctgcctctgcctcccgagtgctgggattaaaggcgtgcaccactactgcccggcaaccgtcaaattcttaacatgtctgcagcaccctgtagatgggagcttgcttcatcagctgtgtgtgcccagtgtaagggatgcactagaatcactagccattctctgcagtcggggagctgctggctgcactgagtcttccagcgctggggagaccgaggcaggaagactggggctctagagtcccctgggctgcagagtgaggctcttctgacttgagaataccttgctgtgtgctagtccttagccaagaacatcttgctgtgtgctagccctttgcaggagtttggcttccattgagaaagaaagagacagtcctctgtccctatggaattgctggtcttgagatctgcactaggcactgaattatgcatcacccaggggaagggccctaataaaatacaagattttactgtggttcttttttttaaaattagatttgtattaaattttttatttttattttttattttgttttaaaattttgctttcttgttttatggatgagagaaaggtgagtgtgtttgtttgtctgtccctgggtgtggttggaggacagcattcaagagatggttctctcctttaccatgttggtttccgggcctaaccctgttgccaggatcaacagtaagtgcttttacaaaccctgagctgtctcactggccttatgatttatttacttgtgcgtgtgcatgtgtgtgtgtgtgtgtgtgtgtgtgtgtgtgtgtgtgtatgtatacatgttttggggaagggcacaaaggtatcgtgacacatgtgaaagtcagaggacatcttgtgggagtctcttttctcctttcaccatgtgggttctgtgggccaaactcagatggttagctgtgatggcaaacacctttacccactgagccatcttgccagcctgtgagaattttcttctctaaagtcagtgccctgcctgctttccaagcagagtctctggtctgggctgtgcatgacactggtcttgtactagctcacagctcacttcagcgcatgacagtgttcactcaggttcatctctaagcatggcaggaacttagagcccacaatggaaatatctggcagacttaactccatcaagaggaacttctgtaggaaaaaacagcggaggaagaggggacaaagcctgagatagctgccacacttgtagctaacagctgtgttctgattacaccatgagttcccgcatagtactgagaaagacttcagaaggggattcaaggtcatcttcagctatatggagttcagagctgcttgaattcatgaagccctgtcttaaaaaacctaaaagacaaaacacagggttggatgagctgacagctcagaaaggaaattggccaactggaaacatgaaaaggtgtcagatgcaaattgagatggaaacactttccactggtcaggggctcagacagcgcttggtaatttatgcagtgttgctaaaagtgaggatggagtcggatggagtcgcacgcagttgtgtgccttcctaaggcagcggcagtatttgttaacatagcggttaggggctggggatacagctcagagtttagcatgtgctaggctgcttcagttcaatagcacacatgtctacacacaaaagaatcctttaaagtggagcctagtggccgtgcttggcgatgaagtcaggggatcttttgagctcagtgttgcctgtcagtaagtaggatagccctgtctcaagacaaaacaactgaaaaattacttaggtagattaacctcatcggtaatttattattgtggagaggagcatgcttgctgtggtgcacatggaggtcaaagagtagtttttatggagctgtctctcttccacctttacataggttttggggatcaaatgtggagagccaagcttgaatggcactcaggcactttacctgctgagaatctgactttcatatgtgaatgtgtctaaagatagctgtagcactatcatgagaccagcctccatttctttccttcccttcttccctcccttctttccttcctttctttctgagataaggtctggctttgtaactgtgactagcttggaacttgctgtgtagacaaggctggattcttctttccctcataagtgctaggatttcaaatgtgcaccaccatgcctggctgagcttttgggtttttttgagacaatcttgctgtgttgcctaggcttgcctctgtgtgtcagagatttacctgcttcttcaacatggatattatagatatgagcaaccataagcaactatgcataccttttatatcaagggtttgactatggtggcacagtcatacaatagaatattgtatactcatgagaaagaacggactcctacctacagggagaccttcaaattttaagttaaagggttgggttccctcctgtgtgtgaatttctcacaggtgatgtggaggaagcatgtctatcacatgtgcacacaatctcatcatgcatgaacatggagatatacacacacaggctgctaaagaccctgagacccaattaaaattcttttcttgtatgtgctactcaggctgcatcaggacagctgttaggagtgggttctctttcctcctgtgggtctggtcctcaggcttggtagcaagtgcttctactgctgagctgagctcccagctctggctaaatacttatgataagttcacctgtgtgaaagaagctggctttcgatcttatgtatgtatgtatgtatgtatgtatgtatgtatgtatgttcgagacagggtttctctatatagcctggctgtcctggaactcactctgtagatcaggctggccttgaactcagaaatccgcctgcctctgcctcccaagtgctggggttaaaggcatgcgccatcactgcccagccctggcttttgatcttatctcttcctacctttgccttccagttgctgggattaaaggcttgtgccaccatgcctggccatctcctgccttctcttgtggtccttgggattgtacttagaggcttgtgcacatatggcaagccttctcctctgatccgcagctagaactctgtttacattttttttttttttttttttggacagagtctcactgttttgctcaggttggctttgaactcacttggaagccttgaacttgggatcttcttaccttctgggtaacagggttatagtcttgccctaccagaccaacctagttcctatttatctgaccagtcacaaatgaactaaaacaattttacaaagcatgtttatattttcattaagatccccaaagatactgagtctcaaaggtcagaggggcaggggctgttgctggctcagtggcccgtagagaacttgtggggtgtgtgtgaggctgagggctcagttcccagcctcatatacacacataaatgaacacctggcacatgttgggtacctataactccagctatgaggtgaggaggagtgcttgagcccagagttcagggacagcttggcaatgaggcagtttctagcagtggctagaaatggcttctatctgcctgtctttatgagcacaggacccgagtccagctccccaaacccatgttaaaacagaagctggatggggggctgcagagctggccggtggtgaagagttctggctgctatttcagaaggcttgagtcagttcccagtggcacgtgagaactcatgtggcagctcacaactgtttacaacttcagttccaggagatctaaccccctcttctggccttcactggtaccaggcacagacacaggacacatacatgcatgcaagcaaaaaaaaaacaaaaaaaacaaaaaacaaaaaaaacaaaaaaaaaactcgtaaagtaaaaataaatacatcttaagtaaaataactggaagtggtggagtgtgtagaaccttggagcttgacggcaggttagttgctaacctctttggtatatcctgggcaagtgagagctcttgcctcaaaagaagaagtggagagtgttcaaggagcaacctttgtatatgtacaaaggcacactcatgtatgcgtgcatgtgtgcacaggacaggcaggcatgcatgcacgcacacatacactcacatcccttcaagccataaaatgcagccaggtgagatgaggaactaggattgcatagggatgaaagtatgatggattttgccaacagcagttagtagtacaattgaggatgccaccaccaggagatgaatgactagagtctcaactgtatcaatagttggcctggaacttgctgtgtagacctggctgaccttcaacttggagagatctgcctggtcagtgacagatttgagtctttgtttcttttcctttctcttcttttcttttcttttcttttcttttcttttcttttcttttcttttttctttttggtttttcgagacagggtttctctgggtagctttggctgtcctggaactcactctgtagaccttgaactcagaaatctgcctgcctctgcctccaggtgctgggattaaaggtgtgaaccaccactgccctcttcacggctctcttcactgagagttggtttctcaataactctccagcccacacaaaagtggaagaaccatcttcacaaagttctggccagagcatctggccagcaagctaggagtcctctggcctcacctctccagcactagggttacagacacactccccttgccccccttcgaacgtttacactggtactggggatctgaactcagagccccatgcttgcatggacagcactttaataagtcacctttccagccctgatatactaggcaaaaaacacacacacacatcaaaatacaagtaagtcttaaggagacgaaaaataaaagccctgatgattgtagacttaagggtaattttccaaacactacaagctttctgttgtaaaataggaagagaggacagtggggacagtagaggctatcaggtaaatcatggggcccaggctgataattaactgcacagtgaagcaactgcagagcccaccatcttcatctcaggaggactaataagggcccttgccagagggcgaggctgggattgcgtcactgtccatagagacgaggcaccattttcccctttaataacctgattgtttgggggctggagagagagcctagaggttaagagcacttgttgctgttccagaggacctgggttcacttcccagcacccatgtggcagtttacaactgacctcagagaatctgaaatcctttctggcctctgagtgcactgcacacatctgatgcactggtaaaacacacataagaataaatctgggctggagagatggctcactggttaagagcactgacagctcttccagaagtcttgaattcaattcccagcaaccacatggtggctcacaactatctgtaatgggagctgatgccttctggtatgtctgaagacagctatagtgtactcatatataataatttttttttttttgagacagggtttctctgtgtagccctggctatcctggaactcactttgtagaccaggctggcctcggaactcagaaatccgcctgcctctgcctccctagtgctgggattaaaggcgtgcgctaaaatttaaaaaaaaaagaaaagaataaatcttctaaaaactctggtggttatgggtatgggcttataacttttcaaacactgctaggtatccatcatcacagtgtaaagatgactaagggctggtgcgatggctccgtggataaaggcattgctgttgaccctgatgacctgagttccatccttaggagccacacatggtggaagagggaacattccccacccccgactcccagcttatcctgtaatctgcacacgagtgctgtggcttgaacacagccacacaaaatagtttaaaaggaatgtgactctcactgcaaaagggaaaagtctgcagatcacctaagagctaaagtgaaagttgaagatgatggccagagccaggcttagagccatgcctgggacaccagcaccagggtgagactgcaggctagcctgagctacagaatgaaaccgtgtctccaaaatgaaagcaaaagctgggcctcacccagctgattcggacagaactttacagtccaggcctctgcttagagaggacagccgctaagtctcacacacaccactgtgtgggtgagcagagggggccggccggccggtccgtcagtttctgagaacaggctcggcagtggaggaagagtgcttaatggaaagtatctggtaagctgcaggcagaggccggggcaggtggaggactctgtcacccacatacagatgaaggaacttgcccaggctgaccttgaatttctgatcctcctgaggactaaggtaggcactgctgtctgccacagggagacagtgctgcctggcactgttctaggctgttgtgtgctttaggaactacatgaacccatcctctcggccctctgtgcagaagggggcagttactctctaagccatggttgccttaaaaggggttaatcatttagctcagccacttagctgggatttgaaccaggccagtggcaccaggttctccatttctacctttgaaactttgctgttaaatgctttttcatccactggagggtgcctgcttgcctgcctgccttactgcctctgcctgcctgtgccctccctccatccctcctttcctccttcctttatttatttttgtgtagccctggctattctggaactttgtaggccaggctaggcctcaaactcagagatccacctgcatctgcctcctgagtgctgggatttgaccagctcttggaggagtaaaaagtcaactcccattttattcctttgacttgagtcttgagtttgatgatcaaacgtgaggtcaatcagaacagaggttggagccctctgaagcctgtaagatgctgcagccatgtctgtgttgggctgctgcgggcttttctgttctcagcttgcatgttgttgggacagagtgtgcttattattttaaagatgagctcccgatgttgctgcttactgagaaccaggtgcttgagtggctagcaggcagcttaggtctgcctcactcactcactaccttagggattggactagtgtgtgtagggcctcaatcctgttcccagtaacacacaaaaacctttttgttttgtttatttatttttggagccagggtctcatgtagccttggctgtcctcctccttcctgtgtgggtgagcatggcctccacttctcctggatgtgatcttagtatggatcaagccctctggtgtatgtggtgtgccctgtgcagtgctgaagtcgatccaggctccgtgcttgctaggcaaacactgctgctgtggtacagccccagcctttggctcccaacattagtattgacgcttactccctgggagtatttagacgtgtcagccagcctccagagacagggtctgccttggccttgacttcacctgagtcttcatgaaggagatcttaaatatgttgtttatttatttgaggccagaagagggcaccactccccctggagctgaagttacagaatgtaggtgctagggaaaactaaactcagttgtaagaacagtaagtactcttaaccgcggagccatctgtctagtgacatgaaggagaacttgctggaaaccggggaatcctttgaagtaaatgtcacctacagtgggcacttttgtcttctaaaggacattgcatgtgaagtccccatcatgggatctggaaacatgcagtttgcgacctgtgacaggtggtactgccagctgactaagattgttcctgtggcatggtgtgcacctgtcatcctatgccagaggctgcaagtaggagagacccaaggtgtaggccagcctagtacacagttacatagtgacacctctttgagagaaatcctgttaaagttgtctcttatgatgtttatcaggtgttttgtttgttttgtttttggaacaagtgttttgtgggaaggtagcttacacttatttctggaaattaccttgttcagtttgtagatctatgtatttctttctacatatatattagaaagttgaatttatatgggtgtcttcctttacagtctggtaccctgcaagtgttctggttttttcctctccctccccagcaatgagaacctgactctgtaagccgcagtacccgttcttactcatgacagtttgtgcttgtttggtttctttgcatgcagacaatttcctgaccatgtgggtgatcttttgggggaggcaaacccaccagtgcactgtgttatcagtccagccccactggccatgctgctcctgagcctgcagggtgcaggatccaaatgtcccatcaaggaaagggggctaaggagggaaggacaggggtgagcctggaagctgtcggtgccacagatcacagcctccacatggtggggtaagggtgctcacagcctccacatggtgggataagggtgctcacagcctccacatggtgggtaagggtgctcacagcctccacatggtggggtaagggtgctcagctgtgctttggttctcattgtcctgtttttctccctcaagatggtttcaccccaacatcactggtgtggaggcagagaatctcctgctgaccagaggagtcgatggcagttttttagcaaggcccagtaagagtaaccctggagacttcactctgtctgttaggtaagttgggaggtaatgagagacactcatggtctgtatttccagaggagggatgaggccatacttgtctgccttgcttcttcccctagagtttggggcctgtcctgtctgcagcactgtggagccaatcagggcacatgccagttcctaggcttttatttcattttactttgtttttgtttttcaagacagaaaatctcagtatagcccctggctgtcctggaactcactctgtatatcaggctggtctcaaattcagagagatccacctgcctctgcttcctaagagctggggttacaggtgtgcgccaccactgcccagtatttatttattttttttatttgtttgtttgtttgtttgtttttgttgtttttcgagacagggtttctctgtatagccctggctgttctggaactcactctttagaccaggctggcctcaaactcagaaatctgcctgtctctgcctcctgagtgctgggattaaagacttacgctgggctggagagatggcttagtggttaagagcactgactgctcttctgaaggtcctgagttcaaatcccagcaaccacatggtggctcacaaccacccataatgagatctgatgcccccttctggtgtgtctgaagacagctacagtgtacttacatgtaataataaataaatctttagaaaaaaaaaaaaaaagacttacgctaccaccgcccggcttttattttatttttttaagattttatgtgtatggagctggtgaaatggctcagcgggtaagagcaccctactgctcttctaaaggtccctagttcaaatcctagcaaccacatggtggctcacaaccatccgaaatgagacctgactccctcttctggagtgtctgaagatagctacagtgtacttacatataataaataaatacatctttaaaaaaaaagattttatgtgtatgaatgttctgcttgcgtgtatgtatgtgtaccctgtgtgtgttcggaggctagaagagggcatcatatctcttggaggtggagttccaggtggttgtgagccaccatgtgagtgttgggccctcaggaggagcagccagtgctcctaactgatgagccctctctccagcctctatactcttgtttgtttgtttgtggtctcccagagtcacagccttgggaagtaactagaaaggactgctgggtgttctactcaccgaggggactgagagagaataccttgggcagagagacatccccagagcctccagggctgagtcctggctcctcacctttgacctgctttctgtgtttttctttcttggtttggaacagtctttgcaaagttcttcacatcactttcatttgtccagaaggaaacctctgtgaggtagatgtggttcccatgagcccctgcctagtcttgttctccactgtgcaaaggttggcatggatccccctgatgatgtgttgtatactacactgtctagtgagctcttgtggcctggtgcattaatagttctgtaattcatgtatccaatgaagagcgagagttgcatgctgggacatcgagctgtttattgtactggctctttggtggtcaaatggtgccaccacactcgcttctccattcttccagtgatggacattgggcagctttggtttgttttacatcccaccagacagtgtggtgtattctcactgtccctctgagcagatgtgggagttttctagatgttttctgtatgcctgttgtagctgttcaaattgcagtaaatgggtttgatttttatagatcttactgttcacataaacatgaataaatcatgtccttgagaatttatttagcatctcactgagacttaggaagaatctatccacccatccatccatccatctgtctgtctgtccatccacccatccacccacccacccatccatctatccatgacatacgacctcactagatgaggctggctggcttggagtttggtgtgtagatcaggctggccttgaattcacagagatctacttgcctctgttttaggattaaaagcgaatgctagcacatggactccttgagtcctttgaagcaagatgcaggactgtgacatttgtccctgagagtaagggtgactgtgtaagcacattctgaccttggtagaggagatgtcagcactgactggacagtgttacctcccagggagtgcatatgagacttctgttactcatcaggtcttgagaatacttgtccattgttgtgtgctctctgtgcgtgtcagttccctcctacatcagagtctccatggctgccagggacctggctgtggctgtcaggcttttctgatgagccagctcaccacctccagagtttttttttttttaaacattaaaaattttttaatggagctgggtgtggtggcgtatgcctttaatcccagcacttaggaggtagaggcaggtggatttctgagttcaaggccagcctggtctacagagtgagttccaggacagccaaggctatacagagaaaccctgtctcgaaacccctcccctccccaaaaaatttttttaaatgtgttaattaaaaaaataattgtttttaaaaaaacatttattgtgtgtgtgagagagagagtgtgtgtgtgtgtgtgtgcataagtaatggcatgaatggataggtcagataggtcagaggacagctttgggggttggttctctcctatgcatgactggggatgaactcaggttgtcagatcaagtttgctggtcagcacctttaccactaagccattttactgggtcctgttgattgttgttggtgttgagtccttttgttttgttttgttttgttttgttttgttttgtttttgttttttgagacatgatcttatgcagagaaggctgaagataaacttctgacccccctggctcagcccccaagtgctgggataataggtgtgcatcatcatactctaggcaatatttacacatttaaaaaaagcaagctttcacaatttattttcttttttttttttttaaagatttatttatttattacatgtaagtacactgtagctgtcttcagacacaccagaagagggagtcagatcttgttacggatggttgtgagccaccatgtggttgctgggatttgaactctggaccttcagaagagcagtcaggtgctcttacccactgagccatctctccagccccacaatttattttcaacatggttttgctgtgtagtgccttcctgctgcagcctcccaagtgcctgactgttgatatatttttaaaggtttatttatttattttatgtatgtgaatacactgttgttctcttcagacacaccagaagagggcatcagatctcattacagatggtcgtgagccaccatgtggttgttgggaattgaactcaggacctctggaagagcagtcagtcagtgctcttacctgctaagccatttctccagcccaaactcaggtcctgttgatatatttttatggtaaatattttgagtttccatcttttatttgaatattttgagtttccgtcttttatttgtctatttttaaaatcttttggtgcctattcaactttattgcctttgaacaaagtgattatgagttactacatgacaaggtgagtgggcgtttcattttaactaattttgcgtccttgattgttaaagacaataattgttgtcacttaacctagaccatgaactaggccagccattcaaagtagaatctccgcagggtcgaggcatagacagtgctgtgggttgccatagttaatggggttatttgatctctagtttcagagaggggttaaatctttcctttgggttagttcaggtgtttgggtgaaatcttctactgaatatgaggtctctttttccaactctttgatacgccttctctcaatggactattttagaagaaatggagctgttacccacatcaagattcagaacactggggactactatgacctctatggtggggagaagtttgccactttggctgaactggttcagtattacatggaacaccatgggcagctgaaagagaagaatggagatgttatcgagctcaagtacccgctgaactgtgcagaccctacctctgaaaggtcagtgacatcttcgtgaccaggtctgcactccagggcagtgtattgtaagcccactttatgggatgcatacgatctgtgtgactccagaggctggtgtctgtccctcatgctgtcatcttttttttctttttccacgtttctttattattattattaggtatattcttcatttacatttcaaatgctatcccaaaagtcccccaaacaccccccccccnnnnnnnnnnnnnnnnnnnncctcccccactcccacttcttggccctggcgttcccctgtactgaggcatataaagttttcatgctgtcatttttaagatgtgtttttgtttgtttgcctggaactcattgtatagcttgtgtagttgaggataactgaattcctgtccctgcctttacccgctgagttagcactagggttacaggcatgcttcgccatgtctggcttacgtggtcctagagattgaacataggcttggtgcatgctagcaaagcactctatatactgagctacatgccctgcctgcagtgtcagagtatcggcagaataccctcattgcagcagctgcagttagtgttccttacacagattctatagggctcctacgttttctccaggtagatttagaatgtgctttaattgtaacctttatcaacagctgatgagctttgggagttggggcagagaatacggagcttgagatgccgaaatagcagcagtgctgcaaggtgctctgaccagttatttagcaacagtaccatcagaggtcaggctaagcccagaagtggaaaagcagagtcctgaaggaccagcttttcatcagcttttagcattctctcccaaatgtgtagcacatccgtgtctgtagagaaagaactgccatgttgtgaagttcttcctatgtgcgctgcggggtgggagggtggtggtgttgggaatgggagttgagagctggtacttgctttatttacctggcattggcttctgcattctcctctctcattgcagatcctgggtcttgcctttcccagctttctgtcctacctgctagaaatttgtttctctggctactactgtagtctcaagctgtctccacctgctttagatctgcacgtgcctttccaggggcatgtagatggaagaatgctaccaagtctgtggtgatgagtgttactgctcgggttagcgtcttccttacctaaagccatagcgatcgagtgactgtgtcaggatgtttctgtgacagcttaagttaagagccttggtcttagagtctgccatctgatggctctgggcagcctgtatcaagggttcctagcacactagctaaagtacagatgtcttggtcccatgtagacgttgttctctctgtccatgagaactcacactgttaaggaaacccctgtgcctgctccaggatggaacaccattaaagcttgactggatagcccagtgtagtttgacctggccagcagagtcagagacaagtacaattaggttggaaatagggaaaaagctgaaatgctttgaattagctacagcaaagacccctttgtatctagtggcacggcaggagcaggttcatgtgatcccgggtctctgatcacttgtttgtttgttgttggaatccaggcctcatgtaggctgggctgtctccagatggctgtgtagctgcagatgacctcgtactcttcattttcggtctcctctcctcagtggatggggtctctgtcggggtttctgttgctgggataaaatgctatatccaaaagcaacttagagaggaaagggcttacttcaccttacagcttatagtccgttatccagggcagtcagggcaggaactcgaggcaggaccctggaagcaggaacggatgcagaggccataaaggaatggtctttactggcccgctctcttggcttgctcagcctgctttcttatagtccccaggatcactagccaaagggtggcattaccagcagtgatgggccctcccccatcagtcatcaattaagaagatgtgcagtaggttagcccacagactagtctgatagggacattttctcaattgaggctttctcttcccaagtgatggtagcttctatgaagttgactaaagctagcagtgcacatgaattataagcatgtaccaccacacccagttgcaactttcttacctcttcactaaatgcaacaactggctctgttagagtcaggcactaaaaagtcaaattgtgtatgtggtcccccccctcccccccgagacaggatttctctgtgtagccctgggtgtcctggaactcactttgtagagcaggctggcctcgaactcagaaatccgcctgcctctgcctcctgagtgctaggattaaaggcgtgcaccaccacgcctggctttttttttaagatttagtttttattatacataagtacactgtagctgtcttcagacataccagaagagggcatcagatctcattacagatggttgtgagccaccatgtggttgctgggatttgaactcaggacctctggaagagcagtcagtgctcttaactgctgagccatctctccagcccccaaattgtgtttttaaaagatgggagatttaagaggaaataggaagcattgaggatatagtttttttgtttgtttggtttggtttggtttggttttgagacagggtttctctgtgtagccctggctgtcctggaactcactctgtagaccaggctggtctagaactcggatccacctgcctctgcctctccagtgtttggattaaaggtgtgtaccatcattgtcttgtggacattgttttccagtgattctgagctcctttaaaagatttaatggaggccagatgtggtggaggcgctcacaatattggcacttaggagcctgaggcaggacggtctacagctcaagaccaacctgggtcacacagtgagactgcctcaaaagagaaaatcgaattttagttgtcatttttaacatatctttgtcatttttcctgtccaagatgtagactgcctgtcagacagtaccctctggaggaagctgtgtgtcaggcgcctgtgctgagcagagtgagtgagtgtggtccgtgagaacgtgccgcgcgcgcgcacacaccgcagctgagctcagcttgttccctgtcaaatatgttcacaggtggttccatggtcacttgtctggaaaagaagcagagaagctgctgacggagaagggcaagcatggcagcttcctcgttcgagagagccagagccaccccggagacttcgttctctccgtgcgcactggtgacgacaaaggggagagcaacgacggcaagtccaaagtgacccacgtcatgatccgctgtcaggtagagcaccatggggactgtgggcccgcatcagctgcattgggggcttctgctgagaggactagacaccagcacaccgcctgtccttctgtccttgcttggctgcaccccgtgtggggcccatcgttttgaagcactgttgttgtttctttccttttagttgttgctgtgtttttctgttggctgttttgtttctgtttttctgagatgggttgtatggatccatgactcctgaagcccattggctggtgacactgcactgtccctcccatgtctgtgggtgcacccctggggtcagcagacttcagaaaagcatcctgtgtctatctgaacacatgcagactgctttcttgtcacattccctagtgtatagcatcacggctgcacacatgacatcacgtgatgctgggcagaggcatggtgaggagtctgaggtgatgggaagtgtgttgtgtcattatagagtttacatttgattttgatttaattcattttatgccatttattgtctttggtgctgggatggagcctagtacctgtcccatcactgagctgcagtctcctgcctcccctgccttcctctcttgccgcccctgcctcctcagcactgctgtttcctgtccttcagagtacggtgctgttggggtttctgtttctgggagtcagtctctaggtttccgttgattgcagttcaggtttctgcagttggccagttcagtgcacccatcactcactgcacactacttcagatgccctcccagccaatctccagagtatgcaacactgttgtcgttgcttctgactggggctcctgagcctgttcaccatccagagcatctgtggatcttcccctgcccctaagtccttcatagtcaccatttgacctcttgtcacagtgtcttggacttttttccttggatactacatataaatgaggggacactgtatgctcctttcgcacttggatcatttgctttactgggaggctctcctgcctcatccacttgccaccaatgacagggttctcttgtcaaggccaagtgtggctccactgtgatgacgtggacacgaggtatgttaacatgatacatgtgtgtcttattctcatcatgctctctagacagacatgtggcttgtgtctatgtacaggttcatgtcactaagaacacagtggctgcaggcaggtagggagacaggaatgtagcatgaggtaatggcgccatctgtttggttttgaaaggagctgaaatacgacgttggtgggggagagcgctttgactctctgacagacctggtggagcattacaagaagaaccccatggtggagacgctgggcacagtcctgcagctcaagcaggtcaggatccatgaggactggctaacaggggaaagggctcaagggtcattccacagccacgtgaccctgttgctttgggcctgtgatggcacatttaccatggcaggagcacactcagcacacagggattactacacatctgagaaacagacaagaaggggcgctgatctgctgatctgcttcagtgacaccccccccccctcccaatttgggatgatgtgcctcctgcctttgcttctgtgaagtctttttctttctgcattgatactgtttaaaacatgctttctccttttccaccactgctgaacacaacagcccctcaacacaactcgtatcaatgctgctgaaattgaaagccgggttcgagagttaagcaagctggctgagaccacagataaagtcaagcagggcttttgggaagagtttgaggtaagtcactgacaacttgtttttctgtgtgctattagatgatgtttaaacaggtgagagggctgcactgaggcctggcttcctttgctgtgtgtgtggccggttgctgagagacttctttgaagcagaggggcattgtgttcctgggaagggttggcagcttgtctcagacagatgtgccagcggctccatttactttttggttcagaccactggcaggaccccaggaaagcagaaggatagaatttctctggcatctgaggggcttcagacaaaaggcagcttcagtgccatgtgtgaggccaggagaaggggcctggctgtgagttcacagcatagcagggaagtgaaggggctgacctctgtcttgagccctgctcgtgtgtgggcctgactgtggccctgtgcgctcatatgctgccgacccatgtgtcctctggtttgtctgtcttctctccttgctcctttgaccagagctttacagacagatcttctgtccttgttccctccacagtcactcaccttatgtcactcaccttatgtcactcatgcctgcacatagcacaaacctacaaatgtctgtgcactgtctgcgtttatattttgttttgttttttccagacaggacttctctatgtagccctggctggcctggaacttgctcagtagaccaggttggcctccagcttagagatctgcctgcttctgccatcccatgcccattttagagaatatttttaatttattctttgatagtttggaatgcagctaacacgcaccctcctccattttcccctccctttccctcctttctgtttcacaggactggttagtctatgctttgtgtaggacttgaggattcagcagctgtttgtgccaccatgtgccagacagctttcagagagaggtgctagttccattccacagaggagtgtgaggtcagagaggtcgagtagattgtccaccctccttagcacagatgttgataatctcagccctggagatgggcccatcctagaacattcttggtgcttgctctgcagtgatgcatagggactagaacttgggtctggtctcatatgagccattggggtggactctttgaacaccattccgaagtttcctgttgagagagacagggataaaggtgtcagtgaaggtctgatgagagcagaatgagccatgtggccatctttaaattatttatttagtgattggtcctgcggatccagtgcaggaccttgtgcaggcagagcctgtgctgtcccacttagcagcacttcatattatcttcctctttttctcaagattgaatatttctataaagatgagccttttgccacaagtgtatagccagtagttcatacttggttgtcaataaaatactgttctccagtgtattaattactataaagtaaaggatattttaatatagtcttcaacacgagggtgaagagagaaagaggagctggggagatgctgagccatctttgcagcccccagctctgagtcttctgagtgtagcgcagaggagatgatagactgcagcttcaggtagacatgttcaggtttgccttgaacatagtctgtaccatttcagccaggagttggccctgctgtgggaaaccaaagcccgccagaccttactctcaagagaggaagaagctggggtcttgccatcctccctgtctatctgtgttcctttctccatctacctccctgtccaggatctgcctagctgctagtccctcatctctacctcccaactgctgggattccagtatgcaccgccatctccccggttcaccctttgctccgtggccatggaaaacaaattgtagatggcttccttcccttcataacacatgagttcagcctgtcttttatacaccaataatagcataaaaggaaaaagtgagtggctttgtgtgcggtgaaccagtcaggctcccatctgtattgttggggttgtcagagcattgaggggtgggtcctgcagatgagatctcagattgtccccagctctccagggaagtcagccttaagaaactgcccgttgaaactggagttgggtccatgaggctaaggaagaaaggctactgcaggttgggttgtcggaagtttactcctattatagtttcaatccctgaagctaaagtttgagcctcacctgcagaacactgttatgagcacgtcagaactgcttcctagagaatgatgagtgcagcatcccgtgttccacggtgtgctctgattggggctggggaggtggggtggtggtggtggatctcacctttcgaagtgcactctgatgagctttcaaaggagcctgaattctactacttgagttgctgcagggtgctgttattaagaggaggctggagggagcaggttgtgaacccatcagcttttacttgggactgttaagagttttgtgtgtgtgtttgtttgttttggatacctcttcagtcttcagcttctccctctgggatttttctcaggggagccttcccatcccccatccccactgcaagctgggtacttccttcctattatatgtgcgcataggcatctgtgaataatgtacgtggctgctggtttaatgcatcacacatccagagaagcagataacttccgtgagtctattgaaggaagggactactttgcccagatgtcctgctgagggaacaagagggcatgtgtcatctaggaaagtgaccagtgcagtgagggtcccaggacagttccatttggttccttatatcctcagactccagcagacagccccaaccctctgactcccaagtagacttcaaataaagttttgtggatgcgttaaacctgagctccttcagagagctgcattggctaagtaagacgcttgctccagactcgacagaggggctgccactgatgctgtggtggcgtggggcactgtgctgggctttgcttcactggtggacagcttgttttcatccccgagtccccgatggaacccagggctgtgtgcagctgagatttgacatccctcatgcttcaggcattgtgatttaggctcacaggctggatttcaggaagactttagtttctgaactcagtgtttctgattaaatctcagcacatgataaaggggagaaaatccaacagacaaaacccttaaatcccaactagacagaaccataggacatttgctttactggggttacttccccagtgttttaactcctttccctagtaatttcagttttctgatgggcagtctcttcccttcagagggtgcctgacctacccgttagctctgctggcctctggctggaaggagccctagggccttcagctgctgcccccgatttctccaaagggactctgtcctgcttgtaggcactgtctctcctcagaggcactcatgctttacagaaacaagcctttagctgcaccctgggtgctgtctggagtgataattcttgctggtgatctctactggacatattcccctggtgactaagcggtcgacattaaaggacagcctccagtcagactagctgcaggccctaaatgctccaggtcacaggctagtggcaaaccagagcattccctggaggcccctagaacagcagtgtcggggtctgaggcctcctccctccgtctgagctctgtccagtttctgatagcacagctctctgtctgtcgcgttctctttagggctttgttggccttggctctggaattccatttgccctatgctctttccttctggtaccctgtgctgtggaggaagaggacattactgctgcttcccaggctgtgagtgcccttctgcagcttctgttttagctccttacatcttgaaccttctttagttgtggcatctccctgttgatgccactgaggtttttttttttgttatttgaggcaaggttgtgtatagctagctcaggtggctagccacaagctccctgaggctggagagacctcaaactccttgtctctaccttccaagtagccagtttctacagtgctggggattgggccaagggccttgtgtgtgctgcgtaaacccactaccaaccgagctacaccctcagcaccctttccccttttcagtatttgggacaagcctatgctgacctcgttgtctaagtactgggttcacaggcacccaccaccatgctttgccttgctgaagcaggttctctccctccccatccctctcttcctgtttcccttccctgctcagctccccatttcctcccttgcatcttgaagcaggagcacacccctgctctgttcctttcctttcctgctgcccatcctgttgcccctgcgttctcctcctgactgacccagcacccataagcgtgcgatgctttagtgctctgactccatggtttgggcggttttccactctgctgcttactgtctttgctcttcagactcgtgcctcccaagctggtcctcttcctctagagacagaactctccttttgctccatgtctttgaaagttgcacattgctctggagctgaaggctggaccattggtgcccttgatgcaatttccttctctttctcccatggccagaactgttgttccctcccatgtctgcctcttttggaaaggaaggcatttccatgatctgcgtcctgctgagcattgggcctctctgaccattgagctaggtgggcacctaattctatctccagatgcatgaagagatggtgcctgtgtggggtggctcaggtgggcagggcatggagagaggatttcagcctgatgttcaggtctcctacttgagaagacttgagcttctccatcgcatcccctgcctctgatgctgtaacatcctttatgcaaatctcagaactttcagtgactcctttttccttttggaagcatggtattttcattgtgaagaaccaagaatctgactcaagaaaagtcagaaagatgtcctcatgggtggcgatgacagatggtttcagcttggggacttctgtttcatgttccgttccaagttggccatgtgtgttttcttccactggcctgagattgccctgccttgcctgctccctcggtcctctgcctttcctgacttcatttcttctcagccttcctcttcctcatgcgtgagtctagacatgctgcccagtctcaccctgcccttcatggagttgggctatccagtgcccccttcatttctctgtggccccgtgacttctgcagaagagccatcccagacccagcacagttgagtgctttgtctttcacaaagccttttgggtgtatgggtgttttccttgcataaatgcctgtgttccatgtgcatgcagtacctgtggagaggctattcctagaatattagatctaattcccttgaaatgtgagctgctgggtgggtgctgggaaccaagcccaggtcctgtggaggagcagcaggactttcactgctgtgccatctctccagccccttctcacatttgctgaggttgcatagtgggatggtgtctctccacctctggctatgctcttctgagagcccatggtttggttgtaattcctggggaatgatgtcaccagtctgtgtcctagtttttttttttttttttttttttttttttactgcctggctttgcgttgtcttcagtgcagttgctgagtgacatgcaggttcacaggattgctggtgaatggaacactgcagaacatacaccttggagtagggaagggctacgggatacagtcagactcctgttcccattagcctggtgcccagaaggaagaggtttttggcagaggctagctgctaatctcagctacagctggagtgcctctggagacagaggatagacaatcctaactcctgagatcttttttgtttgtttgtttgtttgagacagggtttctctgtgtagccccggctgtcccggagctcactctgtagaccaggctagccttgaacttgaaatacacctgcctctgcctcccaagtgctgggattaaaggcgtgcaccaccattgcccagcaactgctgagatcttattggctatctagctgccctcattgtaggactgaagaggtctgagcagtttgggcctggacatgcggagggatgggctgcagagtcatggagggaaagctgaggtaggcgtcatacatttgttatccctgaaggctgctcactgctgtcagtcagcacccaactgcctggatgcaagggcctgggcttggcccttgggggcctcagggctcacagcctgacatgacctccacagcatgtgcaaaaggcagttgggaatgttgcacagagctcctgaaagctcttttgagttttcttgtcaaggtcattcttgatagcaccctcattgcaggagctaagataaaccagggaggtgcagggccctaccttttacagagatgagctgcaacatgtccttatgaataaacgtcacatgacgtttgaatcataggttatggtcacaagttactgccaagttttagtaaagctgcaggcccttaccctgtcaccattgccagggcacctcccctccccgctcctcgctctggctgcttctgaagggttggatcccctcaatgcatgcacttatttttgaatatcatccctgtggcctgtccacctcattgcctttgtggccagctcaaggtcagggaacgccagctcccagaaggcaaatgactttaattacttgatctgaacgagttttaaaaaaactcatataagcattgcattgtccaggtctatagatcttattttctttctgctccggtcctcaccagctaaagacttgcactgtgtgccatgtgcaaggctgaactttgtatgttgagactgagtcacaaacttgttttaagtccccagcatttcccccatcattgacatttcagctaagtgaagtggtgcaggctccattgttgtgctgggtagctctgcctctccttgcagagagcttcccaggctgctcgctgttagacacatcatagaggaactcttttttcattttaactgcctctcacccttctcatttgtctgtctgtgattttctatcaaaaacggcttaagggctctgtggcagatcactgcctagcgtacatcagagaccccaggctccaccttcagcaacacagaactgacaagctaggcttgctgagagctaaagagattcttttttttttttttttttttttgtcatttcgaaaacgaatctccctaactgcctcagcctggcttttcccaactgggccagtctccctttatgctttatctctttccttgatggcatctccagttctttgcccctcagagctgtccattgctttcttctggaatccatcttgctccctgctttttccttctgggtcaaattgcattttgtccaggtttcctgggggaaagtgtagggcagcagctctggacacagctgtcattaaggtgctgacttgggcacgacataagaggaccccaaagctgggcgtcttgtcgtctggtgacaccaagctgcttctgcctttcctgtgtccatattctagggctgaagaccctgcactgtgtgcttgatgcctgcaaaccctgtgctggctctcaccagtgccggccttgtgcctttcttacacccattgtagcacgtttaggggcaaaacagctaaggtaaacaggccgggtcactgaaacaaaaaaagaacgccacgtccacgttttctccctggtgcatgtgctgctgccgttggtgtgtactctggtcagtgtaagcatgtggctcacatcccattctgggagtgtgactaactgtgatcatctttccaggtgatagtctnnnnnnnnnnnnnnnnnnnntccctccctccctccctccctccctccctttgttgatttacttgtgtatgtatatgtgtgtgcgcgcacgcgcatggatggctcatacgtaccatggtgtgtgtgtgtggaggtcagaggacagctttcagatgttcttctctttcacatgtagtttgtggggactgagctcaggtctcagatgtgagccatttgacttccagctctattgagcacgtctgatacatgataacatttcctcttctctgtttctagacgctccagcaacaggaatgcaaacttctctatagccgaaaagaaggacagagacaagaaaataaaaacaaaaacagatacaaaaacatcctgccctgtgagtatctgtctcctgcctcagtagcagccaatgtgcgctggggtcacatgctggctaatataaccagtcgtgatgggactgatgccctcccgaggccaggaaagctaagtagcggctctctgtggtactctcctggtcgtgttacctacatataccaaccttgaggctcgtcgtgtctcgagagtcagactcaggcaagtgcctcatgggctgagttgtgtctctgctcctcttgacaaatctgtgagttagaggtaggtgcctctcctctgggcctctgtttcccattcggagaaaggagagcctactgggctcatcatcaccttctgctggctcagaacaagcgacaagggaccttgtgaacacccagagctgagccccctgtagtatacacacggtggcagggcgctagggcctttagtgaggaccccatcactgcacaggctggcgctcactctgctgctgcacattttgatgttacctaatctagaactgtgtagatgaaagcagggcacttgttttgtctgagcactgggaaagtgaagggcagatctcaccactcagggtgagcgagcactctgccaccatgccacagccccagccctggtcagaaacccgcgccgtgtgtgtgtgtgtgtgtgtgtgtgtgtgtgtgtgtgtgtgttcgtgttcattccacatggctgtctgacttgtgtaggggaggaggcattgctttcatgagacaagcaaaccagagtttgcagagaatcacgtggaactgaataggggtcctgggggcttggaggacctcattctttttatttctaaatttcgccccctcagaggaggttctcactgtaaagtgcagctgtttctcaaatgacctgtctgctgctgtgctagccaccaatcaatcagtgtgtcctctgatccttccttttttttttttttttttaaatgttggtgattgaacccagggctacatcaccaacccctttcttaaatcctttttttttttttgagacagtttcataagttacccaggtgggctttgaacttgtggttctcccgtttcatccttctgtgtagctgggattccaggcctgcaccgtcctatgagtgcacatcttatttctttaaagatgggggacgaggcagaagatcaaaattctatctatgaaacacatccagccttgcttctgattgccatcgtaaactacgttggttttgatagagcactcagaattttatactgataatgtatttttgtacagaattaagacaactcatactttatgaatcttgtcttacaaacactgtattttactctgtctccttaagaaaccttttgttatagaacatgtggaatatatcaacatacaaaagctgacatattgttgcccagcctcaggagtagccagctcctgtgtggccttgtttcgtctgtactcaggcccacctctctttccctaggtggctttgaaaatcttagatgtcattgttagtactttagtcttctttttaaaaccagaaaccagctggggatatagctgagtggcacactgtttgtctagcatgtataaggctctgggtttaatccctacctttgtcaccaaaacccagataggaagaaaaacaggagcccaaaccttttgggttgaaatgattttggatccataagacgttatgaagatagcataaatggttctcatacccagtgcctgtaccccagagcatcaccgagacaggaaagtgaggtgttgtggcaggttgcacatgtgctgactggagatttgatcctgtggaagtcattgttagactggcctggcctgagccccgctggcttctgctgaagctgaggactgacagctgtcatctctttctcctcagttgatcataccagggtcgttctgcatgatggggatcccaatgagcctgtttctgattacattaatgcaaacatcatcatggtaagcttgactttggctatattttctggccatgtgttggaagcctctttataccaatgacaccatctttcaaatgcttgaaggcttttcttcctgacttctagcctgagtttgagaccaagtgcaacaattccaaacccaaaaagagttacattgccactcaaggctgcctgcagaacacggtgaatgacttctggcggatggtgttccaggagaactctcgagtcattgtcatgaccacaaaggaagtggagagagggaaggtacacacttatnnnnnnnnnnnnnnnnnnnnccacccccaagctctgggctctgtgtgcccagcatctgataaagtattctttactattcaaattatggaatgtgtttctggattgtggtggtatttggctttaatctcagcatccaaagacaaggaagcaggcagatctctgagtttgaggccagcctggtctacagagcagttccaagatagccagggctacatagaaaccctgtctcagaaaacaaacaaacaacaaaatattgaatgtgtcaggtgggtctggctgatcctctggaaaaaaaaaggctggactggataggtctcagtgtgtgtatttatttgccttctcctcctcctcttttctaactttttcttttcaaagatacagagttttatgttcagcctagccttgagctctatgtagaaaaaactggtgtttaaaggaaccccttaatgctcctacctttttaagtgctgggatgcatgtgagcacccatgggtccagcgtgcttattggtgctttctgattggagttcatggagcgctgtggaatgtccccactccactcagttggttttgagggaacccatacagaaggctccttagtgccactcccttagcccctgtctacatggtggtgtcgtcttggatctcttcctttgtctgagccaggacatgtgctttgctcatctgtgtcttttgtggcgtgtgccacaatttataggtttttgatatttggattttaattgtgttctggttagagtttttgtttggatattctctattgccttacataaaattgagtgcaatttcatagtcacatttagaagctaacctgagacaggtggggctcttggtagttgagcctggcaactgagaggcaagtgatggtgcagggttttggttggtgtacttttgcatgcctttagcagtgatgttaggtgtcctgagttcctgggctcttctcagttacagctcttcccagttcctgctttctgcttgatggaaaggtcagagttcatctagcacagaggacatgggctcgtaacagaggaatcaggctagccaccattggaagtgcagttgaaaactccagagcagagagcctgggcagaatggtacctggtgcctgtgctcagctccagtcctcacctccttgacccagtccttcatgtcaccctgggagtgtgcacagtagttctggagtctcttgacagcctttgtttacagcctgtgtccctcactgcacagaagcaaaaccagattgtggcagctctcctacgcagcagtcctgcaacatgcaaaccactaagcagagggccgcaggtgctgtgagtcagctgaaatgtctcttttcaaggcagggtggttttgtgttctctgttgaggcctctgtagtgaccagagcaatccttgaattgattggtcagaaaacagcaccattacgttggcagtgatagaaatcctaccagacggtcaaatgcaaaggctgaatttagaataaaaatcacatattccatcagctgctccttctgtctcggggtcctttctgggttagttactaagctctgtagctagctgtcctcttgttttttaccacctgtaagttactcagcatttctagactttgatgtaaactttccttgctgatgttcacatgggtggttttagaaagtgagtgtgacgatttccagaaagacagaagcagagcatgttctgtcttggacttatcattggtagatgatggaactgttcctcttggagataacacaggctcattcctcggctggacaaggcttcttacctttatgtcattgttacttctttctcagctgcctgccctggtgtttgttttgaaacaggatcttgctatatagttctggctggcctgctattcactatgtagagcaatccagacttacactggaagtgattctcctgcctctgtcttcagggactacaagtgtgcacactcagctttcagtttatctgttcagggtaccactatgcagctctagctggcctggaacttgctatgtagatcaggttgtccctgagctcacagagacctgcttgcctctgcttcccaagtgccaatactcaatacataaatcaataatggtgtgtgcttcccccctctgttcgttctttctttctttctttctttctttctttctttctttctttctttctttctcaagattcatttatttattatatgtaagtacactgtagctgtcttcagacactccagaagagggcatcagattttgttacggatggttgtgagccagccaccatgtggttgctgggatttgaactcgggacctttggaagagcagtcggcgctcttaaccactgagccatctcacccagcccccagctcccccccccccccccccaatctgttcttgaagccaacagccattgcagactgtgttcttggttttgggaagctggtgtgtggttggtgtcagatgagtctggatatagagaaagcagctggcccagaaccctggctgcccctctgagtgagctgttcatactgttcagagaaatccaggtacacatgataggacagtgtcagccatctgcctgtcctctcagaacaactgatagaatgctagaattgcaagttctgcttgcctgggggcagtccctcccactttgcctgttttatcctcagagctgaataagcaggtgttgactctgatctggtagctagtgggtggggcatggggtgggcatctggccaacctgcggcacctcctaccctcccccctgtggcctgccttgctcatttgcattgttctcttgttggcattctagaggatagaggcaggctcctgtcccaggaggagcctcctgctgctgtcaccagcaggcctgggatgattggtcattgcaggtctggattttcactagggcttgggacattaattaacaggctccttgtggttccttccagagcaaatgtgtcaagtactggcctgatgagtatgcgctcaaagaatacggggtcatgcgtgttaggaacgtcaaagaaagtgccgcccatgactacactttacgagagctcaaactctctaaggtcggacaagtaagtatattgtcgtattctagacactgtgtagctgtccatgtttcgaagtcactgtggtactctgctcgcattcaacctttgtcctgtgtcctgtcactcactggttgagcgccacgtcgggtgcctcatagctgttgagcccagtttgccactatcttcccttgtgaggaaggcaggcataggtcctgccctcacagagcgtggagagatgggggtaagggtaactgcagcttcctggccctcaactctttttttgttttttgtttttttgttttttgtttttgtttgtttttgttttttcgagacagggtttctctgtgtagtcctggctgttctggaactcactctgtagaccaggctggcctccaattcagaaatccacctgcctctgcctcccgagtgctgggattaaaggcgtgtgccaccactgcctggcagccttcaactcttgtgacatgacacagggtaggtaggtagggcctctgagaggtgacacttgctgagttgccagccagaggggctgtgcatgcaggcagaagaacaggctccaggtaggggagcagctaccgtcccaggctgtgatcaagtctgtgagcaaggttagtgctggagctcttctccatggcctgtggctcaggcttagtcctggagtggctggctcggagtcatgttgttgtgtgtttacaagggccttgtttgatttctttggggattcctagattaagaaatctacttttatcctcatggattaaagtcaggtatgctgagaagccctacacttagatagctgtgcttcaggctgaggtgacctgagtgtggcttctccagctggcgtgaggttgggcctctgcataaccttttgggcacaggcgttgtctgagccacatcctgatagcctgactgcaggaaaatgggatactgactgggcaggagaatttcaggagggtattgcagaaatactcttggttaggtcttgttggaaatagccttagaaattaataaattaattattatttataacatttactagtattataaataagatcaccactactactactactactactattactactactactactactactactactactactactacgagacagggtttcactatgaatccctgattgacctggaactggctacagagacaggctgggctcaaattcgcagatatcttcctgcatctgcctttctagtgctgggattaaaggtctgtgctaccatgactgactgaggatttttattttgattatctgcctggcctggaatttgcaatatagaccaggttagcctcaaactcaaagagattcccctgcctctgtctccatatgctggaattaaaggcatgcccccatacctggctcctgggtattaaagtttacttacttgtttttacatttattttgtgtgtgtgtgtgtgtgtgtgtgtgtgtgtgtgtatgcgtgtgcatgcatgcatgcctgtatgtatgtatgcaaaggttagagcaccatttatgggaattggttctctctctctgccatgtggtttgaggatattaagagctttgagctttatccaccatttggaacttgtctcaattaattattattattttaaatcaatcttttttttaagttttatttatgtatttttataggagtacactgtcgctgtcttcagacacagcaaaagggggcatcggatcccattacagatggttgtgagccaccatgtggttgctgggaattgaactcaggtcctctggaagaactgtcagttctcttaatcgctgagccatctctccagccccctgtctcaattcttgtgcccagtgagcacatgtaaagctgtgttctgggaggcctctgtgttggtctaggcctttgacctgttctgcatgtctccagcagtggtctttcctgctgcgcttactcctttggttgggaatggtatggaagcagtgaggatcaggtcactggaaagtcatgtgcaggggtcgggacagtttggctattggagggaaaaaagagaccaaaggtgtctcagagccatgagtctgagtggacagcattgttgtggccagtgcgagaagccagacgcacagctgctgtgtggacgcattgagccgagctgttgagcaggcatctccatcgggtgtcaggagagttatgatgcacatatgtttctagcactgtgctgcttgctggggacagacaacacaggtgctgtcttgctctctcagttgcactccactgtccagattatgttgaatcacatgccctgatatgtcactatagagtgcagttagggccaagtcaaagggtgctgtgtgctgagatgggccagggaaggaagttgatactcacttagccagccacagccggtactgagcactcattctctgacccacagaactggaggggatgagcccgctgcagggagagctcaggagcagttggcagatgctgcctagagcggtgagatgaagtgagatggtggacgttggctgggggagcataggggaccgggatagcagaggctggcttgggatccttgtagtggaagtgatggttgggtgagcacaggatgaccctgtagcctccagacttgcagagtaggctgcaggagggacagcagggcagctgtcagggaggcttggcagagggccgtgacccagtgtattgtgggtaggctggttccagaccaaagctttcccctgtaaagatggaagggcaggaggagagcctagggctgatggtgagcagaaagggctctgtttcctgtgctctctgagggggtgtatatagtgtgtgtaagccacaggaggtgtgttcctcttggcacacccgtggtggtcagctttcaggagttggttctctgggattgtcaggtttgatggcaggtgtctttacccactgagctgccttgccaaccctcttgtgacatctcatgatgaactgtcaggcttgtcagtgtttctgagtagcagacaggcagtttctttcttttggtgctagcaaaaagctgttcatcttgctcaacaccccctccctcctttgaaaggaatgtgtgttgtgtggcttgtctctggatacagagaatgctgcagggcttgctccatcttgtgtaccaggagattttaagagggaggtgtgggagatggcggcacacttgcgctcttatcctggcatagaggctaacatggatccgtctggctcccgccttgctatgacaagtcacctactgtacagcactgatgtacagagatgccctggctaagaaggggtgctgctgtgcagtgtggcagtgcatgctctgtttctcttactggcctcctgtctgtgacccatgaagttgcctgggtttcaatcacttagtaacgacaaggttagttttccatgacatcagcagattaagtgcatgtagcacacaggagatttttttaatcacagcaagcacccttggatgtaaggaagttcaccagcattggtggatattgaagcctccctccctccctctgacccctgcctttcctttctctccccttcatatctttgcccttccagccctctcttcttcctttcctctctttcgtcgttccccccgcccctctccctttccttagtgtttcctggcttgtctccgtgggaaagtcactggtggctgttccaggccagctttgagcttctgttcttcccgccctctcttcttcctttcctttcctctggtccagctttgagcttctgtggtcaaagtggtcctggtgcctctgttgatcccttgctgttgttgtagctaagaacagccaggatattctcagtcctcaccattacttccattagctgggagggcctttgtttagctgctttaaccctctgtgtgagaaacaggtctttgcaaatgcatttgggggtttgactctgcagtaaggggcttcctgggatttgagcccaagcctcaccatctaattcacaaagcctgttgtctggctgtgacagtgctgtaatggacgtgggtgcctgcatgaggctgcaagggcagatgctcgagggagctagagtttgccaggctgctagttgggaagacagactgcagtccttagggccctccgcggctctgaagttgagtgctgcctgactgaggacgttggggaatatggcctgctctgatgactctggactatgccttggctacattttgccagaagatgctacaaattgcctagctccatgtcttggatctcctaacaggcaggtgctccttccaggctgacccattgattgtcaaagaagcactcctgggcaccagagagtggctttccatctgcaaggcaccaggaaaggtcagcagccgccgtggctcctcagcctttggtttatttaattctgttctggcttttcttggctctactccagggaaacacagagagaaccgtctggcagtaccactttcggacctggccagaccatggcgtgcctagtgaccctggaggtgtgctggacttcctggaggaggtccaccacaagcaggagagcatcgtggatgcaggccctgtcgtggttcactgcaggtgactgcccagcttgctttcctttaatagtttctgttacttaggggctgggaagtcagttgtccttggtagggatgtgacggacacactgttcccagcactctgcagactgctcattctgagggcagtccttcccacataggcctttgtggaggctgccccagggtcaccacagcagaatgtatggttctatgagggatgcttcagttttctacagtctcgttcatatgctgagccaatccagaaatgagtgaagctttccttgtcgatcactttgtttgttgttgttattttgagataggattttactatgtagtctatgttggccactacctctgcctccagaatgttgcggtaacaggcctgtaccaccagggctggactgttcagtgttttttgttttgtttttgtttttgtttttaaaccaccataaatgtaggttttgcagctaggttttggctatttaggatagaaacgaacatacctttcttcctctgagtatctgctgtggcttttaagacaggaagccacgagtctgtgggcaagtttgtatgtccagaagagccataatttgtccaactgttttcaagtaaaagttgtatgaaacttgggagtagagaaaagatgccacgtgttgtttcagggccccaagtctcaccactgtgaacctnnnnnnnnnnnnnnnnnnnnctgtgaacctcgtggtgatccccccccccccgcacccccactccacagatggggaaacaaggataccctagggggcccatgccaggactgaacccctctgcacgggcaggggttgctgataggaagcttctcctatcagcacattgtgtagacacacagcagagagcctgtcgacattgacagcttggttctgagtgaagctccatcacttcatcactctgctcttactcttctacctacagcgctgggattggccggacaggaaccttcattgtgattgacatccttattgacatcattcgagagaaaggtaggtcattggaggacaagaagccgcaattcctgttcaagtttgtgacaggaggtgccaggaaacgtagcctgcgagagagaatttgcaggagaaagaagcagttatggaaatacggatgagattcactttcaatgtgttttgctaaaaatagtcctagcactttggtcccatcactgtctcttctgtcacctgtgtcacatggtccctcctgccctggtgttgggtggcattcttggggagcgaggggctcctggggcattgtcctggcatttgctggcattgttatgcgtgttgactcaggagttctgccctgcacccgcatggctagttgatgggaaggaccggctctctgtccttgctgtggcaggcggtgctcctgcagctttagggtctgtgctttgcaggtgtggactgtgacatcgacgttcctaaaaccattcagatggtgcggtcccagaggtcggggatggtccagacagaagcacagtaccggtttatctacatggctgtccagcactacatagagacgctgcagcgccggatcgaggaggagcaggtatggaatgaggctctgacacatggctcagctcctgtctggactcgctctcttcatctggaaaatgttgacagttggcctccctgtaagctgtggtcagcatccactgcctcccagttgagggaagtgtggtgccatcatcatgagcggcagtcggctctgccttacaaagaggaagtgactttcatatgctaggcttagaactcagggtccacagtttccagccatttcagctttgctctagattgatctattctgattctgccttgtaaaatgaatgccttatttctaatagagcgtggcagtttgagccactaatttggctgcattgaaacagtgaatttcaattttaataagctatgcataatgaagagtgtgcagttggagcctttccatgtgagactattcataacagacacaaagctgagctaattaggatgcgccaagctgagggagatgaggagagccgttcttttggggagcttttcttattcctttcccaaaccctgttgtgctgcagcagatgggtggtgtctaaacaccaaccacggttgtcctttttattgctattgctttccaaaagcccaggagaggggacttggtgcgtgtcatagggtagcaggctgtctcttaatgagtagcttaaaaaaaaaaaacagtgatcatctcgctgtatagccctggctgacctgaaatcagtttgtagatcaggctggccttgaactcaaagatgcacctgctctgcctcacaaatgttatgattaaaggtgtgcgccaccatgctggcctggaagagtagggagaaccgcaccatcctccttgagagccagaggcgggccccttcctgagtttaggtactcaagtagacgcggggtcaggaggtcacatgattgattaacaagccacccatccccaactttaattttttaaatatgaattcaatgtaagcagtttttttttttttttttttgtggtgttaaagagcaaacctacgtacggcctcatgcacgctagctcagaactctgcccctgagctgcaccccagagcctcatgcacactaagttagcactgcaccactgacctgtacctcccacctctgaacctggatggctgccctaaagttcttttatacatgtctcccagtttacacttaattgggaccactcatagtttagaagagatgctcagggaataaataaagagctagcacatggttgctcagcctggtcagaaacattcaggagattctgtcatcttgtcgggagaagtcctctgtaccatttgggtttgtatttgagttgggattgagggtctttggctgctccccattgagggactgctgcttggagccttcatattgcttcctggcactgagactattaagactgaggctgtaagttggatttaggaaataattttgggggaaaagaatcttatttagtaacttggttgattgtggggaaggagtatttactgatggggacacaaagcatgtgtttcagttacttacatgttaacaagtgagtgtcctgctgattccacctgaaggatgcaagcttgcactcactgactcgctcactcattcattcatacatacaatcattcattcatacagtcattcattcagctaattcattttgatactagtatgtgttagcactttgcaattgtattaactcagattttggaacttggaactttggtgttaaaaaagtatataggagggatgggttgtggtggaacaagcctttgaggccagcacccagagaaaggactaatctctaagttcaaggtcagccttgtttacgtagtatgctctaggacagccagagctacatagtgaggcctatgtctcaaaaataaacatacatttctgcgtgtatggtttgggctgggggtgtagctcacttggtttggaacttgcctagtatacacagagctatggttggccccatgtaaacctgaagtgctggcatgtgcctgaatctcagcacttgcgagaccaagatgggatcagaaattcaaggttgtctttggctgtgtattgagttccaggttagtgagagctatataggacgatattgcaaaaacaacaaagcaacagtgaaaaagaaaactaccactgcacacaaaagagtcaactgcacacaaaacagtcaactacctgtctccctgcttatttttaaattgaatttcaatgtgtgtgagcctgtgtccatgtgtagaaggaggaggaatcagaccccttgcaccaggatgtgcactgcccagggttgctgatgggaacttagctttcatctgcagaagcacttgcgtccttaaccactgcactatatggctccagcccaagcccagcggattcttaaattaagcaacaggacaaaactcatttagtataatgaattagttcaaaatgtagccatcttccaactttggatgagttaagccctttgggagtaaaagaattgctaaatgaaaacaaagtggcagttgggtggagaaccgtggggaaagaggcggagtgaaacagaggaagcgggccagcaagaaagagatacacagaggggcgagcagagaacgggacagagcaccgtagggacagtcctgagtggcttattaagactgcctcttgtgctgcagggctttttgtttgttatttcaagacagagtttctttgtctgtacagcccttgctatcctggaacttactctgtggaccaggctggcttcaaactcacaaagatctgcctgcctctgccccgcaagcaccgggatcaaaagtggcaccaccagtgcccagctgtgccactgcagatttgttgagaggttttttttttgttttttttttttttttaattttccatttatattagtaagtactttatttgcaaaagcagtgtgtggagtgcgtggtatttcttttactcaacttctgaacacaagcatttatttttttcttcaaactttatttaatatacataatatttaaaaagggaatgtttataacttacatgagtctgtacctctttgcttctaagtgcattggtatatattttttaaaaaaagatgttctgttacatcatcatgattcagttactaagttgggggagcaaattgaaagctctgtataatctgcaggtcagggctggagcccagcgtgtgagcatttactaggctcctggggtccatcccagtacagcacacaagcttgcccagcatgtgtgagcacttatgtagcttgaggcaagaaggctgggaattccagtctagcctgggctatgttagaccttttcttgataaaaccacaaccaaacaagaaattaaacatatgtcttggaaatacagctcagaggttaaggatacacactgtttttatagaggacatgatggcagagggctcaaaactgcaggtaactccacctctnnnnnnnnnnnnnnnnnnnnnnnnnnnnnnnnnnnnnnnnnnnnnnnnnnnnnnnnnnnnnnnnnnnnnnnnnnnnnnnnnnnnnnnnnnnnnnnnnnnnnnnnnnnnnnnnnnnnnnnnnnnnnnnnnnnnnnnnnnnnnntcatggtgacttcctcatgtgcacacacagacataaacacaactcaaaaagctaaagtaggccatactccacattcagatttttccagtttgtcttgctgtggtcagggtcacatggtgtgtatagcattcatgtttgtttcctgtctttcatctggaatagtttctatgtcatactattgctcttgctccatacttgggacattccaggagctgtcagttgcaccctgcagctgagactcaggctgtgctgtgccaggcccttctgcaccactccagtaccttagggctaagttgattcaggacagtcaggtcagctctgcctcttgagaagatgatggtgaggtttcttcactgggaacttacagaatcaaggctagctgggcatggtggcacatgcctttaattcctatagtgcagagacacagaggcagggggatttctgtgagttccaggccagtcagggctatataatgagactctgcctcaaaacaaaaatactgtgtctatgtattgagagtgtacagtgtattttgtgtgtggaaatgctatgggatgattgtcatggttagttggttagtgtgcccagcaccccacagtgcatgctgaggtggtggagtctactctcagcagagttcaagtttgctctaccttgtccagtccagtgctgggcatgaggcttccagagcccgtggaagatgttatgtctgaagatatgtactgtggtcagtgtctccctcctgccacagtccccaacagcccctgccctaatcacagtttgtagaagtcgggatgcttggtgagccttccaattctggattggagttcattcatttcatatggtcaagttgacaaccaggaataaccactgcaggttagaatcctgttcttcctgccccctcctccccagttctgggatggggatgtgcacagctccctctccttgctgctcagtctcccagaatggaaggtgtccagagtgaagagggtggccacgcaggagcctcactttgattggatttgttgtctgtgctctgggagcacatccatggatagtgtgcagtggccattgactcttcacatagtgtacccatgcctaagcatcccagggcacttggtcttagacatgaagcctgtagattctcatgttccttgaataagaactactcattcctcctgtggtcttcatgtagcccaggaaggccttgaacatagggaagtctgcacatgtgcagtacaggtgcattgttatggatattcactgcatggagagccgactctgcagggctgtctgctctctacacacatggcatgtgtgagcctttatacatggtgagatgagattacattcctgttgtttgctctgttggtttccttcccctaccatttcatcttagggtgctgtggttgagatggctgagcacatctcaacattgtgggagggctctgggtgccatcgccaatactgctaaatacataaagtgcattactgtgccttccatccttgcacacagtgatagagctctgtgctgaagcaggagtagtgcctctagcctgtgtcagtcagcagttccttgcagctctgggggctctgagggttgtggttgcagcacactcctcctgcaggtgccgtgagctcctaaccatttagtcagcatgttagtgttcttaagagtctggcctgtgggctggagagatggcttagcagttaagagcactgactgctcttccagaggtcctgagttcaattcccagcaaccacatggtggctcacgaccatctgtaatgggatctgatgccttcttctggtgtgtctgaagatagctacagtgtgctcatataaataaaaataagtaaatcttaaaaaaaaaaaaaagagtctagcctgtccatctgcctctttttttttcttttgataaaatagcttttttgtttctgtatttttctaaaaatcatatccacagtcctccttacttgtatttttttttccttaactttcagaaaagcaaaagaaaaggacatgaatataccaatattaagtattccttggtggaccagacaagtggtgatcagagtcccctgccaccctgcaccccaacgccaccctgtgcagagtaagtagcgatacggcggcagcgtaggtctggtagaagcttaacagcagttgcttgcagtattctcctcaggcttgcttgctgcccactgatggtgcatggggcggtggggtccagggactctctagggctcatggttgcagggcccctaaccagtaggcacgtgatgggctctccaggatcctgtggggccctgggcatgttaggtagggttctctggggaaaatctaattttccttttgcagggagcattatttcagtgggaagcgctgtcccttacagtgtggagactcttaagaataaataaactctctgttcatgtgtggacatgactatgatctgccaatcttcctgtcagtcagggtttttaaaccaagggtcagaaagccagagcccataggctagctttgctttttaaaggagttcttatttaagacaaacaaacaaacaaccccaaaaacctgacaagccaacagttgcatggggacagctatcccagtaggaaatggcgagcaattacgaatgggtgtgctgtaaaagaagctgcaggtggcttacggacatgcaggagaggctcattttccttggtggccagcaaacacgaagggaaagctcaaagttctttttttttttttggggggggggttcgagacagggtttctctgtatagccctggctgtcctggaactcactttgtagaccaggctggcctcgaacccagaaatccacctgcctctgcctcccaagtgctgggattaaaggtatgtgcccccaacgcccggcttcaaagttctttccaccaagcagagccaccaagcagtaccagcagggggtgtccagtggtggtgaggacagtttttaaggaacggctgttatatagtggtggttcaagcacattggttcagctccacaggacagcttgccccaaactgcagccagagccttctgaacacactaaaatttctgaccttgaacttggagattgcctcttatggaagtgctcagatctcaggaaagattgtgttccagaggcattcagtatgatgccatcttaacggtttgtacatctgtgacagaaaagtgtgacatttccagcatgtgagttcaactagagacccacttagaagcagaaagggcccaggccctattagtcagactccaagtaggactgaacttaggacaaaaaatggaaaataatccctggtgctcactgttgtcaccgacaacaaccctgtgcagcagcggcttggagggctcaggtggtagagtatgtaaccagcggtgtggccatgcctgtctacatcattctctgtgtctgttagacagcctgcttacaactcgtgacgtcaaagtgtcttaggccatgttggggtgaaacaccccagttctctgagctggcgctctatagcctgccactgaaggctcctgggagcagcaggactccagtagaaaccacattcacattctgggagacccaggtccctgcaacttaactgacagtttccagggctgtttggccaggataggattgaggtctgctgtgacctcactctgttcctcctgtcacctcaatgcttgatgtctgcaagggctcaggcttacatgtctcacaccgtagcccctttacccctcatgtacccgggaaaggaaaaccccaaggcgtagctgacagaggccgtctgaccagtagggtcatcatcacccattggtcatcaccacccattggttcttcagaagggctttggcagctcctggtttaaagtaggacacgcagggcagtatctgttagccagtcatgtgctagcagctgtgctgcctgtagcccaaggttgctctccgccataacatttacctttccttcccctggaatcccacttgtttgcttctgccgtgggcttttaaagccccgctgactttaatattggctctactacgcagctctgagagcagatagaggcctgtgtttacattctctctctgttaaacacagaaatgaaattatgtggcaagggtgttctctcctgagtcaccttgtcccttcctgctttcctctgccccagcaggctgactggagacactggtgtcttatacagttagctgtggtaacttgatggggagccaacatccttcctatgaagctcacccatgactgacaagcaactctgccacaccctttttgttgtcccatgtagtatgcacacctcagatcctggccctggggctgctcaggatctgtcctcatgtcccacacgaccggctgattctgttctttacagaaggaggctgggcccgcagatgtgttagttcatccaaggctcttagggtgaccggagccctcacttgtgatgcttctggggaaatggccaccgttcccatctgtgtgcatgacccaactcctcccctgccctccaagctgcctgccctccattcacactccaaaaggcaaaggactcgaggcccctgctgcttttcccacttcacgtgtgtgatgtctgttttgagagtcagctccagagtgggaagggggtccgtctgagcatagctggacatggcagttcaggttagcgtcttccttcttctctgtctgcagaatgagggaggacagcgcccgagtctatgagaacgtgggcctcatgcagcagcagaggagtttcagatgagcccacggcgacagaacgcaggtattgagtgtcacggctttctctggggcggattcacagcagtctagacagacgggtgatttgtgcatgccagagcaagatgttctatgactgagttgtgcagagcagcctctttttctttgccttggccctctccagcctgggtttggtatacagttcatggagcattaagtcagatcagttaactgtgtggggatggggctggcccagcagttgacagggatgtagtggacttgggtcggtccatgtcttggcatcaacagcaggggtgcttctgagggtgtggggtcccaggctcccctgagttttgattgagtcattttcagtgaggtgtgaggtgtgcctccctggcttctgtggtaagttagaaacacacagtatggcgtcccaacgttgacatttctggcagcgatgatgtagctcaactgagagcatttattcagcatgtgtgtgtgtgtgtgtgtgtgtgtgtgtgtgtgtgtgtgtgtgtgtgtgtggcatgccggcttcagtgcccagcacccctcagagaagatgtatagatgtgtgctccctaaaagtctaacgtgtttctttctcagatgtgaactttcacccctttcctaaaatgtcaagactagacgagcgttcccaggacccgtgcgtgcgttcagaagccggcactggctggactgcctcttgagaagcgaagtttggaaccatttgaacagcacgtgcctaattggcacctcctttcctcagctaaggagagactgctctgcgttcttgacaatgctattttcatagaattggttttgaattgtggaagcagctaaattgtgctctgtattttctacattatgggactcaaattctagttatgggcaggattttgtttctttttatgaccttaacagatctgattttttttttctttctctctctttggggaatcatgggccccttgtaagaagaaaggatttagggagattccggcacagcctccccaaaagccagccgtctgtaacccactgttcatcttgctgctctgcacagggctcccagggccctggctggagactgcttagggtcatcatcatcacagaggctcactgtttagttccagggaccagtaggccaggctgcaggcttgcacctggtgagggccttctggctgtgctacactggacgggagagcaccaagtggggaatcacttttatggcacaagttcactgcaccctcaagacccaggtatcccttatcatctcactgtccacacagtgacattgggaggtctttgtgctccctgcagacacatgtcagggcacttttaaaacagattgacccagccaaggacagttcacttttggtggcttcttttgtttagtgaaacggtcattcagccactgaatgagagggtcaggaggtagacagtcatggctgaaagaaaggccctgggaactggtgtgtgaagtctttcttctgaagatgactccttggctgcaggtgtggacagagaagctgttccgggcaaagtgaccatgttgtctctgtactggagtattagtaagatcccggggtgagcggtatttggtcctcacttgttcctgaccaccccattcccgttcttcagtgcagcacatctgatctgggttgcatgagcccccactgtcctgtaagggtcacttgggaggttggcaacatggtcagaaccctgggtgtctgcttcagggaggtgtttccctgtctcttctcctgggtgtctgagtagccttacgagcagggtggctggacccttatgtgtcccccagggtgaaagccagaagtggccaggtcttcttcaggcgcaggcctggagtgaccatgatgacttcttccgtggctgctgtgagagaatcaggctcagcccaaggtgtgaagtcctatgctctggggccaccagtcagacagccccagcccgtggcatagaagcaagtggctgtagttagcaagagcccaggctgcttatagtatctggtgtaaactgtgtgtcggatgggaaatgtacagcaggtcttctagaagcttccgagccccgcacgtgtgctgcagcgcccacctgaggacctggtgtggtcgggttggtggtgtgtacgtgggagcccatccctgaagcaccgctggggtgggaaggcgatgcttcccgggccttggctgagtatgaagagcggcagtcctggctaggcctcctatcagttccagtcagccgtgtctgccctaaccaaacagcaggatttgctaatgttctgccgtaagtgccttctccagagatgtccctctgcccagtgttgatccttgagagcacgtttcagcgagagcttccagatgtgatgctcgtgaccaagcaaccgcacagtctccacttgattcttcttgcttccattcctgaaaggaagaattggacctgccctgcagctgccctgtctggggcctcctgctccctggcagcctgaggtagttggggagcacaggggccaccattttcttagagcatgtgcatcgatcctggccccttctccaactgaattcgattgcttcagagcacagcatggcctggtgggaatgtggagactgctgtcttctccgagagtttgtaatgagatcagttcagcattcacagccaggatcccagatcctactctctatagcacattgtcacaatgaactgtgttgggttggtggtaatgtctagactctggacttggagggcaaagtttctcaccagcacacagaggttagctgagctgctgatctctcaagctaacatttctacttgcagcttgagatcctggaacagagacctgcccttggccccctgtgttcggtacagcaagtgttttcctttggattccccccagaagccagccagctgtcattccaatagggcaacaggaatccctaggtgtcccagatctgtcagtgttatggaaggtggttgcagggtctcagctgtgtgctgtgcggtgcggtgtctgggaagatgaggtatgggaggtgtggatttgagacagcgagagtggaagttgcacaggtggctcatgagcaggtcagaggcacagggccagcatcgagcaggctgcatgtgacccgagtctcccctcactgctgagcctttaaatcagaagtataggatttttctatttggggagggggtggggtggggcattgtctagcacatggtattggtttctagaaagctatacttgagagtcgtaatgcttgtcacatgggtgtgcagccttcctgaggccccaggttgcctctgccattgcagctggtgcctttctaatggaagactggggttaggaagtggtgctgtcagcagctcagaggtgctcagtgttgtttctaggggttttggtgggagtccaagaatataagccttgtttctgggacaggactggggcagatgcgctcgggaaggaagcacaggcagaagtgtgggctcgttctacattgtcctagtttcagacgcctgtctcagggtctgtgctagcccactgctttgttgaaccctttccctttcttggaaggaagctcccgagtagagctcactgcatccccagtcactagcagctgttgctcttgtggggtgttgagggcacaggaagcagagagcagttcctgttggtgctgtagaacctggctgtgcatccaagtagttttcacaactcctcttcctaaacctcaatcatgggattaataatatacctgtttatttatgacctaattgtgactctgattaataaaagctggtgggaaaggcccatccaagaagccgatggccagactcacacttagctttcccacagcgtatgaagcatccatcaggcagagtattaaagaaatataatattttactgatagacctgtcctttaaaaggaacgtgtttttgggtgtcatcattttggtgtgaatcatgtaagggttggctgtttgctgtttaatacactttagtgtcaagagacgcactcagctgactttttgcccacgcatatcatgtagtctggatttttaagcgacattaacagaatagtttgtgtagagaaacctcaagtttccccagctgtgccatgagtgtatctgcatatactctgggtattgtcagaggcagtggatttgtgagctgtctggaactaaaaattagaataaaatcattttcttgtattacagtatttgtcatttggtctgttgtcgtgtgtggggaaggagtggtgggaagaagtgggacggtggctcagttggcccgtcatcccaggttctgtgtgggagccacagaactgcagcgagtggcctctaaggacaggcaggagctctgcccagaaggacttgggagggaataaagacccaaactgtgggagtgaccaggacacagggttggctgagcagtgttaaggtgtttatgccgagggacagcactgctcttgggaaccttggtgttcccaggacgagtcatgttcaaagcaagggttctgtcttcatcactgagcccgcccagcagtacagagaggcttcctgctgctgagccgtgcccgcccgctctaggcccccaccctccgacctcagcgtgttctggacaggaagaaatcacttcatgaccacccaagtaggtacttgtttgttctctgttggaggggaaggcattgggggtacttacactataacatgtcatgggccttagggtctagcccaggtgcatcatgaaaatgatgcaatctacccaggcatgtgactctccagaaaatacagattgccttttaaatgcaaggctgtgaaccatgccagacaggtgagcaataaccaaaaccacctgacatggtaccagttagccaggagaagcatgcccactcctcccgggccacacgtcagagggagttaatgggatgttactactgaaggtgcctgagggggctgagacctgatggggtgaggaagagcagccgggagacctcagaacgggcgactcctggcccctttgccttagttcacattctcctgagatcctgggctgtacatggtgggcagtgtgacatccttttagagccgctgtgaaagagcctactggtgttatgcccctccaagatgagcaggtgagagcagtgcttccccggtggagacacgctcagtacttgtccttgtctcattcagtcccaatggcaaaccagagtacaagttcatcagagttcactctgggcggccagtgaagtactgggcaccttacagagtgtggctgaggggtgactggcaatgtgggtggtcctggagtccacacccagcatgggtgatggctctggataactgcatagatggagccccaatcagttaccttcctcagccttttgtaccctagcagctgctgagaccttgaggccatctcaagttaagagctgccagtggaaggctagggagactgagggcgcttctcacgctttgcctctgagggaggttcaacaatccatacagaatccacatgtgagggacttgtaagcaggctgatccaatgaagatggcggctgttttgcttgaagggccaaattctacagcgaggaggccatggattaaactaggttgccattccacagagaagttcctggcccaagtgcctgctgtgtggtcccatctcacttctgcttggtgtccttggtcctggagcttacactgcagatgcccctcccctacctagtccagattccagaaactgcatttgctgtgatacacaccttgactaaagacagcttggaaaggaaagggtttatttggcagacagtatctatcatcaagggaaaaccaaggcaggaattccaggagcttgaaatagacaccgtaggaataccatttactgctgccttgctctctgttcgctctctggcttggcccaccccccacctttgcatccctagcctagggatggcaccacccacagtagactgggcccaactatagttcagtctgcccacagtccagaatgacagaggcaattccttagtcgaggttctctcctcccaattttgtcaaatcacagttaccacagcttttttttttccatgtcacgtgaggcccagctaaatatttaatatcccgagtaccattctgatcagaagtatgcatactgcggaggacggggggaaatgatgaatgagctcagggtgcagtgtgatgggggctgtggaacctaatgttctgtagcacgggaggatgattgtggctgacagcaattaatggtgtatttcagaatagctaattgcaaggatttgcgcactccctgatgtgaagaaatgatgataatgtttcctatgatggcaacgccgtttgtctcagtctgaccacagtgtctaccagactgaaatgtcactctgaccccaggaatatgtaaaagaatgtcatgtcttttaaatctaagaaaaccagcaaaccaaaggttgtaatcctgggaggtggaggcaggatgggagttcaaggtcttcctcaggcaaatcgaaagttacaaggggggctggagagatgggtcagtgattaagaggtcctgagttcaattctcagcaactacatggtggctcacaaccatctgtaatggggtctgatgccctcttctggtgtgtctaaagacaactacaatgtactcaagtatataaaataattcttccaaaaaaaaatatagttacaaggaagtaaccctatacttcaaagcctgtttgcagttcagggacaaatgctctaatgtttcctctccctgggtagaacatgttctattttgctttcaaacaatctcagaatgtggccctggctgtcctggaactcactttgtagaccaggctggccttggactcagagatccacctgcctctgcctccccagtgctgggattaaagatgactgccaccacaatagcagaaacagcagctttatactgaaattatgataattatactgaaaataatttggggttcaaatcctcttcaatttagcaaagattcagtcccgagacaggttagtgttcctgcctttgagaggcaccgtgcagctatgaagatgtgaatatagattctgtcacttggttgaagtgggaggttcctgggccagggaaaatgccctcagcagagactttgggcttaaaagaggtggtgcggaagagaggaagaagttcctggcggtcccttcctccctttccaactctagctgcgttgtcctaatccactgctatgtcaagagggctaagaggcaggggtacaggcatgtgctcagagggaccttctcctgtgacccacagagttcagcttcccagagcagagccaggcagaggatgatggtcttgggggaggctcactggaccctcccagctaaagaatggtcactctcttctggactgtggccaattcggtctcaggacccacttctgcccttgatcagttctatctgccctccctcctcttcttttccttgcctcctttcccttttcccttttcccttttcccttttcccttttcccttttccctttttttcccttttcccttttttcccttttccctttcccctttcccctttcccctttcccctttcccctttcccctttcccctttcccctttcccctttcccctttcccctttccccgttcccctttcccctttccccctttccccgttccccgttcccctttccccttttccccgttccccgttcccctttcccctttcttttccttttcttcccctaactttgggaccaggttctcatataacctaggctggtttcaaattcactaaacaacttgagggtgaatctaaactcctgatccttctgtctttattccccaagtggtggaattaccattaccggcacgtaataccactcctgactccaaacttccttttgtagctccgagggtggaacccggggccttggacaagtggcacaagcaatctgccatggagcaacagctctaagtgtgcagctttttgaagctgctaggacacccatttgtcctctggtactttgagaacaaatgtacaagcagatttgcctgtggaggtaaatgttcttgaaaatcatggccaatcctatgccagttcgtctggaggtgagggtctgaattcttattttacacagttaaaattaattaatgttttgagacaagccctcactatgtagaccaggctggtctccaactctgcctgtctctgcctcctgagtgtcatggggcccagcttattttatttttaaaaaatttattgcaggtggtggtggcggctcgcacctttaatcccaacactaaggaggcagaggtggggagatctctgtgagtttgaagccagcctggtctacagagctagttctaggactgccagggctacatggagaaatcctgtcttgaaaaacaaaatgaaaaaaatcattttaaaatttcatttatgtctgccgcatggctgcagtacctgtggaggccagaagagggctccaggatcccttgaagccagagttacaggtggttgagggccaccgtgtagttctgggaatcacatcccattgttgccaatgttctcaaactctgagccttattttatgttttacattatttatttgtgtatatgtgggtgggggtggggaacacatatgtgctatcacatgcatgtggaggtcagaggacagttggtgggactcagtcctctcctgccacatgaatcttggggaccaaactcagttcagcaggcttggtgacaagctcctttggctttggagccatctcgttggcgatcagatctgaagcctactcggtatccgggctcacagagcagacagggatccaaagacagtattgaaataaaaccaaataaaccaaccaaggcaggcaacctcgcagatgcctgggaagcagctttagatattcttagacaccacaccagcgtgtggaaccccaaagcacttgccagatccctgtaaccattggaagagatggcaacggaaagaggaagatgctggaattagtcttctcgggagctgcgaatgtctgagccttgacagatttctaggctcagaagaaagtcgcgtctgtcttcattcacagagcttccgctgttgctgtcggcatactgaagcaggtcccacatggcaccttaggtgccttctttcctgtgctggggcgtggcagcacccctacctctagcttctgctgcctgcacattgggagagcatggggtagaagttgcaacaaagatccttgattacgtgtttatgtttgtcccctgaagggtagaatgtgccctgcatttggtgacacgatgttcagggacatgggatgtcctggtgatgtcccctaccccaagtcatgggctgttgacctggtttacagttcaggtatggggtctggagagatggctcagcaattaagaacatttgctgctcttctgggggaccaggatttggctcccagcatgtctgtaacttcaggtccagggagtgcaatgccccccttttctggccttctttgacattgtgtctgcacagtatgcatacatagatgccggtggaacgcccaaacccataacttttaaaatctgctatagtatcaggcatgaaattgctctaatagaatggatctcttcccctcctcccctcccctcttcccccttctcccctccccttccatcctctcctcctccctttccctcccctgctcctcccctcccnnnnnnnnnnnnnnnnnnnnnnnnnnnnnnnnnnnnnnnnnnnnnnnnnnnnnnnnnnnnnnnnnnnnnnnnnnnnnnnnnnnnnnnnnnnnnnnnnnnnnnnnnnnnnnnnnnnnnnnnnnnnnnnnnnnnnnnnnnnnnnnnnnnnnnnnnnnnnnnnnnnnnnnnnnnnnnnnnnnnnnnnnnnnnnnnnnnnnnnnnnnnnnnnnnnnnnnnnnnnnnnnnnnnnnnnnnnnnnnnnnnnnnnnnnnnnnnnnnnnnnnnnnnnnnnnnnctcccctcctctcctcctccttttccctcccctgctcctccctttccctcccctcctcctctgcccctccttttccctttctaactgaaagctcccctttccccatcctctgcatctgcttcctcttcttcctccccctgaaaggacaacatgaaccccatttgtctccatttaaggaccagccctgactttgaaaagaaggctctgagacaccagctccaggaacagaccataaaaaccagaaacaaggtcataaaaccccctctcttagaacagcctgggcataaccacaaaatggggaaatatctcagaacgggccatgtcatcctctggttaaacgttcatgacctaggaatgcgaccactgaccacctgtgaccccccttagcacccaccagtgaaattttagattacctaatccttctgcagagtccccctggttccccataagaaggcctgcactcctcatttggagaatggttgacccctgcatgttggatgtttctgcatctctttgtctgcatactgagtctggggtcttcctttggcgattttggattcttacacccccttccttccttccttccttccttccttccttccttccttccttccttccttccttccttcctttcctcctcttcctcctcctcctttcttggtaagctctcattagatagctcaggccactcttaaacttgccattctcctgcctcagcctcttcagtgctgggatgacaggcttataccaccatgcccaaccctaattctttctagagacaaggaacccagaccctgagaggagagctaagtggctcactttctgccagaggcagctctatcaactggtttcattccccctccttgagcctggcagtttttaaagtgtgtgtgtgtgtgtgtgtgtgtgtgtgtgtgttgggtgtcaggagcttggtttttcagacagggtctctcatggg

SEQ ID NO: 266 - DNA, 2230 bp, Mus musculus
ggtaccccgcggagcctgagcgagcagcgggtccgtgcggagccggagacgggaggaacatgacatcgcggagatggtttcaccccaacatcactggtgtggaggcagagaatctcctgctgaccagaggagtcgatggcagttttttagcaaggcccagtaagagtaaccctggagacttcactctgtctgttagaagaaatggagctgttacccacatcaagattcagaacactggggactactatgacctctatggtggggagaagtttgccactttggctgaactggttcagtattacatggaacaccatgggcagctgaaagagaagaatggagatgttatcgagctcaagtacccgctgaactgtgcagaccctacctctgaaaggtggttccatggtcacttgtctggaaaagaagcagagaagctgctgacggagaagggcaagcatggcagcttcctcgttcgagagagccagagccaccccggagacttcgttctctccgtgcgcactggtgacgacaaaggggagagcaacgacggcaagtccaaagtgacccacgtcatgatccgctgtcaggagctgaaatacgacgttggtgggggagagcgctttgactctctgacagacctggtggagcattacaagaagaaccccatggtggagacgctgggcacagtcctgcagctcaagcagcccctcaacacaactcgtatcaatgctgctgaaattgaaagccgggttcgagagttaagcaagctggctgagaccacagataaagtcaagcagggcttttgggaagagtttgagacgctccagcaacaggaatgcaaacttctctatagccgaaaagaaggacagagacaagaaaataaaaacaaaaacagatacaaaaacatcctgccctttgatcataccagggtcgttctgcatgatggggatcccaatgagcctgtttctgattacattaatgcaaacatcatcatgcctgagtttgagaccaagtgcaacaattccaaacccaaaaagagttacattgccactcaaggctgcctgcagaacacggtgaatgacttctggcggatggtgttccaggagaactctcgagtcattgtcatgaccacaaaggaagtggagagagggaagagcaaatgtgtcaagtactggcctgatgagtatgcgctcaaagaatacggggtcatgcgtgttaggaacgtcaaagaaagtgccgcccatgactacactttacgagagctcaaactctctaaggtcggacaagctctactccagggaaacacagagagaaccgtctggcagtaccactttcggacctggccagaccatggcgtgcctagtgaccctggaggtgtgctggacttcctggaggaggtccaccacaagcaggagagcatcgtggatgcaggccctgtcgtggttcactgcagcgctgggattggccggacaggaaccttcattgtgattgacatccttattgacatcattcgagagaaaggtgtggactgtgacatcgacgttcctaaaaccattcagatggtgcggtcccagaggtcggggatggtccagacagaagcacagtaccggtttatctacatggctgtccagcactacatagagacgctgcagcgccggatcgaggaggagcagaaaagcaaaagaaaaggacatgaatataccaatattaagtattccttggtggaccagacaagtggtgatcagagtcccctgccaccctgcaccccaacgccaccctgtgcagaaatgagggaggacagcgcccgagtctatgagaacgtgggcctcatgcagcagcagaggagtttcagatgagcccacggcgacagaacgcagatgtgaactttcacccctttcctaaaatgtcaagactagacgagcgttcccaggacccgtgcgtgcgttcagaagccggcactggctggactgcctcttgagaagcgaagtttggaaccatttgaacagcacgtgcctaattggcacctcctttcctcagctaaggagagactgctctgcgttcttgacaatgctattttcatagaattggttttgaattgtggaagcagctaaattgtgctctgtattttctacattatgggactcaaattctagttatgggcaggattttgtttctttttatgaccttaacagatctgattttttttttctttctctctctttggggaatcatg

SEQ ID NO: 267 - protein, 612 aa, Mus musculus
YPAEPERAAGPCGAGDGRNMTSRRWFHPNITGVEAENLLLTRGVDGSFLARPSKSNPGDFTLSVRRNGAVTHIKIQNTGDYYDLYGGEKFATLAELVQYYMEHHGQLKEKNGDVIELKYPLNCADPTSWFHGHLSGKEAEKLLTEKGKHGSFLVRESQSHPGDFVLSVRTGDDKGESNDGKSKVTHVMIRCQELKYDVGGGERFDSLTDLVEHYKKNPMVETLGTVLQLKQPLNTTRINAAEIESRVRELSKLAETTDKVKQGFWEEFETLQQQECKLKRKEGQRQENKNKNRYKNILPFDHTRVVLHDGDPNEPVSDYINANIIMPEFETKCNNSKPKKSYIATQGCLQNTVNDFWRMVFQENSRVIVMTTKEVERGKSKCVKYWPDEYALKEYGVMRVRNVKESAAHDYTLRELKLSKVGQALLQGNTERTVWQYHFRTWPDHGVPSDPGGVLDFLEEVHHKQESIVDAGPVVVHCSAGIGRTGTFIVIDILIDIIREKGVDCDIDVPKTIQMVRSQRSGMVQTEAQYRFIYMAVQHYIETLQRRIEEEQKSKRKGHEYTNIKYSLVDQTSGDQSPLPPCTPTPPCAEMREDSARVYENVGLMQQQRSFR

SEQ ID NO: 268 - DNA, 107745 bp, Homo sapiens
  misc_feature (1)...(107745): n = A,T,C or G
ttttttgccaaatactgagcggtcagaagtccgtacaaccattattttttattactgttttgcgaattagaaaacttagatgcagaatgtgtccacaggttagaagcaccaagaccagaacttgaaatcccttactttcagtacctttcgtcttaacccttaagaccagtgtctcttttcaagaaactcgatttaggaattgcggacacaaacggaatcagcccaaattgagccagagaaaaagatcgcaaagaccaagaggcgacttccggtcggggacgctgggagacgcgaaaccttttggcttcagtgcggaaccccaacgtggctgcgacaggctcagtgtcatcctctggaacccaggaccaggaacacagtgcacgcgccgtctccccgcttcctctaacacccaccagtctgctacgggtccccgaaagggcctcgttcccccagcccaagagagtggcgaagaaccggagggagccactacggcattctacctcaccctctttgtgccctgccgcaaacccaaacaacaaaaatgaagcgtctggaaggcctctcagttagccttggacatgtccgacccctgtaggtgtcgactggatgccctccaggttcggatggcgaaggattgggagtcctgaactcaagtcttgcagacaggcccgcgattcttaccttgcaagatgggaaagagaattaaggtcccggcttccggtctataagcaatcatgggaagtgcgagtctcacttccttccggatctggggcatcatggggaatgtagtatttccccgttaagaaaaaagtagtaaatcctaggccgggtgcggtggctcacgcctgtaatcccagccctttgggaggccgaggcaggaggatcctctgaggttggcagttcgagaccagcctggccaacatggtgaaatcccgtctctactaaaaatacaaaaggtagccgggcgtgggtggtgcgtgtctgtaatgacagccagtcgaggcgcggaggcaggagaatcacttgaatctggaggtggagattgcagtgagccaagatcgcgacactgcgctctaggcaacagagcaagattctcaaaaaagaaaaaaaaaaaaaaaagggccggacacggtggctcacgcctgtaatcccagcactccaaagatcgtgccactgcgtgccaccgcactccagcctgggaaatagagccagactcagtctcaaaacaataacaacaacaaaaaaaagaaaaaaagaaaaaaaattagccgagtgtggttgttagtgcctgtagtcccagctattcgggaggctaaggcgggaggatcacttgagtcttggaggtctgggctgcagtgcagtgaactctaatcttgtcacttgagattaggtcagtggtcccctcttcccttaccttggatttagcggctgactacttcctcttgtacatggcctttctcattcccgtcctccggcctggcctacagaatgagactctgtcttaaaaaaagtaaaaaaaaattaaagtgaggataacaatagtaacttacttcataaggatgttgggaacattaaataatatatacaacagtactgagaagcatatttgattatttgatggatggtaaatgctacataagtgttagctctttttttttttttttttttttttttttttttttttttgagatggagtctcgctctgtcacccaggctggagtgtggtggcacgatcttggctcacggcaacctctgcctcctgggttcaagtgattctcctgcctcagcctcccaagtagcagggattacaggcgcacaccaccatgcccagctaattttttgtatttttagtagagacagagtttcaccatgatggccaagctggttttgaactcctgacctcaagtaatccacccgcctcagcctcccaaagtgctaggattacaggcgtgagccaccgcacctggcgaactgttagctcttgttattgtcaccatcaccactacaatcatctgatcatcaacatcctagttgttgtcaagtattctgctaaagtttatgcatgggagataataggcaatattgcatacaatgtgccttgctttatttcatttaattctcccaacaacctgtgaatgatactattatgaggaaactgagtctcaaggacattaagtaacttgctcacagcatagatctgattccaaagattgcactcttaaccattaggctgcaagattaaagagatgattaatgaagatgcatgagagttttgctcatgttagaattaaaaataagaatatttattatcttttacaaaatacacaacacagtatatgtgatagttctttactgcttcaaagcccttaagccaacatgtacacatttgtaataccttctagcttgcgttttccattttcctccattcgtttctttctggttgctagagcttttcaccttgattttttcagatcgaaaccacctgcttcatggctgtgtctctgggaatcatttagcctttttctggttctgattcactgaggatacaaatacaatgatcagatgaacactgcccttttttttgagaatgggaatgtcagcagctttatttgtttagcttcctcagcaaagcacctcttagaaacttcaactgcagaaaatgtaccacaatgaatgaatgagatgcacagttgcttacgtgggcccctcaaaattgctggcaatctcagataatttcacctagtgaacgccccaaaatatgtgttgaatgacctgtcattaaaataaaaacgtagatgaaccccctcttgtgttttgttgcggtattgcaaaatttacaattcattagttgggcaaaataccatgttagttataaagtaaatgtttttattaagtttagttttgccatatataaaattctctgaaatttgtgcagcactttaatcacaaagcagacatttttgcagacacttaatcttttttttttttttctgagatggagtcttgctctgtcgcccaggctggagtgcagtgccgtgatcttggctcactgcaacctctgcctcctgggttcaagccattctcctgcctcagcctcttgagtagctgggattacaggtgcccgctaccacacctggctaatttttttttttgaaacagagtcttgctcttttgcccaggctggagcgcggtggcatgatctcggctcactgcaaccttcgcctcccgggttcacgccattctcctgcctcagcctcccgagtagctgggactacaggcgcccgccaccatgcctgactaattttttgtatttttagtagaggtggggtttcactgtgttagccaggatggtctcgatctcctgacctcgtgatctgcccgcctcgacctcccaaagtgctgggattacaggcctgagccaccttgcccggccaattttttgtgtttttattggagacaggatttcaccatgttggccaggctggttttgaactcctgacctcaggtgatctgctcacctcggcctcccaaagtgctgggattacaggcgtgagccacctcgcccagcctaatttttttttttttttggagacagagtctcgctctgtcgcccaggctggaatgcaaggtgagatcatggctcactgcagccttgacctcctgggttcaagcaatcctcccacctcagccccctgagtagctgggagtacagtgcacaccaccatacctggctaatttttttacattttttgtagagacagggtctcacaatgttgcctcagctgtattttttgtttgtttgttaggcagtaaatcttttaaagcctggccaacatggtgaaaccccatctctgctaaaaatacaaaaattagccaggcatggtggtgcatgcctgtaattccagctacttgggaggctgaggcacgagaatcacttgaacccgggaggcagaggttgcagtgagccgagattgtgccactgcactccagcctgggccacacagtgagactctgtctcaaataaataaataaataaataaataaataaataaataaatagaaaaatatctttatatgtgttatgtatgtgtgtgagcctgtgtatgggatgagtttgtgtgtttgtatatgtataaagtgtggaaagacatacaccaaaccattaacactgctggggattgggatatggagtacgtatgcatcaaggaacagagaaaattactgtttgttatttagtttgttgcaaggaacttgtattgcttttgtaattgagaaagaaattcaaataaagtaatggctattatctgaattaatctctaaatgaatatatctttttaaaattaagatggagttggccgggtgcggtggctcacgcctgtaatcccagcactttgggaagccaaggcaggtggatcacgaagtcaggagatcgagaccatcctggctaacacggcgaaaccccgtctctactaaaaaatacaaaaaaattagccgggcatggtggcgggtgcctgtagtcccagctactcgggaggctgaggcaggagaatggtgtgaacccggaaggcagagtttgcagtgagccgagattgtgccactgcactccagcctgggcgacagagtgaagactccatcttaaaaagtaaataaataataataataaaataattcagattgaggtttttttgttttgttttgttttgttttgtttttgctatgttgcccaggctgccagtctggtctcaaactcctgtctcaagagatcctcctgttagctaccatgcccggccatataaatgaatatgccaggcactactccaggcatataaagatgggaagaccggccggacatggtagctcatgcctgtaatcctagcactttgggaggcggaggcaggatgattgtttgagcccaggggttttagaccaatctgggtaacatggcaaaaccctgtctgtattaaaaaaaaaaaaaaaggaagacaatgactttgtcttaaaaggagatcataatctaaagaaagacacagaacaacaatgacagaacccacaatgatgttgaaatgtgttaggtgctgatagaagcatgaagaggcagccccaggagcataggaaaggagtctctcttttattctcaaaaagtgaaagaatgttttctggaggagctgcttaagttggagtttaaccttgcatgactgttttccaggtggagaagggtttgaagagtattccaggcagtaggaactaaattttggaagacagggatgcaagaaacagctagaagcctttagaaactgctagattatgtgagggtgttggcacaggccatatctagaacggactgatgtgctaagggaaggagttcaacttaatgctagagggtttgaacctccttcatacaacaggggaggggagtgacgtgattagatttgtatttttaaaagattattcattctagctgcagagtgtgcagaatataggaaacactaggaaggtagtagttcctgcactcaaagagctaatagtttactttggaaaagagacaaatgatagccagcttttatcaagtgctgactttgccagacactgttctgagtatttcacaaacctatcctatggtaggattttgattcctactttgcagagaaggaaacagacacagaggagtcaaatgacttgcttatagacacccaggcagctagatcaagaacttaattggcagccaggcgccgtggctcacgcctgtaattccagcactttgggaggccgagtcgggtggatcacgaggtcaggagatcaagaccatcctggctaatgcggtgaaaccctgtctctactaaaaaaatacaaaaaattagccgggcgtggtggcaggtacctgtagtcccagctacttgggaggctgaggcaagagaatggcgtgaacccaggaggcggtgcttgcagtgagtcgagatcacgccactgcactccagcctgggagacagagtgagactgtctaaaaaaaaaaacaaaacaaaaaaaacccacaaaacttaattggatgcttcctatatgatacggctcttagatttatagtgtagcatgttaggttctaaggataggtgtcttggtgaccatctgacctgcactagagaatcgggtgaggcttgtattccagaggaagtggctcctagcctgagatcagaggcatagagttgatgtggaggacagtcaggaagaaccctctggggaaagaaagcagattgttaaaaggctctacgctgggaaagaatatggcatattgaggggagctgaaagtcattcagcatggctgggtcatagagaatgaagcgagtagtggggagacggggtggtgaagtgattggggaccagagttaaaaaaactctggtgcattggctcacgcctgtaaatccaaggccttgggaggtcaaagtgggaggactgcttgaggccaggagttcaaggccagcctgggcaacatagcaagaccttgggtctaaaaaaatttttttaaacttttttttgggccgggcatggtggctcacgcctgtaatcccagcactttgggaggctgaggtgggtggatcacttgaggtcaggagttggagaccagcctggccaacatggcgaaaccctgtctctactaaagatacaaaaaaaattagctgggcatggttgtgcgtgcctgtaatcccagctacttgggaggctcaggcaggagaattgcttgaatctgggaggtggagtttgcagtgagccgggattgcgccactgcactccagcctgggtaacagaatgagactccaactcaaacaaaacaaaaaacttttttttttttgtagggacaggggtcttactctgttgcccaggctgttcttgaactctttgggctcaagaaatcctcccacctaggagtcccaaaacactgggattacagaggtgagccaccacatccagggggataaaccttttttttttttttttggacttcattctaaaatcaaggagaagccattggtgaattcaatgtagggagtgactagttttgcagttttttttttttttttttttgagatggagtctcgctccgacgcccaggtgggagtgcagtggcgcaatcttggctcactgcaagcaccacttcctgggttcaagcaattctcttgcctcagcctcctgagtagctgggactacaggtgcctgccactgcacccagctaaattttgtattttttttttttttttttttttttgagacagagtctcgctctgttgcccaggctggagtgcagtggtgtgatcttggctcactgcaagctccacctcctgggttcacgccattctcctgcctcagcctcccgagcagctgggactacaggtgcccaccaccacgcccagctaatcttttgtatttttagtagagatggggtttcactgtgttagccaggatggtctcgatctcctgacctcgtgatccgcccgcctcagcctcccaaagtgctgggattacaggcgtgagccaccgcgcccagccctaaattttgtatttttagtagagattgtgtttgaccatgttggccaggctggtctcaaactcctgacctcaggtgatccacccaccttggcctcccaaagtgctgggattacaggtgtaagccaccgcacttggccacagttaattgtatttttagtagagacgagggttcaccatgttggccagactggcctcaaactcctgacctcaggtgatccacctgccttggcctcccaaagtgctgggattacaggcatgagctaccgcgccccgagtgacccgcctagttttgtagtttagattactctggctactatgtggagattggattaggaagtttaggcctgcaggcctgagatcagttaaaatgtagcttgtcatctagctggccaggatttagggagagggacaactgcttgttaaatggctcttatgtgaattaaattggcatatattaaaggtgatctttgtaaggagcacatgatgctgaagcagttagcacacagtatgagactcacttgtatatgaatgaaatgggcaagcattaaaaaaatgaggattttggagctatacagatatgggttaaacttatggctctgccattcactagatctgtagcctttatttatttatttttgagaaagagtctcaccctgtcacccaggctggagcgcagtggtgcagtctgggctcactgcaacctctgcctgtccggttcaagcaattctcccacctcagcctccggagtagctgggactacaggtgtgcgccaccaagcccgactaatctttgtatttttagttgagacggggtctcaccatgttggccaggctggtcttgaactcctgacctcaagtgatctgctctccttggcctcccaaagtgctgggattacaggcgtgagccaccacgctcagctagatctgtagccttcaatgagtcatatgcgcatcaatcaagtaaaagctctactcttctcaatctggtctgagctaccattattcccagaccagaatactatagtattccgtattttgactggcttctctgtttctggccttgctctcttgctcgagcttcacagagtgtccaaagtaatacttccgtaccacccggcccggcttttttttttttttttttttttttttttaagagacatggtcgcaccatgttgcccaggctggtcttgaactcctaggctcaagcaatcctcctgcctcagcctcccaaagttctgggatgaaggcgtgagccaccatacctggcctgagtgcagtggcgcgatctcggctttcagcagcctcgaccttccaggctcaagcaatcctctcacctcagcctcccgagtagctgggactacaggcgcgcgccaccacgcccggctaatttttgtattttttgtagagatgggatttcactattttgcccgggctggttcccaactcctggactcaagcgattcgcccgcctcagcctcccaaagggaagtgctgggatttcaggcgtgtgccaccgctcccaccccaaagtagtatttattgtaattattattattattttgagacggagtctcgctctattgccaggctggagtgcagtggcgcgatctcggctcaatgcaacctctgcctcccgggttcaagcgattctcctgcttcagactcccaagcagctgggactacaggcgccccccaccacgccaggctaattcttgaatttttagtggagacggggtttcaccatgttggccaggatggtctcgatctcttgacctcgtgatccgcccacctcggcctcccaaagtgctgggattacaggcgtgagccaccgcgcccagcctattattatttttttaggcagtgtcttgccctgtcgctcagggtgtagtgcagtggcgtgatcacgactcactgcagccccgacttctcgggcttaagttatcttcccgccgcagcctccacgcccggttagttttttgcattttttgtagagatgaggtcttgcttttttgcccaggctggcctcgaactccttggcttaagcgaacctcttgccgcagcctcccaaagtgttgggattacgggcgtgaaccaccgcgcccagcctactatctttatcttacagaaagaaaagaatggaggaaaccgaggctcggagacagtaggtaatttccccaaggttccacagctaatgagtggagcggcgatttgtggaacgaaatgaatgaaatcgatgtggcagcgggcccggacgggtcggtggcgtagacgcggagcgcgcagctcacacctggcggccgcggtttccaggaggaagcaaggatgctttggacactgtgcgtggcgcctccgcggagcccccgcgctgccattcccggccgtcgctcggtcctccgctgacgggaagcaggaagtggcggcgggcgtcgcgagcggtgacatcacgggggcgacggcggcgaagggcgggggcggaggaggagcgagccgggccggggggcagctgcacagtctccgggatccccaggcctggaggggggtctgtgcgcggccggctggctctgccccgcgtccggtcccgagcgggcctccctcgggccagcccgatgtgaccgagcccagcggagcctgagcaaggagcgggtccgtcgcggagccggagggcgggaggaacatgacatcgcggaggtgaggagccccgaggggcccggcgcgggcctcggcccggccaccgccgcgttcggttagccccgtccggaagggggcgccccggccgggcttcgggctcccgccccgggtcggggttgggggccggttccctcctcgtcccctcgccctccaggggccgggggccggccccaccgcgcccccacccctcgggtccccattcatttcctgcctccccgagttccggctgcggcagccccggggatgcccgtcaggcccggggcaggtagagccgccgagggaaccacgggtgccagcggccaggctcagcgccgcattcctgacccattgcctcatgagaattgcctcatggtgattccgaaataaccctgctcacttggggaggctccttgggacacgagaggggagttgcgcggggccgggcccccagtggtctagtcgttctggctcactgtgccactttcgtgcatttggggacttcacgcaggacccctgacccttttatatgcctctttgtgtcttcttttcctcctacccctcacgtgccagaaatggaaaaactgactgtatctgcagccactagaagtatttccttcctctgcgatcttcgctttgggagatggaaaggaagggagccgcatctcgttatttaatccttcactgcaaccttaacagtcaggtcactttactggtacccgttttatggatgaggaaaccgaggcccagaagcaacatgctagtaaatgacaagatttgaaacttaggaggattagtgagttaatgagatcctttgaaaggtcagggtaatactactactaatagctaacatttgcttagttctgaccacagccctatcagatggctactattatccccattgtaaagatgagtaaaccgagtttcagaggttaagtaaattgcctaacctcacagctagtaggtggtggagacagaatccctacttttaatcactatgttgcttctattattttgtaactattgctaaccatttgtaagccttaattttgttgtcaaacagtagtgtgacctgttgttttcagatagtgatcctgctattttgtatagtcactctatataccactcacacttaagacccattgtctattcttttccatgattgttcaattatggtcactgtctcagacatttaaaaaacgattcaagctattgaggctatttgaatgagattttcttttctttttttctttttttttttggagacggaggctcactctgttgcccaggctggagtgcagtggcgcaatctcggctcaccacaatctccgcctcctaggttcaagcgattctcctgcctcagcctcccaagtaactaggactacaggcgcaccactatgcccggctaatttttgtatttttagtagagacagggtttcactatgttggccaggctggtctcaaactcctgacctcgtgatccgcccgccttggcctcccaaagtgctggaattacaggcgtgagccaccgtacccagcctgaatgagatttttcaaaatattaggaatgtctcctccaaacacacctggcatgttattcatacatggatctggaatttaaaaaggggagaaaaagaaaactgagaactcgtaggaagtgagtgacttggacaggtcggttggcaagtgcttacagatctgggtaatatataactgcatttcaacagaacagtgtatagcctcaaatgttctaattctttagggagcttttaaataaacagttgtctattctttaatctgtcaaatagtcattgagccttttgttcctggtgtctgctcttccagacaagtaaggatctgctgctttaggagacatcagacggggctgggggttgggaaaaggtctgggtagtaatagaccctacattgtccagtttgttcatttagaagcatagaagtgtgggcatagtcaaagtagcaagtggtaaagatgacagtttgaaatggagtaattccttctcccctccagccctggtattatgcaccacccaaaaagccgggttatgaacataatacacataattttgaatgattcattattttttggattataagcctgttttatttgttaaccagccttaatgaggtataaatgacatgcaattaattgcatatatttaaatgtacaatttgatcagttttgacatacatatacacttgggaaaccaccaccatagtcaagataatgaacacatctatcacccctggtaattttgccttatgttctttataatccttcctttgttcttaggcagccactattctgctttctgtcactatgtattagtttgcatttcctagaattttatttttaaaaattttaaaattgtttgaatagagatggggtctcactgtgttgcccagggcagtctcaaactcctgggttcaagtgatcctctcaccttggcctcctgaagtgttgggattataggcatgagacaccctgcccagccctagaattttattattattgttattattgtgtttttttgagatagggtctcactttgttgcccaggctggagtgcagtggtgcaatcactgcagccttgttttcctaggctcaatccatcccccctcctcagctttccggttactggggctacaggtgtgcaccaccacacccggctaatttttgtatttttttatagagacagggttttgccatgttggccaggctggtctcaaactcccgggctcaagcgatcttcctgcctcggcctcccaaagtgctgggattacaggcatgagctattgcgtcccgccttcaaattactttaacctagtattaattcattcaacaggaagttaatgagccaggcaggataaagcagtaagataggaaaatattgctattttcatggctgagagagagcagacaaacacatgactaaatagggcaatttcaggtagtaataaattctaggagggaaaaaatcccacagaaatgtgaggatgggagaatgcagttagttttgataggtggtttagagaaggtgatcgtgtgagctgacacctgaatgacaattagtagtctgaattttgttttgcttaattatcaaaataactcctcttgggttcggcttttatatgcatccagtaattaaaatgtaagtatattcaatgtactgatatctctcagcatcataggtaggaaaactaaggcattcagcaattaagtgactcctcccttgatcatgtagcagtgatagtactggatttagattttgaggttgcttctctgcccttttctgcctttgtgaaaccaacaaagctgcctgtattttccaactcttccttcagcatgtggtacctcctttacatctgtttttgttgctctgaaatccatacgcgacgatgagctgagaggggcagaaaattgagcttgttctgagactggaggcttttggtttatctcttgcaggtcaagtacattttgtcctgggctctccctggtggccacgtttgtttatctcctgcgggagtaaataaacttgccttgctgaaaaataacagttctgtgtctttgcagtggaaactgggatgtctttattaacgttaggtcctgatgtaaggccaagtttttggttagagttgctcaagtgcagaggccactgctaagatgacttacccctcgtgtccatggtcaatgtggagactgttatgagtggcacatgatgctggaaaagcagagccaactcatgtttgtaattgtcctagcaggccgtggtgtactttgttaggcagccacagaacaatagagaaactcagcttattccccttccctctgggaaacacagacagtacttgccatccaacgccaatgtttttaaggaagaaagaggcaaaaagtgatgttggcaaggtctctgggagttgtggaccccaaccaaggattggagaccctgaaatggattcagatgccctaaaatgcagcccagttcattactatgaattttggaggactttgtgccttgagcaaatgtgtatatgtgacgctctttgacaacactgaaataggaaaaatactatccatgttcgcgaggagcactgaatttagagagggagacagacttttatgccagcatcaaatgaatttgataaagctagtaccaaaatgaaatttgaaattttttttttttgaaatagagtcttactcagtcacccaggctggagtgcagtgatacaatattggctcactgcaacctccacctcttgggttcaaacaattcttgtgcctcagtctcctgagtagctgggattacaggtgcgtgccaccatgtctggctaatttttatatttttagtagggatggggtttcaccatgttggccaggccggtcttgaactcctggcctcaagtgatctgcccaccttggccttccaaagtgctgggattataggcatgagctaccacacaagcctgaaatttgaaatgtattggtatagaatatactgtttagaatgtatgtgtatatatgtatatttgtatactcatataaacacaaatacacattgtatgtgtttctgtaatatgtatatctgtctacacatacatgtatatacacacatacaatgtcttttttttttttttttttttttgagacagggtcttaccctgttgcccaggctggagactgcagtggcataatcttggctcactgcagcctcgacctcctgggctcaagtgatcctcccatctcagcctcctgagtagctgggactgactacaggcacgtggcatcaaacttgtccaatttttctatttttttgtagagttagggtcttgctctgttgcccaggctggtctcaaattcctgggctcaagctgtctgcctgcctcggccttccaaagtactaggattacagatgtgaaccactgtacctggcctttacaatgtctattttaaagataatggttcaagtttttatcatcccactggcctactctaatgaaacatctatccattcattgaagaattatttatggtgggataactctgtgccaggtaccgtgctaggcattgagtattccaggttttaggaaacagcacatgcaaaagtgctgaagtgggagaagatctcggagtgattgaaggctaggagagagcaagtgtgggagctgtgaggctgggaaggtgggaggtaggtgggagcagaccacatagggattcttaatgtctttagtgtcatgtggaccatggagaggagtgtagattgtatttttagagcaatgcaaaatcatagaaggatgtgatcgggggagtggcatgagctgatctatttaaaaatatttctctggctgctgtgaaggaaggattgtaggaggcaggagtagattcagggagatgagacaagtgatgagagaggctttgaacttgggtaaaagtagtttgtggaaagtcttttttggaggtagtttttgtttattgccttgtcatcaaagcagagatgctgaccaatgaaactccatgagaaaatagtgatttataaagacatatctatgcactgccattaaaaagctgcttggaaaaaaaggataaaaagctgctttaacaacttttttttttgagatggggtcttactctgtcacccaggctcacgacctcagctcactgcaacctctgcctcccaggctcaagcattctcccacctcagcctcccgagtggctgggactgcaggcacacgccaccatgtcaggctaattgtgtgtgtgtgtgtgtgtgtgtatgtgtgtgtgtgtgtgtgtgtgtgtgtgctgggactgcaggcacacaccaccatgtcaggctaattgtgtgtgtgtgtgtgtgtgtgtgtgtgtgtgtgtgtgtgtgtgtgtgtgtatgtagagatggggttttgccatgttgcccaggctggtctcaaaatgttgcccaggctggtctcaaactcctgagctcaggtgatccacccgcctcggcctccaaagtgctggagattacagacgtgagccactgtgcccacctaacaactttaaaaaaattttgacatttagtaggatatttattgcattattgttgagatggcaaaatattggagacaactgaaatgttcatcagtggggggggctagttaaatgaaatacagtgtagcatgcattagaacacttttcaagaatttaactttttttgtagccttttacttataatgcttgtccctattgatgccttttttttcagcatgacttactcttttactataggatattaaaatttaattagattagaaatgaggaatattcttgtaatctgtagaaagtaacaaactataaacttattccccaagaacaaatataataatttttctggagtagcaggtaagaaagatataaatttatatgtatacaagaaactgaaattagactttatacatttaaaggttacaagtgcagttttattacatgaatgtattatccagcattgaagtctgggcttttagtgtaaccagcacctgaataacatacattgtacccattaagtaatttctcatccctcaaacccctcccaccctgaaattagactttggatccctagtttaaattccacccctctctttttttgagacaaggtctcactctgtcacccaggctggagggcaatgttgcaatgatagcttactgtagcctcaacctcctgggctcaagggatacaccctcctcagcctcctgagtagctggaactgcaggcgtgcaccaccacattcagctaattttttgatttttttatagagatgaggtcggaactcctgggctcaagcgattctccccaagtgctggggttacacacatgggccactgcccccagcctaaacctcctttctcagtatagcagccttgagatgaagttcctgaaattactggccagcttgactgtttccccacatcactggaggagggggatgcatagataaaacaaaatattcagcatcattgtattttctttttgtttcatcagcatctttttttaaaactcacttgacataagtccctagcctcaaagagtaaagcctttgcagaatctgcattcagatttcgggtgtgatttcctgacagatagttcaggtttgtaaactcttttttttttctttgagacagagtttcactcttgtagcgcaggctggagtgcagtggcaccatcttgcctcactgcaacttctgcccccttgattcacgcgattctcctgcctcagcctcctgagtagctgggattacaggcatgcgccaccacacctgggtaatttttgtatttttagtagagatggggtttcaccatgttggccaggctggttttgaactcctgacttcaggtgatctacctgcctcagcctcccaaagtgatgggattacaggtgtgagccaccgcagccggccaaaactttgttttttttcctctttttgttgctgagaaatgtaaactcttacagacacaaattatgtctcccattttttaaaacccactcaacacaggggtcatgtgtaataggccctggagcttattttagacattgatttgaggctcttttccccaagtgctggtttgtgtgtgtgtgtatgtgtgtgtaagtctttctatgagatgagtggtacctacctgggctgtgtgatcttttttattttatttattttatttttgtagatacgaggtctcactatgttgctcaggctggtcttgaactctggggctcaacctatcctccctccttggcctcctagagtgctgagattacaggtgtgagccactgcacctggccagcgatccttaataaatatagataatggccgggcgtggtggctcacacctataataccagtactttgaggggccgaggctggcaggtcacctgagctgaggagtttgagaccagcctgggtaacgtgggtgaaaccctgtctctacagaaaatagaaaaattagccaggtgtggtggtgcatgcctgtagtcacagctacttgggaggttgagacaggagaattgcttgaacctggaaggtggaggttgcagtgagccgagatcgtgtctttgaactccagcctgggtgacagagtgagaccttgtctcaaaaaaaaatatagatataggctgggcgtggtggctcacacctgtaatcccagcactttgggaggccgaggcgggtggatcaggaggtcaggagatcgagaccatcctagctaacatggtgaaaccctgtctctactaaaaatacaaacaattagccaggcctggtggtgggtgcctgtagtcccagctactcgggaggctgaggcaggagaatggcgtgaacccgggaggtggaggttgcagtgagccgagactgtgccactgccctccagcctgggcgacagagcgagactctgtctcaaaaaaaaaaaatctatatatctatatatctatatctatatagatatagatatagataatgccagatgatggctggttagaagggattgtcaggggctggcaggttttgcaggtgttagaatgagcaagatgaggagaaggatgcttacttccctctccttgtaactctctaccccctcccctcagtgtttttttatttttatttttatttatttattttttttgagacaaggtcttgctctgtcacccacactggattgcagtgatgcaatcatagctcattgaagcccaaactcctgggctcaagtgatcctcttgcctcagcctcccaagtaactgggaccacaggtgcgtacaactatgcccagttaagtttttcattttttatacagacggggtcttgctatgctgtccaggctggacttgcacttctggcttcaagtgattctcttgcctcagtttcccaaagtgctggcattatgggcataagccactgtgcctagcccatcagtgtctttttatcctttactcctatcaaaattcattcactcagcagccattgatcaagtgcctactatatacatgttgaggactggaaatttatttgtctcttctcatcttatctggaccctctgtgttaattgtaattaactgtaatcattctgtattaattgtaataaacttgttgataaactcaaatgaggccataccgttttgccacttcccctccttccaggttatatggatgtacttacattgcaggtttcatttgttggttcagtttttaaactaagccctattgtgtcaaattatgctaggtgtgagatggggagttcaagctgtgtgttgtctttttttttttttttttttttgcctcacttactaatatacaagcgcttataacctttgaggctggccctatacattaagatttttattaattccactgttctttatcttctcttactaagttctcagggtcgaatgaactctaactgctccttgctagtgataagcaagttgcaaattacagaattgtcagtgattgaatacacgtattaaacctgtaactgggaagcatttttggtaattatgaatacttttggaaaaaaaaaagctatggaaggaaagtttaaaatctacgaaagctcaagtagatggtcatggaatagctatttcaatttctaactatatattacttatttatttatttatttttgagacggagtttagctcttgttgcccaggctggagtgtaatggcgtgatctcagctcactgcaacctccacctcccgggttcaagctattctcctgcctcagcctcccgagtagctgggattatagacatgtgccaccacgccaggctaattttgtatttttagtagagacggggtttctccacattggtcaggctggtctcgaactcccaacctcagctgatccgcctgcctcggcctcccaaagtgctgggattacaggcgtgagccaccgcgtccggcctcttaactattgtttgaaataatgtagagacagctccagagccatgaagaagtgtatgaagaagcagtgttagcttaaatgacatacatgtcacaattgcctatgtgaaactatcataattatgcatgagaagtatctatcctgcataacctccaccaataataataannnnnnnnnnnnnnnnnnnnnnnnnnnnnnnnnnnnnnnnnnnnnnnnnnnnnnnnnnnnnnnnnnnnnnnnnnnnnnnnnnnnnnnnnnnnnnnnnnnnnnnnnnnnnnnnnnnnnnnnnnnnnnnnnnnnnnnnnnnnnnnnnnnnnnnnnnnnnnnnnnnnnnnnnnnnnnnnnnnnnnnnnnnnnnnnnnnnnnnnnnnnnnnnnnnnnnnnnnnnnnnnnnnnnnnnnnnnnnnnnnnnnnnnnnnnnnnnnnnnnnnnnnnnnnnnnnnnnnnnnnnnnnnnnnnnnnnnnnnnnnnnnnnnnnnnnnnnnnnnnnnnnnnnnnnnnnnnnnnnnnnnnnnnnnnnnnnnnnnnnnnnnnnnnnnnnnnnnnnnnnnnnnnnnnnnnnnnnnnnnnnnnnnnnnnnnnnnnnnnnnnnnnnnnnnnnnnnnnnnnnnnnnnnnnnnnnactccagcctgggtgacagagcaggaccccgtctcaaaaaaaaaaacaacaacaaaaaaagaaatttttagaaatatgagatgacagcaagaatgagggtattaaaaagaaatttttagaactaaatagcagaatgtaatggtgaaaagtttgatttctcaagtctgctttgcacacaggcatgtggcaaacattcagtaagtatagctgtaattttaaccagctgtaatgtataatagccaacatatcacatttttcttttttcttttttgagacagagtcttgctctgttgcccaggctggagtgcagtggcaccatctcggctcactgcaacctctgcctcctgagttcaagtgattcttgtgcctcagcctctcaagtagctgggattacaggtgtgtgccaccacactcggctattttttgcatttttagtagagatggggctggtcttgaactcccagcctcaggtgatctgcctgcctcagcctcccaaagtgctgagattacaggtgtgagccacagcgcctggccatatattgcttttttcttattatcagagccagttcataattgtggaaaaatagtgtttgtaacaatgtaagtatggataaatcatctttttaattttgtgattcatataggtttgttgttgttgttgttgttttgtttttatcttgagacagagtcttggtctgtcacccaggctggagtgtaatggcacaaccatggctcactgcagcctcagatgcctgggttcaagcaatcctcccgtctcagcctctagagtagatgggaccacaggtgtgggccaccatgcctgggtaattacaaaacttttttttttttttctagagatgaggtctcactatgttgcccaggctggtctcaaacctttgacctcgcttcagcctttagagtagctatgactataggcatgtgccatcacccagctaattaaaattttttttctttttttttttggtggagatgcggtcttactttgttacccagactgcaagttagtttcagatatcaacatttggtgtttccaaatgcacggggaggctttggagcaagtttttggctcatatgcataggtgtcctagacattcactttgcaaattcttattaaaatgactacagtagcatacagatagggaaaaatatccttgtcagtaccaccgattgggtgagaagagactgtatattaaaaacaatgaccatctttttgccacataaattgctggtggggccagtttgaagagggctttgtcagctgccttctgcctcttcctcttgagtacgtggagttggagtcatccttgacagcctcctgttgacaccacccgggtcacagatgtgaaactgtgtggatgtaggagagagcagtgatggggcttaccccaaggttgctcttccttccctctggccacaaatgtttagtaaggaactgctctgtattaaccatttgctaggggctgcagatacggtggtgaagaaatagacatgttcctactcgggatgctgaggtgggaggattgcttgagcccaggagttggagctgcagtgagccatgatcacaccactgcactccagcctgggggacagagcgagaccctatctctaaaaaacaataaaagaaatagatgtgtccttcaccctcatggaactgccagtctagccttcaacctggtgactgtagaaatgtgtgattagatgctatattgccatgttgagtgtcacccctgagaagcagggttttttttgagaaggtaggatgggggatctgactgtgggaccaccagagggaaaagcacatgtaaaagctgcgtgtaccaactggaggaaatcggagacgtgatcagagaaccagagtcaaccaggggccatgccgtacagggtcctgttaagatctgtgacttttttctaaacgttttcttctggataacatctaaatttctagttccaaatgtgaaactccaagggcgttctgtgctaaacattttgcatgtattaattaatttccaccacacaacattgctgtgaattaagacagtttctaagcatggcaagaaacccagaaatcataatggaaaaatctgataaatttaacaatgccaacatgaacctctgtaggaaaaaaaataccacagactaaaaaggggggaaaaaaaccagagacaaatatttgcaacacatacagtaaagggtaattttctggttatatcaagagctcctacaaatcagtaagaaaaaaaatctaataggaaatgagcaacgacaaactgacaactcatagaaaaggaaacacaagtggtctgaaaacatgaaaaagtgctcagtctcacaaagaaatgcaaactaacatggtaccattttccattaatcagatagacaaagatgaaagagtttggtaatgtatgtagtattggcacaagtgagggaaaacaggggatttcacactctatgcccgtccaaaccagtaccttattttgagggtggtttgacaatatttgtcaaaataaaaaaattatatatagtcatttgccacataatgatggttcagttgatgatggacggcatacataatggtggtcccataagaatataatgggctgggtgcagtggctctcacctgcaatcccagcactttgggaggccgaggtgggtggattgcctgaggtcaggagtttgagaccagcctggccaacatggtgaaaccctgtctctgctaaaaacatacaaacaattagccaggcatggtggcgggtgcctgtaatcccagctactcaggaggcagaggcaggagaatcgcttgaacccggaaggcggaggttgcagtgaggtgagattgggccactgcactcccatctagatgacaaggcaaaactccatctcaaaaaaaaaaaaaaaaaagaatattatgggcccagccacagtggctcacacctgtaatcccagtactttggtaggccaaggcaggagaatcatttgaactcaggagtttgagactagtggggacaacatagcaagaccccatctcaaaaaaaaaagattatggtggagctgtcctgtatagacataccatttttaactttttttttttttgagatggagtcttgctgtgtcacccaggctgatgtgtagtggcgtgatctgggcttactgaaacctccacctcctgggttcaagcgattctcctgcctcagcttcctgagtagctgggactgcaggcgcaggacaccatatctggctaatttttatatatttagtagagatggggtttcaccatgttggccaggctggtcttgaactcctgacctcaagtgatccgcctgcctcagcctcccaaagtgctgggattacaggcattagccaccatttacaggcacctggccaccatttttaatcttttatattgtatttaaactgtaccttttctatgtatggatgtgtttagatacacaaataccattgtgttacagttacttacagtattcagtacagtagcatgctgtacaggtgtgtagcctaggagcaataggttataccatatagcccaggtgtgtagtaggctctgccatctaggtttgtgtaagtacgctccatgatgttaccacagtgacgaaatcgcctaatgatgcatttctcagaacatattcctgttgttaagcaatgcatgaccgtatcttgacaaagccattttatttctaaaactttaattttacagatttatttgtaaaagtatgtaaaaatgattgtaaaggatatgttctgctgcattatttgtaataacagaaaaccagaggataacataaatgtcctataagaagggttagattatggatggcacattcatacaatggggtattatgtagccattgaataaaagggtactggctgggcgcagtggctcatgcctataatctcaacactttgggtggccaaagaaggaggattgcttgaagccaggagcttggggccagcctgggcaacatagcaagaccctatctctacaaaggaaaaataaaacaattagccaggtttggtattggacaccttcatggtcccagctactgaggaggctgagattggagggatcgcttgtgcctggcaggttgaggctgtagtgagccatgattgtgccactgcactccaggctgggagatagagtgggaccctatctcaaaaaaacaaaaacaaaaacaaaacctcctgtaaaatgtcaagaagtcctagatgtgggccaggtgtggtggctcacacttgtaatccctgcactttgggaggctgaggccaggagtttgagaccaggcagagcaagatagcaagactccatttctacaaaaaataaaaaaaattagttgggcatagtggtgcattcctgtagtcccagctactcaggaggctgaggtgggaggattgcttgagcctgggaggttgaggctgcagtgagccatgatcacacctctgcactccaacctgcgcaacagagtgagaccctgtctctaaaaacaacaaccaaaaaaacccagcaaagtactgataaagatctttggctgggcgcagtggctcacacctgtaatcccaacacttcaggaggctgaggcgggcaggtcacaagatcaagagatcaagaccatcctggccaacatggtgaaacccggtctctactaaaaatacaaaaattagctgggcatggtggcgtgcacctgtagtctctgctactcgggaggctgaggcaggagaatcacttgaacccaggtggcagaggttgcagtgagccgagnnnnnnnnnnnnnnnnnnnncatttgtgtgtgtgtcgagtgtgtttcacacaggctcagagggagtagtgtgtatatgcacatgaacatacgtgtcagtgtatatatgtatatatacaaggttgtgggtttgtttgttttttttgagacagagtcttactctgttgcccaggctggggtgcagtggtgcaatcttgacccactgcaaccttcacctcccaggttcaagtgattcttgtgcctcagcctcccaagtagctgagactacaggcacgcaccaccatgcccagttaatttttgtatttttagtagagatggggtttcatcatgttgcccaggctggtctggaactcctggcctcaagtgctctgcccgccttggcctccgaaagtgctgttgcccaggctggagctcagtggcacaatcgcagctcactgcaaccccgacgtcccaggctcaggcaatctttccgtcttagcttcccaagtaactgggactacaggtgtgtgccatcaatgccccaccaattttttaattttttgtagagatggggtttccctacgttgcccaggctgatcttgaactcctggtctcaagcaatcctcccacctcagcctcccaaagtgctgcgattacaggtgtgagccaccttgccctgccctgtacaaagatctgcataaaagcagttaataatactatgtttgaggctgccatcacaggggtgaggtcaaggacaagtgtgagaaattcttttagaatctattttaaaaaaagaagagatgacagtggtgacagtcagggaacagataagcaggtagattgtgggggtctaggctgtctaactggtgtttaaaatgaagcaaccgctgagcctgctgtatttcatttaatggagactagtaaaacaacagccagaaattcttcactttccatctaagagaggcaaaagttattttcccttcaataacctgggactgtaggattaaggtttttttttttttttttttaaatactacaatatgactaccagtataatttaaaaatgattagaattctatttgagtaagaaataggtgtctgcctgaagtagacagtcactgaagtcactaagtggcaaaagacagaaaaaaaattgaaagtaggaaacaatcagcagatatgataccaaacatgagctgtcagtgataatggattaagtccttcaataatggctgagccagatggaattaaaagaaaaaatccaggccgggcatggtggctcacacctgtaatcccagcactttgggaggctgaggtgggaggatcacttgagtccaggagtttgagaccagcctgaacaacatagtgggaccccatctctattttataaaaatattttgaaaaaagaaaaaaaaattcagttgtgttctgctttaaaaagacaaattggcacagaatgtcaaagaataaataaaacaaacatgggcaaaagagattcaggtggtaccaatatcgggctaagtagcattcaagataaagattattaaataataagttagttaatactagagtaattgcatattaatgaaacataatctatggtagagatattatagtcaataattgttttatgtattcattaaggtaacaacaagcaaacaagctttaatagttttaaatgctttatatgctttatagttcttttatgtgcattaattcattaattctcatttcctatgaggtaaacactattattatccacattttacagatgtaaaaaccgaagcagagagattaattagcttgcccaggagatgtggcattctgggatttgagacagtggtttggctctgtaggttgcttcaataaccaagagatgcttcaaatcagatttttaaaatatgtttttcagaagcattttcctgatacttctccccttacatgggtgttagtcttttgggttgaaaaacatgagtaagtgctagaagagcaaaatatgcatccagatttaatagtatgtctgtttttctgagccttggcatttcattgcttttataatagaaatgaaggcttttttttttttttggctgagaatagcactgaactcagtgggagggactgtgggttgtaagttgtccgcctctgaatggagttgaatttaagtttcttggtttccaaagaatgattgatttaaagaccctcaaattgcaagttagaactgacttcagtccttgaggttttttaccatttaatgaataattaaatttatggtaataaatggtaataaatggtaaaaatggtaataaattttaccatttaatgaatttttcttaaaaagcaattgaattgttgatgaaaggtgatgttaaaattatcccagatttatcaatcttttttttattgcccctggattttgagtcatagaaagcctttccttattctaaggttaacaagacattcacccatgttttcctctagtattgcattgtttcatcttttacgtttattatttattttattttatttttttgagacagggtctcactgtgtcactcaggctggagtgcagtggaatgatcttggctcactgcagcctctgcctcccgcctcccgggttcaagcgattctgctgcctcggcctcccaagtagctgggattacaggcacctgccaccgcgcctggctaatttttgtattttttttttagtacagatggggttttgctgttggccaggctggtctcgaactcctgaccttaagtgatccacccgccttggcctcccaaagtgctgggattacaggcatgagccaccgtgcccggcctaaaatttattctgatatgtgatatgatgtatggttctaactactttgttacggtgcattattttctaaatgtggtattggattcttttatattttgtttagaagttctgcatcaatattcatgagtaccattggtctctgttgtttttcttgtgccatctttattggtataggtatcagtgttatatttagtttgtaaaaggaagttggaagttttcctttctttttagtactcaggaatgattttaagaattgagactatttggtctttgaaggtttggtagaagtccattgggaatccatctgggcctggtgattttctgtgcggtagttccttaattgttttccctattttttcttatttttaatcaggtagcctctgaaccagaataggttcagagaggctccctctattttttttaatacaagttggtctgcctaagttttcttactctaatgggttaatttttgtagactgcatttccctgaaaaattacacgtttgttctaggttttctgacttatttccacaactttttagtctttccccctggaatcatgcccctttccataaacaggactctgatgtacctgaagtattttcacacttcgggtggactttctgtttctgggggtggttttagagcaattttaggcctgccactagctaccctgttctctacaccatgctgtttttctcagaatgctcttcttttgcacaaaggcttggagtaggaggttgagcagtcactcactgacgtttggtatattttcttttttttgcttacaggtaatctggaagtttgggcattctctttaagttgagggtgtggttttcatgtcattttatttgtttattgttttcttgtgtgtgtttcttagagacagggtcccactcttgccctggctggagtgcagtggcgtcttgatcatagcttactgcatcctcaagctgctgggcttagatgaacctcccacctcagcctcctgagtagctgggactacaggagcacaccaccatacctaatttttttttttttgagacgaagtcttgctctgtcccccagattggagtgtagtggtgcaatctcggctcactgcaacctctgcctcccgggttcaagcgattctctcacctcagcctcccgagtagctgagactgcaggtgcatgccaccatacccggctaatttttgtattttttagtagaaacagggtttcaccatgttggctaggctggtctcaaactcttgacctcaagtgatccacccaccttggcctcccaaagtgctgggattacaggcttgagccactgtgcctggtccctggctaatttttaatttttttgtagagatgggatcttgctatgttgcccaggctggtcttgaacacctggccttaagcaatcctcccaccctagcctgccaaaacactgggatttacaggcatgaaccattgtgcctggcttgttttgtttttaattctatgttgtttttgaaggatgtatggggagagatggatttaggcaatcatcgttgtccttggctacctgaaagtccaggcactcttctagatactttataaatattaactcattttatcctctcaacaacactatgacatgggtactgttacaccttccattttataggacttaacagagaggttaaatatgtagcccagggtcacagagagctgggcttcagaccaagacaatctggcaccagagtctatgtggctacccctaaggctttgccaccatgtgttagtgattctcagcctgtcatttggggaggggattgcccttttttttaaactttttaaaaaatttattcttattttattatatttttgagacagagtctccctcttttgccgaggctggagtggagtggtgtgatttcagctcactgtaacctctgcctctggggttcaagtgattctcatgcctcagcctcccaagtagctgggattacagttgccagccaccatgcccagctaatttttgtattattattattattatttgagacggagtctcgctcttttgttcaggctggagtgcagtgctgtgatctcggctctctgtaaccttcgtctcctgggttcaggtgattctcctgcctcagcctccggagtagctgggactataggcgcgcaccaccatacttggctaattttttgtatttttagtagagacggggtttcactatgttggccaggctggtctcgaactcctgacctcaggtgatctacctgccttggccttccaaagtgctgggattacaggtgtgagccaccatgcatggctggattgtccttttttaaaaaaaaaaacaaaaacaaaaaaaaaaacccaaaccataaacccaatattctgaaagatttggtctccacacctgtgttatataataattagtttttccatttttttcctcttggtagaaggcacatatgccactcagtttccagttgccacacccaattaacataattgttttgcagccaaaagcaaaagagagttgacattttaattagcttatgtaggtagacaaattgaggcctaatgtaagagtttcattatacctttttgaaaaactataaatagctagaagccagttgtcattactttttgattccttagaattctgggcatctttcatctggaaccacagatgaaagaagctgcaaggaaggattttttttcttaacggaatagtttaaccattctgaatgcaaaagtattggatgctagaataataggtatcacataaattgaggttgacgttttcccgggtgaaattctattctgtctcaattttcctttttttttgagacggaatcttgctctgtcgcccaggctggagtgcagtggcatgatctcggctcactgcaagctccacctcctgggttcatgccattttcctgcctcagcctcccgagtagctgggattacaggggcctgccacaacacccagctaatttttttgtatttttagtagagacggggtttcccaggatggtctcaatctcctgacctcgtgatccgcctgcctcggcctcccaaagtgccgggattacaggcgtgagccactgtgcctggccttttttttttttttttttttttttttttaagacagagtctcgctttgttgcctaggctggagcgcagtggcatgatctcagcttattgcaacctccgcctcccgggttcaagtgattctcctgcctcagcctcccgagtatctgagattacagatgtgtgccaccatgcctggctaatttttgtatttttagtacagatgaggttttgccatgttgcccaggctggcctcaaactcctgacctcaggtaatcctcctgcctcagctcttcccaaagtgctgggattataggcatgagtcaccgggcccagactcaatcttctgacaagctctcagagagagtaaaaagcaaatgaatatttcattattttgatctgagctttacgatttttcttttcttttcttttttttttttttttgagatggagttttgcgttgttgcccaggctagagtgcagtggtggcgatcttggctcaccgcaccctccgcttcccgggttcaagcgattcttctgcctcagcctcctgagtaactgggattacaggcatgcgccaccatgcccggctgattttgtatttttagtagggacagggtttctccatgttggtcaggctggtcttaagctcccgacctcaggtgatccacctgcctcggcctcccaaagtgctgggattacaagcatgagccaccttgcccagccttttttttttaaatctgagaagaggtcttgctcgattgcctaggctggagtgcagtggtgcgatctctgctcactgcattctctgcctcccagactcaagcaatcctcccaccttagcctcctgagtagctgggactacaggcatatgccaccacacctggctaatgttcgtatttttttgtagagacagggttttgccattttgcccaggctggtcttgaactcctgacctcaggtgatcctcccaccttggcctcccaaagtgctgggattacaggtgtgagccactgtgcctggtctccttcactgttgtaagatacttgaattgggtcaatatttgtggagaagtctcttaaaagttcacttgattgtcagtactagaactctacatttaatattgacatattcctgggagcatttcagagcattctattagcttagaaaggtccaggataatttgactttagaagttactgttaccatgaatctcaatgacttttgaaatccatgaagaatatcttttttttttttttgagacggagtctcactctgtcgcccaggctggagtgcagtggtgatctgggctcactgcaagctccgcctactgggttcacgccattctcctgcctcagcctcccgagtagctgggattacaggcacatgccaccacgcctggctaatttttttgcatttttagtagagagggggtttcactgtgttagccaggatggtctcgatctcctgaccttgtgatccgcccgcctcggcctcccaaagtgctgggattacaggcgtgagccaccgcgcctgcccaagaatatctttttgctggtaactagagaggactcctctgaagcagatgccattcatgatggatttcatcatttatgggttttaaaaaacattttattttgaaataatttcaaatttaaataagagttgcaaaatagtacaaataattcgtgttaacttttcatccagatttacaagtcaaccttatacaggttgagtatcccttatccaaaatgcttgggaccagaagtgttttggatttcagattttttcgaattttggaatatttttattatatacttaagcatctctaatccccaaatctcaaatctgaaatatctgaaatgctatgatgagcatttcctttgagtgttatgtgggcactttttaaatttatttaattaatttattttttgagatggagtattgctccatcacccaggctggagtgcagtgagcgatcttggcttattgcaaacttcaccttctgggttcaagtgattctcctgcctcagccccctgagtagttgggactataggcgcttgccaccacggccggctaatttttgtatttttagtagagacagggtttcaccgtgttggccaggctggtctcgaactcctgacctcaggtggtccacctgcctccgcctcccaaagtgctgggattacaggagtgaaccaccgcgcctggccatggattttgcagcattttagatttgggatactcaacctgtaccatgtttactctctctcctctctctctctctctttttatatatattgatgaactacttgcnnnnnnnnnnnnnnnnnnnnaaataggagaagaccatcaagagagatatatatgaccagaacactctaaagatgaatggcgcaacataagtacagaagagaatgatatacacataaagaacgatcacactacatcagaaatgatactcatctacgagaatataagagagatgagatatgagtaacatagtcaccaccaatagagataaagcccgatatatagtgtaagtatataccttagttggtctcacacagacatacactcactaaaaatagcttgaaccaactcacgcaatataactaacaactaaataagtagacaaatatatagatacatagacacatatgtatatgtatacatatatgaaagtaatatatatatatatatatatatgtataagcatatatatatatatatatatatatatatatatatatatatatatatatatatatatatatatatatatatataaattatatatacactacacatatatgtatgtatatgtatgtattttatatataaaatacatatctacatataaaatacacatgtatatatacatgtgtacatatatgtgtctctatatttaagttttgttggaaccacttgagggtaagttgcagacatggcgtctcattgctccaaaatacttcagtgtgtatttcttaaatacaaggacacttggttacataaccacagtatatcaccaaatgtatattataacaagactaccatcaaatccttatatctctttcaaattgttttagtaatatccttatagcaaaagacaaaacaacaacaaaaactgttcccttttattttgtttgttttggtccattatatgtccaggttatgcattaatgcattgtgttacttgctaagtcttgttactggcctttaattaggatatttctttgcatcccgccaaactcctcttcatggttgtatctttttttttttttttggagatggaattttgcttatgttgcccaggctggagtataatgatgcgatcttggctcactgcaacctccgtctcccgggttcaagcgattctcctgcctcagcctcccgagtaactgggattgcaggcctgcgccaccttgcccagctaattttggaattttgtgagacggggttttgccatgttggtcagactagtctcgaactcctgacctcatgatccgcccgccttggcctcccaaactgttgggattacaggtgtgagccactgtgcccggtctttttttttttttttttgagacagggtcttattctgttgcctggcctggagtgcagtggtatgatcttggctcactgcaacctggacctcctgggctcaggcgatcctcccacctcagcctccttagtagctgggactataggcacacaccaccatgcatggctaatttttatatttttttgtagagactgggtttcgccatgttgcccaagctggtcttgaactcctgggctcaagtgatccacctgccttggcctcccaaaatgctaggattacaggtgtaagccactgcgcctggccctaatttttgcattttttgtagagatggggtttcactatattgcccaggctggtcttgaactcctgggctcaagtgatcttcccatcacagccccctaaagtgctgggattataggcgtgaaccactgtgcctggctgaggattaagtttcaacctcaggggagcggcattcaaactatagcattgtcctttagtgactggcttagttcacttagaatgtttgtctattcatccatctatagacactgttttctttcaccttttggctttgcaaataatgctgctgtgaatatgagttatagaaaaataccaatttgaatccgtgttttcaattactttgagtatatacctggaagtggaatttctggatcatatggtacttccaagttttttttttttcttttttgagacaaggtctcactctgtcacccaggctggagtgtagtggcacgatcttggctcactgcaacctccgcctcccgggttcaagcgattctcctgcctcagcctctcaagtagctgggattacaggcacgcgccaccacgcccaactaattttgtatttttagtagagatgggtttctccatgttggtcaggctgctcccgaactcccgacctcaggtgatctgcctgcctcagcctcccaaaattctgggattacaggtgtgagccaccgcacctggcctccatgtttcaatttttaaacaaacaattagttaaaaaaataggaaactaagagaatgaactatttcctgttttattcagtgggttataatctgttactatcattgtttattttgaggtacaaattgtccctactttggccagcagaggatcctgcagtttgtctcctgtgtccttttcatagctccttgttggaactcttactggcccacaataggatgttccaagttcatcttcttacttttactgccccaacgctgggatcagccatttcttcaaggaggccagttcctttcattggagaatggaaaacccaatatgtagaaaccaagatagaggtgttaggtgtgattgctactggagtgtcattgcttccaaaccctttcagaagagacctaggaaatgtgtgtgtgtgtgtatatatatatgtgtgtgtgtgtgtgtattcataaaagcacatacacatacacataccccgaagcatgtatttctgtattattattatttttttgagatggagtcttgctctgtcgcccaggctggagtacagtggcacgatcatggctcactgcaacctctgcctcctggattcaagcaattctcctgtctcagcctcctgagtagctgggattacaggtgtccaccaccacgcccacctaatttttgtatttttagtagagatggggtttcaccacattggccaggatggtcttgaactcctgacgtcaagtgatctgcccgcctcggcctcccaaagtgctgggattataggcgtgagccactgttcccatccagaagcatacatatctatttctatatctacatttctgtctttacatgtatatattaaaaattacagtttgcactaatacctccaattacaatctaacatcatgggatttattctggctttctcccttctcatatttgtgtctccccaacagtgagaaacctggcttgctatcctcaacatggtaacttatttattaagaaacttattctttttttttttttttttctgagatggagtttcactcttgttgcccaagctggagtgcagtggtgtgatcttggctcaccgcaacctctgcctcctgggttcaagcgattctcctgcctcagcttctcaagtagctgggattacaggcatgcaccaccatgcccagctaatttcgtatttttagtagagatgggtttctccatgttggtcaggctgctctggaactcccgaccccagctgatctgcctgcctcggcctcccaaagtcctgggattacaggcgtgagccaccgtgccctgcctctagtttatttatttttattccatgtgctcagtcttgcgagcacgtggtctgttttcttgggcctggccccctcagtgcactgtcttaataccctagcccccagtccctctgatcatatccccagacacccctactgaatcccaggtctctaccaagggaaaggcagggaggaggcattgaccaaggagaagagggggaagggacagggaaggtcttgatttgtattttctaaaattttctactctgctcataatgcgtcttagctgtgttgttgtggaaagtagtgctgacagtgtcttgtttttttattacttactttgtctttctttttaagatggtttcacccaaatatcactggtgtggaggcagaaaacctactgttgacaagaggagttgatggcagttttttggcaaggcctagtaaaagtaaccctggagacttcacactttccgttaggtaagttggaatgaaaagagaggatcctgagagtgttttctaggtaggaagtggtaaaaccatgcttggatagcttgctgcctgcatttcgagtttgaaggccttatctgagccctgggctgccttcagggtttggggagtggcctcctggacatttagcagaagaggagtaaggagggcccttcttctccctctgagacctcatggaaggtgagttggagcaggtcatagaagttcttaagccctccagtgcttgagacttgttccacacatcttgaacctggtttctgcatttttcttttccttcctgttgatttatttaaaaattttatttcttttcaatttttttttttttttaaatagaggtgggatcttccaatgttggccaggttggccttgaacttctggcctcaagcaatcctgcctcggcctcccaaagtgttaggattacaggcgtgagccactatgcctggccttctttttttgagacaagctgttgctctgttgcccaggctggagtgcagtggtacgatcacagcttacagcagccttgaactcctgggcttaagtgatcctcccgcctcagcctcccgggtagctgggactccaggcttgtgccaccatgctcagcatttttaaaaaatattttttgtagagatgaggtctcactgtattaccaaggctgatctttaactcttagcctcaagtgatcctcctgcctcagcctcccaaagtgttgggattacaggcatgagccaccacactcagactttgttgacttcttaataagaaaaatacttgttaagagtttcttcagatcactttcctttatcaacaagtaaaacatgactgaggaagttgtggtcccctttgcttccctgcccaggcccgtttccctccctctttccccagaggaaaccaccaagaggttggcatatattcttcctgaacgtgtttttatagttgtactgcacttgtactgtgtatgaacaatataaagttggtttgtgtgtttaaaaaattcacatacatggatttataatgtatgtatcattttgcaacttaaaaatttttttttgagctccatgctgattgataacgatctattttttttttttgagatggagtttcagtcttattgcccaggctgaagtgcaatggcgtgatctcagctcactgcaacctcagcctcctgggttcaagctattctcctgtctcagcctccggagtggctgggattacaggtgcatgccaccatgcccagctaatttttgtatttttagtagagatggggtttcaccatgtcgaccaggctggtctcaaactcctgacctcaggtgatctgcctgccttggcctcccaaagtgctggaattacaggcatgagctaccatgcctggcctttttttttttttttttttgagacaaagtcttgctctttttcccaggctggagtgcagtggccacaatcttggctcactgcaacctctgcctcctgagttcaagcagttctcctgcctcagcctcctgagtagctgggattacagacatgtaccaccatgccaagttaatttttgtattttttgtagagactaggttttaccatgttggccaggctggtcctgaactcctgacttaaagtgatccatctgccttggcttcccaaagtgctggggttacaggcatgagctatcgcgcctggcctgagaaatctcattcttactcctactcccttgcacactatctccattctgtaggtagccatttctattaatttcttgtttacccttctgtgtttctttcattctttttctttttttcttttttttttttgagacaatcttgctctgttgcccagactggagtgcagtggtgtgatcttggctcaccgcaacctccacctcctgggttcaagtgattttcatgactcagccacctaagtagttgggattacagcgcctggtgtacactaccacacccagctaatttgtgtatttttagtagagatggggtttcaccatgttgtccaggctaatctccaactcttggcctcaagggatctgcctgtctcagcctcccaaagtgctgggattataggcatgagccaccatgcctggccctatgtttctttttataaaaataagcaaattaatatttttattactattttccttttatttttacacatcaagtagaacattaaatatatttctctgtaatttttttcagttacctaaatcttttagtgatctctctcatctttttaatcagctggatcgcattctatcatgtgaatattttataacttctatatactgtcaccagcaggtagcgatttagttgtgtctaatattttaaaatgatatataatgcctcaatgaatatagtaaccttttgcatatattgttttgtgctttgggataacactacctcgtattggaaactgtgtcattacatgtgtctttaaaattacatgtgtctttttatttttatttttattttttttgagtgggagtttcactcttgttgcccaggctggagtgcagtggtgagatctcggccgactgcaacttccgcctcccgggttcaagcgattctcctgcctcagcctccccagtaggtgagattacaggtgcctgccaccacgcccagctaatttttgtatttttagtagggacggggtttcaccatgttggccaggctggtatcggtctgctgacctcaggtgatcctcccacctcagcctcccaaagtgctgggattacagacgtgagccaccatgcctggccatcacttttttttttttcttaattgctgcatagtggccgggcacagtggctcacgcctgtaatcccagcactttgggaggccaaggcaggcggcggatcatgaggtcaggagaccaataccatcctggctaacatggtgaaaccccgtctctactaaaaatacaaaaaaatttagctgggcgtcgtggcgggcgcctgtagtcccagctacttgggaggttgaggcaggagaatggtgtgaacccgggacgtggagcttgcagtgagccaagattgcaccactgcactccagcctgggtgatggagtgagactctgtctcaaaaacaaacaaacaaacaaaaaaattgctgcatagtattccattgtatgagtagtaacacaacaatttttataatgcatagtattccattgtatgaatagtaatgtagcactatttgtttatacatttttatgattaaaaaacaaaatgtttttctattatgaataaagtggcaatgaatatttttgtacaagtgttttggtagctatacagttattgtcacttaatatatgcaattcgataggccagtcattcaaaatagaagatatacaaggtaggccgggcgtggtggctcacgcctgtaatctcagcactttgggaggccgaggtgggtggatcacctgtggttaggagtttcagaccagcctgaccaacatggagaaacctcatctctactaaaaatacaaaagtagctgagcgtggtggcgcattcctgtaatcccagcttcttgggaggctgaggtaggagaatcacttgaacctggatttataatgtatgtaaatccaccgcgaaggttgcggtgaaccgagatcacgtcattgcactccagcctgggcaataagagcgaaactccatctcaaaaaaaaaaaaaaaagatatgcaaggtaaagatactaataaagacctttgtgttgagttggttgacatgtggttatttcacccatcgtatttcttatagggaataggtaaattcgttccttgggtttctttcaacacttaggtaaaatccgacgtggaagatgagatctgattttactggtgtaactctttatttgtccccttgcctccctttccaatggactattttagaagaaatggagctgtcacccacatcaagattcagaacactggtgattactatgacctgtatggaggggagaaatttgccactttggctgagttggtccagtattacatggaacatcacgggcaattaaaagagaagaatggagatgtcattgagcttaaatatcctctgaactgtgcagatcctacctctgaaaggtcagtaacattttagtgaccacaaagtctgctgctcccttgtgccctgagtgtcagaaatgcatgacggtctgtgtatgactctctgactccaaaggcttgtgactgttttttgagctgtaatctttaaagaattactaaagtgagactaatagcatcaaattattttcagagtacctttttcctgcaaaagttttaatcagtgttacttacactcatcctataggggttgcataccattcctgcatatacttggtacgtgtattagttttaagacttattgaacttcagcagataatctttgagagttattagaggaaaacaaatgataatggagacaccaaaatagcagcagttttctatggtggctctcgaccagttattcagcaatgtcaccaacagatgtcagtttaagctcagaagtggaaaagcagagagctcagagggtcagctttttcatcagttcttttaatgttatcaccacaattatgtgagaatgaccttgcttagagaaaattatgttattttcgagatctttccccctgtgttggaactaggctgatgaaagcatgggcttgacttatttattgattgtattcgttttgtacattcccaatctcctctctgacttggtgcaaattcaggatctcttagttagtttgtatattttgtgtcttcaggtatgattttttcagcttatacctttatgtcagtgctattatgtgctgataatttgtttctctagctaccaccgtagcttcaggcaaaaggctgtcagccaactctgtacagtttatttctaaattttactgttttcagttgagtatggatgaagaataactcaaagtttattcttttgatgatgagcccttaacaccacctgccatgatagtacttgctttctgaccaagatcctgagggaaaaagccactttattattagaactatgttaagatgcttcccaaaaaacatggagcagtattgtctcaaagtctgtccttggatggctttggatgcctacatcaggactgtctgatgtgctggttaaaatgcagattcctgggcctcattcagacttacatgtattgatattgctggttgtggagcctgggaattcatatttttagcaaaatccctcatttttactccaagtcttatgtgcattatacagtttgagatgatcacccaggatatagtccaaagacactggaggctgttgaagtataggttgtatatatggaaaaggttggaatgtttgaattaatttataatgaagatcctttttaattgagtgttcacatgccaaggcaaggacaaacattcaaaatgattttctgtctctgttacaactttttctttcttttttttaatttatttatttgagatggagtctcactctgtcacccaggctggagtcaagtgacgcgatctcggctcactacaacctccgcctcccagattcaagtaattctcttgcctcagcctcccgagtagctgggactacaggcatgtgccaccatgcccagttaatttttgtatttttagtagagacagggttttgtcatgtttgccaggctggtctcaaactcctgaactcaggtgatccgcccaccttgacctctcaaagtgctgggattataggcgtgagccaccgtgcctgtctctattacaactttttattacaacttctttattttgactttatttttacaaattatttatttattttttttgagatggagtttcgctcgtcacccaggctggagtgcaatggtgcgatctcagctcactgcaacctccgcctcccaggttcaagtgattctcctgcctcagcctcctgagtagctgggattacaggcacttgccaccacacccggccaattttgtatttttagcagagacagggtttcaccatgttggtcaggctggtctcgaattcttgacctcaggtgatccacctgcctcggcctcccaaagtgttgggattacaggcatgagccaccacgtccggccgacttttatttttttttcttgagacagggtcttgctctgtcacccaagctggagtgcggtggcatgatcatagcgcactgcagcctcgacctcctggactcaagtgatcctcctgcctcggccttgtgtatagctgggattacaggcagttgccaccatgccaggctaatttttaattgttttgtgaagatggggatttcactgtgttgcccagactggtcttgaactcctggcctcaagtgatcttcctgccttggccttccaaagtgttgggattacaggcataagccactatgcatggcctgtaacttctttaaatggctataattaaacagttggtccttttaagattgggcaatggacgaatggcaaattgcatttttaaaagaggagggatttaaaaaaaaacaggaaagattggggcatttgtctctaaaggactgtggactcatttaagaagtttagtggtcattcttaccatctttgtggtttttcctgcctgcatgggatgcagattttctgtctcaggtgggattgatcaatcccttggaggaatgtgtctactttttaattgtgtttaggagagctgactgtatacagtagttttgtgaaagaacaacatgaacccatagtagagctaaattcttttttattttttaaaaactttaggtggtttcatggacatctctctgggaaagaagcagagaaattattaactgaaaaaggaaaacatggtagttttcttgtacgagagagccagagccaccctggagattttgttctttctgtgcgcactggtgatgacaaaggggagagcaatgacggcaagtctaaagtgacccatgttatgattcgctgtcaggtaaatctccagttgaaaaatgggtctggcaagatgttacctttgggtgatttttctgctgacagaagacagacaccattacattcaaagtcagattgtcttttatttatttatttatttatttatttatttgagacagggtcttgctctatcacctacagatggggtttcaccacgttgggtctggtgacccaaatctttgggtgatttttctgctggaagaggacaaacaccattacattcaaagtcagattttctgttttttttttttttttgtttttgtttttttaatattcatttgtttattcatttgagactgggtcttgctctgtcacgcaggctggagtgcaacctccctgggctcagttgatcttccctcagcctcttgagtagctgggactacaggtgtgtgccaccatgcccagctagtgtttgtattttttgtggagatggtgttttgccgcattgcccagtgtggtcttgaactagtgctcaagaggcctgcctccttcaacctctcaaagtgttaggattacagatgtgaactactgtgcctgatccaaagtcagattttctttgcttacttagtcaagttcgtctatgcttttattatacttaatatattagtatagttactgtattagtatattagcatatttaatatattattatacttatcatacttgagtatattgagtatatttacacttttagtatatttgtatacacacaccacatttttattatttatcttttttttgagacagagtctccctctgtctcccaggctgaagcacagttggctcactgcaacctctgcctcttgggctcaagtgattctcgtgcctcaccctcctgagtagcagggattacaggtgtccaccaccaagcctggctaatttttgtatttttagtggatatggggttttaccatgttggccaggctggtctcgaactcctgacctcaaatgatctgcccgccttggcctcccaaagtgctggaattactggcgtgagccactgcacccagcctattatctgtcttttgatggacatttaagttgtctctatatactagctattgtgaataatgctgcagtgaacatgagagtgcttgaaaacactaatgtaacataaaggtaacaaataataaatgtcatgtgtttatcttgaaaggaactgaaatacgacgttggtggaggagaacggtttgattctttgacagatcttgtggaacattataagaagaatcctatggtggaaacattgggtacagtactacaactcaagcaggtgagcagattggaaagctcaagctttctccttaaaaacttaaaacaaatcctaatagagaattttgcaaacatacagaggtagacagaatagtatcatcagcctccatgtacccattgcagcttcaactatcaaatctttttttttttttttttttttgagacagtcttactctgtcacccagtctggagtacagtgttgcaatcttggctcactacaacctctgcttcctgggttcaagcgattctcctgcctcagcctcctgagtagctgggactacaggtgcccaccaccatgcccggctagtttttgtgtttttaatagagatggggtttcaccatgttggcctggctggtcttgaattcccgacctcaggttttctgcccgccttggcctcccgaagttttgggattacaggcgtgagctaccacgcccggccctaaatcttttcttattatgattccactcactgactgccgctatagtacttggaaacatattccagatttatattattcccatatttatctgtaaaaggcattacagaggttctttttttttttttttttttttgagatggagttttgctctgtcgcccaggctggagtgcagtggcgtgttcttggctcactgcaacctctgcgtcccgggttcaagagcttctcctgcctcagcctcctgagtagctgggattataggtggtgccactacacccagctaatttttgtatttttagtagagatggggtttcaccatgttagccaggctggtcttgaactcctgacctcaagtgatctgcctgcctcagcctctcaaagtgctgggattataggcatgagccactgcatctggcctaaggctgtacagagttttaaagcaagttttcattatagatccacttctggttacctttaggtaacctcacttattcactttggcattgttgctatttcaaatttcacctttatgatagtggaaaatgatataatctctctaaataatgtggtctattcataaagaaaaataggcttgaatttatatcagcagagtaaagtgtatgtgaagactgaagaaagatacattttctggctgaacagaaaacacggtgaaacgatttgaaaacttttattgtgaattacagggtcctatgaaccctctgtccgtgcctttatgaatatcaacatagacatgtttttttttttttttttgcattaacaccgttttctgtaatattttctttattttacatcaactgctgtactcgatcagccccttaacacgactcgtataaatgctgctgaaatagaaagcagagttcgagaactaagcaaattagctgagaccacagataaagtcaaacaaggcttttgggaagaatttgaggtaagttattaaaaaactgtttttacgtgagttgttatatcctatttttagtggaggagaagttgctcttgtgtttggaattggacctgagagacttgaaactgacgtccttttttaattcggccattgattgacacggagcaagttgctgagagggcttcttcgaaacagaagagcattgtgttctgagggaagggagttggcagtgagtagtcaatggatgtgctagccgctccatttggctcttttggtttggactggtggcaaaatctcagagaaacaaaaggatctaatttcttcgaaagatttccagcatgcactggggtctttagaaacaatctatagccttagtgcagcaaatgagtatgagtaaaagagaaacaccttgtggtggcttttttttttttttttttgagacagggtctcgctctgtcgccgaagctggagtgtagtggcgtgatctcggtttactgcagccccgtcctccctgggctcaagtgatcttcccatctcagcctactgagtagctgggactacaggcacatgcccctatgcctggctaatttttgtatttttggtagagatgaggttttgcagtgttgcccaggctggtcttgaactcttgggctcaagtgatcctcctacttaagcttcccgagtagctgggactacaggcacacgataccatgcccatctaatttttgtatttttttgtagagatggggttttgcagtgttgcccaggctggtcttgaactcttgggctcaagtgatcctccagctttgacgtgccaaatgtggtggctttaatttcagagttcaaattgataactctggtaagttaagtgaactgatttcttttttttttaaattatttttgttgattatactttaagttctgggatatatgtgcagaacgtgcaggtttgtacataggtatacatgtgccatcatggtttgctgcacacattaacccatcatttaggttttaagtcctgcatgcattaggtgtttgtcctaatgctctccctcccctttaatgcatcagtgaaaaagtgatgataggctgggcgtggtggctcactcctgtaatctcagcactttgagagggtgaggcaggtggaccacttgaatccaggagtttgcccccatccccagacagtgtgtgtgatgttcccctccctgtgtccatgtgttctcattgtttggttttctgttcctgtgttagtttgctgagaatgatggtttccagcttcatccatgaccctgcaaaggacatgaactcattctttttttatggctgcatagtattccatggtgtgtatgtgccacattttctttatccggtctatcattgatgggcatttgggttggttccaagtctttgctattgtaaatagtgctgcaataaacatatgtgtgcatatgtctttatagtagaatgttttataatcctttgggtatatacccagtaatgggattgctgggtcaaatggtatttctggttctagatccttgaggagtcaccacactgtcttccacaatggttcaactaatttacactcccaccaacagtgtaaaagcattcctatttctccacatcttctccagcatctgttgtttcctgactttaagtgaactgatctctttcctgaaactaacttgggttggagaatgtccctgatgggaatgtgctgtgttcccattgcactcttctatatcacttacccattgacaatgtgatctctttcattttctcctcatccatttgacagaaaacttcaaaaacaaggattctggcatatttacctttgcagttgtccccagcatgtagcacggtgcctagtacacagaagaaactccataaatgtttgttgaatgagatttacatttaactcatgtttacatcattttattttcctgttctgttttatgggaatgattattctatgctttttgaggactacaatttataaatatttgtggattgaatgaataagtgaatactgggcaaataaagtccttttagccagagtatgtctgaacaacttgctgagatagatatgatttcccattttccagctgaggggcctaagggaggttaagtaaattattcaatcttcataccacagtttttgttttgttttgttttgttttttttcctcctgagacagagtctcactttgctgccatactggagtacagtggtgcaatcatagctcactgcagcgtccaacttctgggctcacgccatcctcccacctcagcctcctgagtagctggtactacaggtgtgcaccaccatagccggctaatttttcattttttgtagatatggggtctcactgtgttactcaggttggtcttgaacttctgagctcaaacaattctcctgtcttggcctctcaaagtgttgggattacaggtgtgagccactgtgcccggcccataccacagatattgattgaattccagcagtggggaggagtgtggaatagaacattctcagtccttgctcaacattactgaacagagacttgaatttgagtttattctctcatcccaggcttcgcgttaggctctgaagacactagtgaacaagacagacagggttactgcctttaaagggagcttttagttgagagaaggaaaacagtgatgaaaagcatcagtgaaaaagtgatgataggctggggcgtagtggctactcctgtaatctcagcacttttagagggtgaggcaggcagctcacttgattccaggagtttgagaccaggctgggcaacatggtaaaaccccgtctctacaaaaaatacaaaaagtagctgggtgtgggggtgcgcacccacagtcccagctactctgggggttgaggtgggaggattgctcgagcctgggagattgaggctgcagtgagctgagatcacgtcactgctctccagcctgagcaacagagccagaacctgtcccaaaagaaaaaaaaaattgatgataaacatagtgagacagaattttgaaatctcagcctcactgttgccttccttgtcccctgcctgcctaaataataaaaggcagcatttcagcagtcattcatttcattactttcacttcatttcaccttcataaagcctcatgaggtaagatgggaagatacagaagttttagaaaccgctcatcaaaattgaatggaaagccgattgttccaaaactttttagtgtggaaaatttctattatatgcaaaagtagagagaatgggatagttatagcagtatacctgacacccagcattaacaactgttgataatatggccaatctttttcgactctgccccactcacttccccagccctgacttgtcttgaagcaaatactttttttttttttttgagatagagttttgttttgttttgttttttgtttttgagatggagtctcactctgtcccccaagctggagtgctgtggcttgatcttggctcactacaacctccgcctcctgggttcaagtgattcttgtgcctcagcctcctgagtaactgggattacaggtgtgtaccaccatgcccagctaatttttgtatttttagtagggacagggttttcactatgttggccacgctggtctcaaactcctgacctcaggtgatccgcctgacttggcctccgaaagtgctgggattgtaggtgtgagccactgctcccggccttgaagcaaatcttaacacatcatttcgtctgtaactattttatttcaaaaaattataacctgaatagcattatcatatctaaaactattaacagtatttccttaatattaacacatatcagtcacattttcctgattgctacacacacacacacacacacacacacacacacacttgcaatttgtgtttttttctttttagatggatctcactctgttgcccaggctggagtgcaatggtgcattctcagctcactgcaacctccacctcctgggctcaactgattctcttgcctcagcctcctgagtagctgggactacaggtgcccaccacctcacctggctagtttttgtatttttagtagaggtggggtttcaccatgttggccaggttggtctcaaacttccgacctcaggtgatccacccaccttggcctcccaaagtgctgggattacaggcatgagccactgtgcccagcagcaatttgtttgaattgggagtgctttcttccaccttgattatgaaaaaatttcaaatgtgtataaaacagattcatataaaggatcctgatatgccattatcagctttatcaattatccctgtcatcatattttttatttataaatatttcaatatttgtggaatccttaaaaatgcatcacataacccaacattgttcatattataccaattgtcttataatttaaaaatattttgttcaatcatttttcagataagcttcacacactgtggttggctaagtctcataatatttctgttgtaaaaatcttaagtctgggcgtggtggcacacggctgtcattccagcactttgggaggctgaggtgggcggatcacgaggtcaagagatcgagaccatcctggccaacatggtgaaacccggtctctactaaaaatacaaaaattagctgggcgtggtagtgcgtgcctgtagtcccagctactcgggaggctgaggcaggagaatcgcttgaacccagaaggtggcagttgcagtgagccgagatcgcgccactgcactccagcctagagacagagtgcggcttcatctcaaaacgaaacaaaacaaaacaatcttaagtctcttagaatactttgatgccccttccatctctctttttctgtcttccttccccctctccctgtcttttctgctgttgaagaaagcagatcatttgtcctgagagttacttatagtctgaattttgctgagtgcctctctgtggtggacttaagcatgtatccatcccttatatttcttgtaagttgatatatctagagacttcattggatacaagttttctttggcaagatagcatgtatggtggtgtatcaggaggtgtttatgtcctgttgtttcttctctgattttcttagcagctcctgatcattattacttagatccattaattcataagggactatatggtagtgatattgtaattttatcattcttcttcatttgttaggttggcatatttctataaaaagcttttcatcgccgagggttgattttttccttcttactaagcagttttcttttctttttcttttttttttttttgaggtaggtctcactgtgttgctcaggctggtgtgcagtggcgcaaacacacagttgcgaactcttgggctgaggtgatcctcctgcctcagtttcctgtgtagttgggaccacaggtgcatgccaccatgcctggctaattttttgattcttttgtagagatgaggtctcactttatttcccaggctggtcttgaatgtctgggctcaagcaatctttctacctcagcctcctgagtagctgggactacaggcacataccaccatgcccagctaattttttaatttttatttttagtagagatgtggtcgtattatgttgctcaggatggtctcgaactgcagagctcaagtgatcctcctgcctcagcctcccagtgtgctgggattataggtgtactacaggcaagagccaatgagcctggtcagatttttttttcctgatttgaaatctgttatgggttcaattgatacttccaaatcaaactcagggtttcaggatttttactaacctcattgatcttacccatgtatctcctttctctaatgccaaaaatcctacttcttgaagccataataagattattcatttgttttatcccacattacacacaacaatcttagaataatgacttcccaataatatgattactgaaaacagtttaattttttttgcgcttttcaaaaaaatccttcagagatgtgtagtcaagttactgtattctgctgggcacagtggctcacgcctataatcccagtactttgggaggacaagaagggaggatcgctggacctcaggagtttgagaccagccggggcaatatagtgagaccctgtctctacaaaagaaaattaaaaattaaccagacatggtggcatgtccctatagtcccagctattgagaggctgtggcgagagtaggcttaagcccaggagtttgaagctgcagtgagatacgattgtgacactgtactctagggtgacagagcagggaccctgtttttaaaaaaaaaaaatgaaaaaacttcctgtgccttagactcatttgtaatcgtccttctctctgtgtggctatatgctaactgggtatatggttagtttatttgtttcatttaaaaaatctctttctgttaagttttatttataattacacaaatactggctttgatagtcaaattgaaaaaacaaagtgtattcaaagaagtctaccttctatccttgtcctttcctatgttttagccatagtataaaaagttatggtttatcattatatttcaaaaatataagaagatattcccatatcccactttttcttaaacagtagcataactttacatacttttttctaaccttgcttttttaaatatcctggacatcctggatatccataatagtgtctagagatagtcttcattctttttttactgtatagtaatccactgtgtacttgtaccatagtttattcaacctattgatgggcatttgggtagtttccaaatgtatcacagagaggattacagtgaatagccttgtgtatgcatcctgctttacttttgctgactactggtaatattaacattttttatgttctgtatttaaaaaatggtggttattattcatctataacttttattatacatgactttggttagcatgctttaaccttttagcataacatttgcaagctacttgttttaattaaaattttggttaaatgtaaaaaatagtgagctattttgtaatctagattcaatagaatcttatacttcctttacaaatgatagctgagttgatcatttgtgtaaatgactgtgaacttaaaaattacagcattttttaaaataaatttttttaacattttaaaattatttaaaataatagacacacaaagtaaaaagagaagaaaaaaaaaagagacagggtcttgctatgttgcccaggctggtctcaaactcccaggctcaaatgatcctcctgccttggcctcctaaagtgtaagccaccacacttggcaaaaattagtttctttaaaacaaaaacattacaggttatctggtaccatggtagcttctttaacactaggttcacttagaacaaagcttaggaacaaagtcagactttcacaaagagcttgtgtggcaatggggtattttttgcaaattccattggtggggtcaagatgtgagtttagaaggaactcttagcctgactcttctggccatggaaaaagatggttgcttctaaatgctgacctggtgattttacactgtcacatctcaaattgtggtcatcttttatacattattaacaacaaaagggaaaaattgagttgactttaagaggaagtggaaaataacgagatcacatctgtactctacaggctctccacagaggtcagactgaggtggtaaaattgttgtgcactaaattagggcattaacgtttcatggaaactgaagctatatctaaatagctgatggcctgctttctagatctcctatatacctgcttctcaaattcagtctgttttaaaaaattgccctttgaggttggaaccagcgaaataaggctgaaaacagaataagccattattgaaaaaattaggaacttggaagcagatactcataatctaaatcctctgaagctaaagtttgatccacaatagcaaagcattatcattttagtgattgtaccttagttgtttcctggcaggtgataaatttgggatcactttcttcttacagtgtgctctgatagtctttaaaacaaaccagagctctaaattgtaatgccattggtaatttaactctgatttgtctctatgcctgtctcctggtgttctgtaaaattctacacgtcatttcaggtatcactatccagaagacgttacttttgcctttgatgcactttaaaatgtgaagtctcttgtgaagctctttggttattttctcctttgctgctgaaataaattcaggttgatgattttcttgtaggatatgttgtgtgatctagacattgcaaacccaagtctttgatttttttttccctacagattgcctgtttcttttttattttaatttttattagttattattatttttgagatggagtctcactctgtcacccaggctggagtgcagaggtgtgatagctcactgcaacctccacctcccgggttcttgtgcctcagccacccaggtagctgggattacaggcacgtaccaccactctcagctaatttttttgtatttttagtagggatgggatttctccatgttggccaggctgatctcaaactcctgaccttaagtgatcttcctgccttggtctctgaaagtgttgggattacaggtgtgagccactgtgcctggccagttattaatttttttaaagagatggggtctcactatcttgcccaggctggagtgcagtggctctttacaggcactgttgtagtgcactgcagccttgaactcctgggctcaagtgatcctcctgagaggctggaattacaggcacacaccactgtgtccaacagattgcccatttgtgatctgtgtaaatatctctcacttcctgcagtatctctgctcaagaatgtaaagagatggataatatttttagatttgttgaaacaaagtaaagttctgctcaaatgagaatgacactaactaaatgaaaaggccggttataattctgtaattttgtgcctgcaatgtgtgtgttattgtacacttgaatcggccctgtgcattgtggcgaggtgcatattgcatggttgtattgaaaaggtgcttgggccgggcgtggtggctcacacctgtaatcccagcaatttgggaggctgaggcagctggattacctgaggttaggagttcaagaccagcctggccaacatggtgaaaccctgtttctagtaaaaaatacaaaaaattagctgggtgtggtggtgggtgcctgtaataccagctactagggaggctaaggcagggagaattgcttaaacctgggaggcagaggttgcagtgagctgagattgtgccactgcactccagcctgagtgtatcacaaaaaaaaaaaaaaaaggtttttgccctctctctgtgcctgctgctccctgttgagtcctataggcctgagctgccagggggtactgtgggctgagactggacattgcaaccgactgcaaggcaccgtgggacccaggttgtggatggactgtctctcgggctttcttctttccattcatcttcctcctctaactcccctctgtatccagtatccttgctctccatacacctgcttcattctttttccttcagtagatttttctgcttcttgacttacaaaccctacttctagcccctttcagatattgaaactagcaactttcaggctttgtaccaaagtctcagagattctcattgactcggatgccatccatctctagtccaaagaacaatgtcaaggacatgaacatgtggaacaaaagtgtctgctgtggacacctttggggagaaatagttttcagtgatgagggttgtagtgagttgggcagatatcccaaaaatatctgccaaaaactatagacacttctggttgcagtgacttattccttccttcattcagcaaatactgattgaacaccgactgtatgtctggatctattctaggttttgggggtggagcagtgaacaaatcagtctttatctttatagagtgtacagtcaagtgggagagacaggcagtaaacaaagaaacagttcaatattcaatctgtgagatggtgataagtgctacagagaaaacaaactagtgtaagataaaaagggtgttttgataggcctttactatttaggtctctttgataaggtggcatttgaacaaagctctgaaggaaataatggagccaaccatgcatataacctcagggagaacattctaggtagagggaacagcaagtgcaaaggccctgaagtgggggtttgtttaccttgttgcacaatctgcacacaggccagtacaattggaatggatgggaaatgtaaaagagagaagttgaaaaggccaggtgcagtggctcatgcctacaatcccagcattttgggaggctgaagtgggaggaatttgagatcagcctgggcaacagaaccagacctcgggctaatttttgtatttttagtagagacagggtttcaccatattggccaggctgatctcaaactcctgacctcaggtgatcctcctgcctcagcctcccaaagtgctaggattacaggtgtgagccatggcccccagccgtatctttgtcttaaaaagtaatctctgtgcttggtaggccaagaatttaaaatataaaaaatttaagaaagaaaaaaaataagtaaagtaactatacaggttggtctggccgtaatggtgagtgtcattatttttcttccctaggtattttggctctgttgctcagagcagtgcaggcgaaatggtcattagggcatcgtcatggtgcctggggatgcctggctcagccagtttattttctgtctgcctctctccttggtccttttcctccactttcattcatgaaattctagtcaagagctgggtccagtggttttcaatccaagggctttggaagcctctggggtctattttggtcattgcagtcactgggctgctgctcctggcatttaggttggcaggggtctgggctgggaagcaggaatgttcagtggccataaatgtaagggttggtcttacatttacataagggagacaatgaaaacttaactcctccacagtagtggagtagtgccgttgggtactcacagtcagtagtgccgttgggtactcacatgtacaacatggatcaggacattgactttctgtggataccttttaatagtttattagatgtgttaggctgttttgcactgctctaaaggaatatctgagtctaggtaatttataaagacaagaggtttaattggctcatggttctgaaggctgtacaagcatggctccagcatctgcttctggtgagggcctcaggaagcttccggtcatagtggaaggcaaaaggagggcagacgatcacatggccggagtggtggcaagggtggggtgggagccacgctctttttttaattttattttaatttgagacagtgtctcactcttttgcccagcctggagtgcagtggcgtgatctcagctcactgcagcctctgcctcccaggttcaagcaattctcctgcctcagcctcctgagtagttgggactacaggcgcgcatcacaatgcccagctgatttttgtatttttagcagagacagggtttcaccatgttggccaggctggtctcggactcctgatctcaagtaatccgcctgcctcggcctcccaaagtgctgggattacaggcatgagccactgcgcacggccaccacactgttttaaacaaccagattgcacgtgaacttagagtgagaactcactgtgaggatggcaccaaaacattcatgaaggatccaccaccttcctttaggccccacctccaacactggaggtcatatttcaacttgagatttggaggggacagacatccaaaccgtatcattaaatttaatagttttatgcagtttttttggctctagatctgtttagactcctgcagtcaggtgtctgtaactagcctctggtcctttttgagagttcacagtttggtgcaaaccctttggatgtattatttgggaaaatgggatatctggcagcctgtgtccctgctttacattatcctttttgctgcctgccccaagcctcctcattagcatccctgccaaggccagtggagaaggatggagatgcggtgacattcagcttgacaggtcattagcagcttttgtgccctagggactgctggtgggagggaggttgtggaagataaaccctgacaggaatgtattctcctcgagggcagggtttatttgatatttttctggagcttagaaccataagcctggtgctggggaggaagcgcccttagcatttggtagcctctgtgggcagagcatggaaagtcacaacttctgaattgtttgtattttcagtctcactctagatggatggcatcttctgctatgggaaatgaaatatgtttaggcaacttgagtcccaggtgcagatgaggctgggctaattggtgcactagggaaggagccgggggagagatgtgctgttagctattatcaatctgtgacaactgtcagctgctggcagttagcacccacctgagcctgggatgcaggggtgcctctcctgtcctctgtggaagcctctggacccagcagccatcttgactgtgcactgttcaagccccaagtccgcctggaagaggtgattgagaacttactgcaggataaggaaagcgcaggacaggtgcagtggctcacgcctgtaatctcagtgctttgggaggctgaggccggaggagggctggagtccttgagtgcgagaccagcctgggcaacatagtgagaccctgtctttacaaaaaggaaaagaattagccagatgtggtggtgcgtgcctgtagtcccagccactcaagaggctgaggtgcgaggatcacttgagcccaggagtttgaggttacagtgagctatgatcataccactgcattccagcctgggtgagagagcatgactctgtcccaacaacaaaaaaaaagattaagggaagcctctggcagacctgatgatgggtggcccagccaaaatgagtattgatgaggatttccctggtctggaactctgaatttagtctggcaaagtattccctttgtgttgtgagatgattcttggtgttaccccatcacggtaggtaagatgaattagcaaatgagaaaggctttctctttttcatccttatctagtccgtagatgaagcctgaagaaggtctccatatggtagtagtaagtgtttaacatctacctctaacacttgcctgtgtctttttttttttgcaaagcctcaggaatgccccagtatctaggtagaatttgataatatttcatttttgttatattcccttttctgtttaccttctatatacagcaaaatgaaaaaatttttaaaatttgtgcaagtaagggcaatttcttttttctttttctttttttttgagacagggtcttgctctggcacccaggctggagtgcagtgacacaatctcggctcactgcaacctctgcttcctgggtttaagcgattctcctgcctcaggcttccaagtagctgggattacaggtgcctgccaccactcccagctaattttcatatttttagtagagaccaggttttgccatgttgactgggctggtcttgaactcctgacctcaggtgatccatccaccttggcctcccaaagtgctgggattataggcttgagccactgggcctggctgaggcagtttctttttgaaatatattttgtgaaggagaaaaagaggagttcagtttaaagaaacaaatgacataagaggtggtatgcagagatgccaaagcatcttgaaggtgcttttttttttggaaacagagtcttgcttcattgcccagtctggtctgcagtggtgcaatcatggttccctgcagccttgaccttctgggctcaagtaatcctcccacctcagcctctcaagtagctgggactacagatgcatgccactatgtctggctaatctttaaattttttgtagaagccagctctcaccatattgcccaggctggtcttgacctcctgtcctcgagcaaaaataccgattttgattaagtctggggtaggacctggggctgggattctaaccagctcccaggtggtgctaatgctgctggtctacagaccacacgtggagtagccagtgtagagttcatgtagcaatagtgatgtcatagaaatagccagtatctgtatacttgctttgttgtatgtcacgcactgtatagtgatgtacatgcatctcatttgaccctcaccccgcccctttgggggtagaaaggattgtgctcatttcacactcaaggaaactgaggcacagacaggcaaagtagcttggcgaaacagaaaggaacttagaggcaggccctgattagctcagagactagaaggccttgtgcgtcatcctgaacagcttggacttgatcttgaaggtggagggagaaattgaagggtaattaaacaggaactgtaggaaattcaccttgcatagtgattgctttggccacgtgtgccctgccaccgcccccccacctcagtgaagtgtcatgcgaagttgggttcgtaaatgaaggcccgaatgctttcctgacaagtttgttttaaatcaagctgctaattagtcccagtccccctcccccggtatgtatttttttgttgatgtcgtttcacttcatttagttgaagtgattgattcagttcagtgtttgaacttctttttgaacctcaccttaataacctgtctaaacatcaaggttaaaccttcttgctaacacagcagtattgcttggtaagactggctcacagtccaaggaaatgcttgcccagagagggcaaactgccttaactccttaacctgagctcattaaaaaaaattcaaatgactgattccttgtcacagttctacctacattgtttttatttttgtccaggtttcagctagttaaatgcttttgtgatgagcttatgtccaggctgaaggttgcattttgaaactgagcgtcaaataccaatttaaagtccagacctttacacttgtgaaattcagataaatgaaatggaaataaaacagggctgctgtgttgtgaaatatgactgtgtttttccttgtaggactctttgagggtagccattttggcattttatatataaattttcttttcttagcctaccttttactttcttgatttgcctatttgtgatttcccattaaacactaggctttttgtaaaccaattatcccttgaaattgactttttttttttttgagacaggatcttgttttgccacacaggctggagtgccgtggctccatcatatgataaacagaaagagagagagagagagagagagagagagagagagagaccctgtcttatttaaaacaaaaaaagaagaagaaaaaaagaatatagatcacagctgttatttgtatatgctacgccaatccttgttgggtttcattctttataattgttatttttaaagatttttcttatgaatattctattgtttcattgtagaaaatttaagggagaacacagtgggaaaaaaaaaacaagaaaaggacttcataatcctgctaccctgggagaaaaaaaaaatcaccattacctatttggttcttctcccacttttttttttttcgagatggagtctccctttgttacccaggctggagggcagggacgtgatcttggctctctgcaacctctgcctcctgggttcaagcgattctcgtgcctcagcctcccgagtatctgggattacaggggtgtgccatcacacctggctaatttttgtatttttagtagagacggggttttgtcatgttggccaggctggtttgttggccatgtctggttttttgtcatattggccagtctgtttgtcatgtcaggctgacatgttttgtcatgttggccaggctggtctttaactcctgacttcaggtaatcctgaagtgctaggattataggcgtgagccattgcacctggccttctgccttttttttaaagaaaaaaaattaaaacatttttttctttttaagatagcgtctcattttgttgcccaggctggtcttgaactcctgggctcaagtgatcctccagcctcagcctctggagtagctgggactacagatgcacatcatggtgtccttatgccatttcttttgtacgtaggtgaatgcaagtgtatgattacatcatatgctattttggaggtttgactttcttttcactttcatcatctttccaaggtgttattttcctagtacatctttttaaatggacatagaacattcttttgtatgaacaaacaatagttttatttaggcggtcctttcctgttggacatttatattattttcagcatttctccacagttgttgcagcattcagatgaaccttctttttttttttttttgagacggagtctcgctctttcgcccaggctggagtgcagtggcacaatctctcctcaagtgattcctgtgtcaccctcccacgtagctgggattacaggtgcccatgtctggctaatttttgtgtttttggtagagctgtggttttaccatgttggccaggctggtttcgaactcctgccctgaagtgatctgcccacctcagcctcccaaagtgtggggattacaggtgtaagccatcacgcctgacccagatgaacattcttgtagctatcgcacacaattctgaacatttcctaggatgaattccttaaagaagtaatgctgatccaggcttttttctttttctgtgactctttgacacgtaataatattgacttttctttctttccagacactacaacaacaggagtgcaaacttctctacagccgaaaagagggtcaaaggcaagaaaacaaaaacaaaaatagatataaaaacatcctgccctgtaagtatcaatattccgctcagtaatagtcactcttggagattttgattcctagcacctctgtacctttcctcagggtcgtgtgctcttgttagcacatcggaggccttagcttctttaattgcaagcagtttccaaaataatcaaccatggtgggtgttgatgacttcattcactgagctcccgtgatgctgattactgagtaaagttgccactaggtggctttgtctgtggttggttccttctgttaattaattttctgtctgcccaagatagatcatctcaaggcttgggatctctcagtgtcagggaccttagggtgccagatttgtgtcttgactcctcctcactgggcctgtgagtcctgggtaaggcctgcctcctttctgggactcagttcccttaagtgggaaacagacaaacacctcctgagggctcctagaactgttctgcttgctgatcccctgagctcaagttactggagaaagggtatatacctaaactgctcagaagaagactttgtgggccgggcgcagtggctcacacctgtaatcccagcactttcggaggccgaggcaagcggatcacctctgatcaggagttcaagaccagcctggccaacatggtgaaaccccatctctactaaaaatacaaaaattagccatatgtggtggtgtgcgcctgtaatcccagctactcgggaggctgaggcgggaaattggttgaacccaggagatggaggttgcagtgagccgagatgtgccattgcactccagcctgggtgacaagagcaaaactccgtctcaaaaaaaaaaaaggaagactttgtgaatattcgcaaagctgtaaagctgtacctttcaatttttttttgagacatagtctcactctgttgctcagggtgcagtcacagctcactgtagcctcaacctcctgggctcaagcgattctcccacctcagcctcctgattagctgggacaataggcaggcaccagtacacctggttgattttacagtttttctgtaggccggcgcagtggcttacgcctgtaatcccagcaccctgggaggccgaggtgggcggatcacctgaggttaggagttcgagagtagcctggccaacatggtgaaaccccatctctattaaaaattacaaaaattagctgggcgtggtggtggatgcctgtaatcccagctacttgggaggctgaggctgaggcaggagaatcgcttgaacctgggaggcggaggttgcaatgagccggaggtgctatgtgcaccactgcactccaggctgggcgacagagtgagactctgtctcaaaacaaaaaacgatttaaaaaataataaaattttttctagggcggggtctccctatgttgcccaggctggtcttgaactcctgggctcaagtagtcctcctgcctcagcctcccaaactgttgggattaccagtgcaagccattgtgcctggctgtaccttctgtaacacccaaatgccacctggcaaagcccaagttgaatcatgaggaaaaaaggcctggaaggatgtagaccttccttttttctacttatttatttatttatttttgagatagggtcttactctgttgcccaggctggagtgcagtggcatgatcatgggtcactgcagcctcaacctcccgggctcaagtggtccttcccaccccagcctgcaatgtagctgggactacaggcatgtgctaccatgcccagctaatttttgtattttttgtaattattttttttgtagagacagggtttcgtcatgttgcctaggctggtctcgaattcctgggctcaaacgatctgcctgcatcggcctcccaaagtgttgggattacaggtgtgaaccactgtgtctggctatatcttctgtaacacccaaatgccaccaggcaaagcccaagttgaaccaggagggaaaaaggcctggcaggatgtaggccttgcatgaggatctcagaaactgcactaaaccagtcacagttcctctctcccgaggtctaactctatgctgaactctttgcatttttatctcacttaatccatatcacatgcacaggaaggaagcattcgtagtatcctggtttcctagaccattttagcaaggttataagtgaaggggagtgggtgggagaactggcactagagcccccaaagtcactgttcttagcaccactctaatgcatggggttctccattgatgtgctatgcaaggcagtgcactgaggagaaaggaaggaacatttacaacttctctttatttatatcctgtccctaaaaaaaaaagaaaaagaaaaatttgtctgaggcctagattgattgcagggagtgcataatgttttattgattgattgattgattgtatatagagatggggggtctcactatattgcccaggctgatctcgaactcctaggctcaagcaatcctcctgctttggcttcccaaagtgctgggattacaggcatgagcgactgcacctggctatgcatactatatttatccaacttacaaataaggcttgcttgcctgtagtgcatatgtgtatacatttcagcatagaaaaactgtgtgattgggggttgtgatcaaatttggagagcattgctctcatgtcttatcaggtcagagtcattttgtcaaatcttgtaaaccattctttgtgtgtgtctatgcatgaaacatagtctttctctttctgcatgcatatgtacatatacatggtatatatgtatatcatatctacatggatattgtaatgtatatgtatgaggatgggggaaagtggagacatttgtaatactgagaaaaggcagtgaggaatttgcagagaagcagtttgagctgtagcatggtactagtgaccttgaggaagccttatcctttttttttggaatttattttttcaatttttagaaatagacaagagtttctctatgttgcccaggctggtcttgacctcctgggcccaaactatcctcctgccttggcttcccaaagtgccaggattacaggtgtggaccaccatgcctggccaccttgtcctttctatgtctaagttgtgacatctgctcaggggtcaggtggtattaaatggtataaaatgtatgggaaagtgaagggatcaatggtatgcagtatctaaatagaatatcgctttttcctcccttaaaggtctcattcagatgtttcctctgatgaacatctcatttccttaaagatgaggagtctgaagcaaaaaagacattattcttttaagacacatggctgtcttactaattcccattgcaaaatatgttgtttaggtagagcactcagatttttatacgaataatagacttttgtacagaatttggacagttgatactatcagagccttgtgatattccactgcattatgcttcactaaaaaatacctggctgggtgcggtggctcacaactgtaatcccagcactttgggaggctgaggtgggcagatcacctgaggtcaggagttcaagatcagcctggctaacatggcaaaaccccatctctactaaaaatacaaaaattagccagatgtggtggcacgctcctgtaatcccagttactcaggaggctgaggtatgagaattgcttgagcccaggaggcagaggttgcagagagccgagatagtgctattgcactccaacctgggtgacagaggaaaaccctgtctcaaaaaataaatttaaaacaacaacaacaacaacaacaaaaacccctctttattatggaaattttcaaatatattcaagagcataaagaacccacatgtacccatcacccagcttcaacaattatcaactcatgcccagtcttggtttcatctatactctgatccacatctcctctctccttgaattattttgaagcccatctcagacatcatgtcatatatgtatacttcaatcttctttttttttaaaactccccctccccttttcttttttcttgagactgtgtctcactctgtcatccaggctggagtgatcttggctcactgcaatgtccgcctctcgggttcaagcgatttttgtacctcagcctccctagtagctaggattacagatgtggaccaacatgcctggctaatttttgtatttttaatagagacagggttttgtcatgttggccaggctggtcttgacctcctgacctcatatgatccacctgccttggcctcccaaagtgctgaaattataggccactgcgcccagcccaaaatttcttggtttgaaataattttggaactcataagaagttacacatatagtagagagaattttcttgtaccttctctgagcttcctatatacccaatgataacatcctatatacccatagtatatgatcaaaactaggaaattgtgaagatggcattttgagacatcaggcagtgttcacgttactgttttgcttacctgggctttaatttttatgtgtttttttttcaatcattgaatgaacaaaacttggactaggctggggagtaactgatttgaactgttttttcctgaagcagtccaggacttatgtgaccgtggtctctttttcttctagttgatcataccagggttgtcctacacgatggtgatcccaatgagcctgtttcagattacatcaatgcaaatatcatcatggtaagctttgcttttcacagtgttttctgaccatacatttctagcctatttttgtattttaaatccttcctcatgtcctgaaagtaactttaaggtgtttgaaggattttcttcctaaatttctagcctgaatttgaaaccaagtgcaacaattcaaagcccaaaaagagttacattgccacacaaggctgcctgcaaaacacggtgaatgacttttggcggatggtgttccaagaaaactcccgagtgattgtcatgacaacgaaagaagtggagagaggaaaggtaaatcacagaaacttcttttctgctaaactgtttttaaagtatcagacatgtcagattggccatgtttaggaattgaataaatgaattaagcttactgtaactgattctctggaaaaaagggactaggagaaatttgattatgttattccttggtgtagttttctttatgtttcttctgcttgggatttgttgagcttcttggctccatggatttgtagttttccttaaatttggataatgttcagtcttagtttcttcagatacatatcctgggctgggcatggtggctcatgcctgtagtcccagcactgtggggtgttgaggtgggcggatcacttgaggtcaggagtttgagaccagcctgggcaatgtagtaagaccccatctcttaaaaaaaaaaaatgtaccctgcacaaccttgtcctaggacagcagtcatacgtgtattagactacttgaagttgtctcatagcccactgatacttggtttattttattcagttttttctccccgtgtttcatttcgaatagcttcttttgctatgtctccaagttaatcttctgcaatatgtcatccgctcttaatcctatccagagtatttttcatcacagacattgtatttttcatctctagaagtgttaatgtcatctatagctttccttttaacatgtgtagcattttccttaccttttgaatgtatggagtatttctgttgttgttttttgttttgtagagacagggtctcggtctgttgcccaggccggagtgcagtggcatgatctcagctcactgcagcctctgcctcccggttcaaatgattctcatgcctcagcctcccaagtagctgggactacaggtgcgtgccaccacgcctggctaatttttgtatttttagtagagatggggttttgccatgttggccaggctggttttggaacccctgagcttaggtgatccaccttccttgacctcccaaagtgttgggattataggtgtgagccaccatgcctggccatgttgtctgttttaattaactctgcctaactgtcctcccaaatggttgctgcagtgctcactcccaccagcagcacctgcctaggactcattactccatactcttcaagacacttcagattaaaaaaataaattgtaacaccccacacctacagaagagcggacagatcttattgagtgacagccctctgtgttatctcaaagtgagcccaccatggtggttttttttttaaatatggaaaagttctgtgtttttgtttgtgttctagtgaaagttcttttttagatatcctttaattggtttatataagattttatgtggaatgtagcagtcatacctataaattaaacctaaggcagatggagaactttggagttgagccttcctactgtaattttcatattggatgtgaagggcagtgtgattttcataagactttcattgttgtactcctagttggtatacttctgaatacctttgaggccagttctggtcatcgtgaaacaaaggtttccttcagcaaatgcctgtggtaacattaggtgttcttgaattaatggaccaatgaaaacatctttgtagtttctgcttcaggcaagggttttttgccctaaatgtggataggaagaatgaagcccttcatcctcctttttgcctgattatagctataggaggttcacctgttctcagaagacatgaggattgtgaagagaggggtcttgtgttgcttcagaggaatcagtatcagtccctttcagaagctctcctggatagacaggcattagggccaaatcactctgccccacccctcaccaccatgtcctactctctgctccctgtctcattcttcctctttactttggtggtgccgagaggatgacatgatgggtattgattctctccacagacctttctgacatcctactttcagtatccccccagtgcacagaagacaagccagactgtggactgtgtttgattcctgggctctattttaaaagacagtgtattagttctcacattttagaatttgtttgccaaggtttccacgggagtttagaaactagggggagggctgatgtttaaagttagctaaaatgttcttttcagggtcatgatttaattttatattctctggtgagttccctatagtgactgggagcagtcctcagtcttgattggccagtgacagcatagagtacaattaatattaggagtgctcatttggggaaactaaaatttgcatcaaatctgtcagaggtgtttggatctacaaaataccggagggaaagctgaattgagaatcataataaataaaagaccacatcgttcttttttttttttttttttgggactgtatcttgctctgtcactcaggctgcagtgcagtggcactatcttggatcactgcaggctccgcctcccggattcaagcgattttcctgcctcagtgcctgagtagctgggattacaggcgtgtgccactacacctggctaatttttgtaattttagtagagacaggtttcaccatgttggccaggctggtctcaaactcctggcctcaagtgatccacccggcttcccaaagtgctgggattacaggcgtgagccactgcgcccaaccaagaccacatccttttattgaacgttcctcctaccatgttttcttttttctttcaattaatcattgactcattgactctcactgttgatgtctgtagctgctctcttatttccagttttatagctgtaaatttctctgtcttcctaagatacaaggtaaatttctcttgctgatattggtggttttggaaagtgagtggtgtggatgactgcccagaaaacaacagaacacaaaagcattctctgcccagaacacatcaccaaatagatacaaactcatctcttactgagtgaaatagcttcctttttggcagcaagaatgattttcttggtgccatatttttcaatccgcctgctcttgaagccagcagctattgcagacttggcattcccaggcacccagttaagggaaagtgacgtgtagaggaggtatcagatgggtctggatatagaaaaagcagctggttcaaaaccccatgggctgcctttctgtgatagagttattcacacttgggttagataaggcacagagtcctcctacactggtgcggaaatgaaacagacagtctggctcgttgggcagcctagcctcctccagaatctgtgcttgccttccctatggagtgactggtagatcttagaattcagacctcagtggttgctagccagcactctcacattggttggtccttctctctgcatctttgattctttagagatagataaaccaagcaccgactctcctttgacatgtgcttggaacagacacctgcacgagctgcctttctcctcccacttctgcctggtcttccaaacacctgcttttcttgtttgaactcttcctttttttttgagacagaacctctctctgtcacccaggctggagtgcagtggcatgatctcagctcactgcaacctctgcctcccaggttcaaataattctcctgcctcagcctcccaagtagctgggattacaggtgcctgctatcacgcctggctaatttttgtatttttagtagagacacggtttcaccatttggccaggttggtctcaaacctctggtctcaagtgatctgcccgcctcggccacccgaactgctgggattacaggcatgagccactgcgccccagctgattctttacagataaacaaacattgactctgctttgacatgtgcttggatcaggtaactgcaccagctgcctttctcctcccacttctgcctggtcctccgaatgcctgcttttcttatttgaactcttctgtccttttctgaaaacctaacagatgcgaaacaggccattttccatgttggtggttattaagcaagacttgaacatttgtttgttgcttgtttaggcttttatttcagagttcacagaattaactttctttttttctgatctcttccagagtaaatgtgtcaaatactggcctgatgagtatgctctaaaagaatatggcgtcatgcgtgttaggaacgtcaaagaaagcgccgctcatgactatacgctaagagaacttaaactttcaaaggttggacaagtaagtatattgtcgtattctagagactttgggaactgttgatggtgtgtaggaattcagggtcttgccgttactcatgtttgcatacatgcatgcattcgctcactcattgattcagtagccatttattagcttccttctatgtgccaggtacagtttaagcagtactggtacattgtgaacaaggcaggtagtgttcctgccctcatcgagcctagggagatagacaatttaaaaacaaataactggccaggcgccgtggctcaggcctgtaatcccagcactttgggaggctgaggtgggtggatcgcttgagccggggagttcgagaccagccctgggtgggagactgggatagggtgacctgagtggctacaaggtctgttaggaggcctccgcaggggcctatgttgatggcctcctctccaagtatccacagacttcagcagttgttcttttttgttccttcctttggaatggaatattatataaaatggcagaataaactggaagagaagcagtagatgtgagaggtgccggggggtgaagtctgcaggatgtggggattgtttggcttttggaggaggaaggagggattcaagacacattgtagaggtttgagtctgagcggacagtggtgctgtggcagacaccacaaaagctggaaggagaactgatgtgggcagtgatttgttttcttctggatgtgttcagctgggcatctgaacagtcatgtggacattcatctattcattcagagatatttgttcaatgacctcttggttcctggcaccatgctgcttgctggagatagagctggggaacaaaacagatggaatccctgcactcccaagtgtacactatactggccagtaatctaccagcccagtaattgcacatataaatatatcattataaactgtaatcagggctagaaagaaaaaatgcaggagtttagggttcatttggagggggaagggacttttttttttttttttttgaaacagaatcttgttctgtcacccagactggagtgcactggtgcattcacggctcactgcagccacaacctcctaagctcaagtgatcctctcacctcagcctcccatgtagctgggggctacaggtgtgtgccaccatgcccacccaattgttaaattttttatagagacggttgtctcattatgttgcccaggctggtcttgaactcctgggcttaagcgatcctgctgccacatgcagcctcccaaggtgctggaattacaggcgtgagccagcgcacccggccaagggaggggaggttcttaaggcatagggaacaatgtgtttgagtcagcaaaggaggttgtgggggtttgtcctaagtgtggtaagcagccagagttggatttaagtttttaagagattcccctccaccctgtagagactggagggggcaggagttgttctagggattaggaccaatttggaggtagtgcagccgtcagagtaaaaaataatagggattgaactaggccagtgcccagggtgcctgaaagaagaggacccagtagagctgactggaggcagacatgcagggattcagtgaaggagtgtaccaagggcgagggtggtgtgcagggtgactggcaattttctagcttgagaaaggtccggggggatggcagtggagttgaggaagctgggaggatcaaggacctttttgtgaacacacaaagtttgagatgccttggacacattgaagtggagcggtcagggaggcaagggtggaggtgggatgcggaggggaggtgggatgcagagcgtcgtggatggatcagttttgctcgatagagggacatgtttttctgtggcaacaggagggcaaaaggagaaggtggccacagatgccggtagatgagctgagagtgattgtattccctatcctctcggaagcttgaggcaaggccatcaacagacaatcagagggaataagaagagatagaatatatgaagaaagggagaaaagatgaaatcgtaattgtgtagcagggcaagaagtccagaaatttctgtgctgtgccaagttcccagttgaggcggtgaacatgaaaatatactgatacccattgcctggtttttctccaaggacacttggctcctagggcacaaaacagaaagtacgtggtttgtccaggccgagggctttgcatagttgcagtggatggagaggaggtcaaggaatggaggcacatggtagagagagactgtccccagagcacggggactcctggccggatgagggggacaggggcaggaggaggcaggtggaaagtagagggagggctcagtggtctggaggctacaggaagtgacggggggaccagaaggagctggaaaccagtgtggttgtggcccagggtgggatgtttggatttctgatgtcagagagggtccagtccttctgatgatggggaggggtggaggctgaatctatggtagagatagtgagaggaactggaacaatgtagctgtcaagtggaaatgggagaaagggctgggcgtggtggctcacgcctgtaatcccagcatattgggaggctgaggcaagaggatcgtgttagctcaggagttctgggctgcattgagctgtgattgtgccactgcactccagccttggcaacagagtgcccagttaaaaataaaaataaaataaaataaaaaaattaaaaaaaaaagaagaagaaaaaagagaaaagtgtccttttacatcccttttaaaaatgtcacttaaggctgggcaaagtggctcatgcctgtaatccctgcactttgggaggctgaagtgggtggattacttgaggtcaggagtacaagaccagcctggccaacatggcgaaactccttctctactaaaattagctggatgtggtacatgcctgtagtcccagctactcgggagtcgagtctgaggcccaagaattgcttgaatcggggaggcgtaggttgcagtgagctgtgatcaggtcactgtgcaccagcctggatgacagagtgagactctgtctcaaaaaaaaaagtcacttagcttagattgtctctacatatataggaagaagatgtaggaatgaatggtgctgctacaattacgtcatctggatagacccagaaacatgatactttttggttttctgtagccttggtgccattgttgatctttattaattatcattatcctcaaaatagccataatgtgctgagtctcttcctatttgctgggcagaggctgagtatttcagcgagctcactgagtccttaaaattgcattatgatagagagaaagagattattatttgcattttgcaaaatgaagaaattgaggtttagagatacccaagggccacgtgagtgtgagtgcctggaattggagcctaaatctagtcatctgatagcaaagcctgttttcttatctgctttgcattaaatataagtttaaaatagaacaatactggccaggctgggtggctcacgcctgtaatcccagcactttgggaggtcgaggcaggcagatcacctgaggtcaggagtttgcaaccagcctggccaatatggcgaaagaaaccccatcgctactaaaaatacaaaaattagccaggcatggtgatgtgtgcctgtaatcccagctacttgggaggctgaggcaggagaatggcttgaacccgggaggcagaggttgcagtgagccaagatcacgccactgcactccagcctgggcaacagagtaagactctgtcttggaaaaaaaaaaaaaaaagaatgatactatagtctgtgtttatatggtggggaaggttgagtatcaaaaaaataacaaagaggaatgaatgtcttaagtgaatgcctgtttccccatctgcttcctcttctgctgggaggagagacctggatccctagaggtttcagttgcctccagagctgagtgccacagggatgcaggggaatagggatgttacctgtcgctggtaattcagagagatgattcagggtatagttacctgaaagaacaaattgccatgccagacgtcttggttcttatgacagaggcaaagagttgcctccaggattgcccaaaaggagacgagttctgggaacctcacgaagaggacctttcagtggaacctggggagattctcttcctctccattggatttaggaaagcttagaaccgggtgattcctcaacctcttgatttatttaattcttttctggtttttcttggctctactccaggggaatacggagagaacggtctggcaataccactttcggacctggccggaccacggcgtgcccagcgaccctgggggcgtgctggacttcctggaggaggtgcaccataagcaggagagcatcatggatgcagggccggtcgtggtgcactgcaggtgacagctcctgctgcccctctaggccacagcctgtccctgtctcctagcgcccagggcttgcttttacctacccactcctagctctttaactgtaggaagaatttaatatctgtttgaggcatagagcaactgcattgagggacattttgatcccaaggcatatttctcctagaccctacagcactgccattggccatggccatggcaacatgctcagttaaaacagcaaagactaagtcagcattatctctgagtccaccagaagttgtgcattaaacaacttcatcctggctctgcagtttctccttattcttcatgatgtttgctttgtagctgttgactgctttgtaggtattgaggtggtgggggtgtggtggaaataggcctgactcttgaggatcccttaagtcatttttgcttggttctctttttccttcttttcttctactcttctatgattcatctctttgattgtgattctgttctctctctctctctctcttttttttttttcgtttttgagacagagtcttgttttgttgcccaggctagagtgcagtggtgccatcttggctcactgcaacctccgcctcccgggttcaggccattctcctgcctcagcctcccaagtagctgggattacaggcatctgacactacgcccggctaatttttgtattttaatagagacaaggttttgtcatgttggccaggctggtctcgaacccttgacctcaggtgatccacctgccttgtccttccaaagtgctgggattacaggtatgagctaccatgcccggcccattctgttctcttctaccataaatatatttctcccctaacactatatttgtttgcttcacaagattccagctgcttttccaccaaggcctttgatggaagctgtgctgtgacctctgtaatgagtctgtgggctgctgattctccagtttgggcttcatgattatactggggaatattgggtttcctaaatctcattcatttcttgggcaagtagatatatgtgaaagtgtttatttgtccagttgttaaagaagctaccatttattgagccagcctctgagcacaatgttttttgttttgttttgtttttaatttttaaaattatttacttcttctatttcaataactttattattattattttttgagacagagtctcactctgtcacccaggctagagtgcaattgagcgatcttagctcactgcaacctctgctttctgggttcaagcaattctcatgtctcagcctcccgagtagctgggattactggtacgtgacaacatgcctggctaatttttgtgtttttagtagagacgaggttttgctatgttggccaggctggtctggaactcctggccccaagtgatcctcctgcctcggcctcccaaagtgctggtattataggtgagagccactgcgcccggccctctttcagtaattttgatgtatttttttgtatatgattcctgtttcattctgtccaaccagcactctgtatggtatgtgctgttgtccccatttcacagatgcagaaattaagggtcagagaggttaagggacttacctcaggcacgttgtactggagaagctgaactccaagagcaggtttgggctgactccaaagccctatgctttttgccaacatattttcaaacataaatagacaattttataaatagctccaaagagtagacattgtttctgttgatattaatggcttggttttgagtctgaaacccccatgaatgattctgttgtccctgctttttgtccttctgcccgcagtgctggaattggccggacagggacgttcattgtgattgatattcttattgacatcatcagagagaaaggtgggtcatctggtgggcaagaagcgacagtttctgtttttagtttatggaaggaaagtgctcacgaaaacagtctggggaagagaggttgaatgggaaaattctttcacaaaaatctgggctgaagacttcagtgtgtctgcctgagaacagaagtgacactatttgagcttttggcataaaatgaagtctaggagctgcagaacccactgccatggccttttgttgcatacacagtggtggtctctatccagccacctgaccttgtttacagtatggggtgatttgttggcaagtgagggaatcctgacttctgccacttcgttatttatgtagtcttctgggatcattggtattggtcagaagttcaacactgtagccattgcaacatgctcagttaaaacagcaaagactaaattagcattgtctctgagtccactaaaagttgtgcattaaacaacttcatcctggctctgcagtttctctttattcttcatgatgtttccttcgtaggtgttgactgcgatattgacgttcccaaaaccatccagatggtgcggtctcagaggtcagggatggtccagacagaagcacagtaccgatttatctatatggcggtccagcattatattgaaacactacagcgcaggattgaagaagagcaggtaccagcctgagggctggcatgcggattctcattctcttgctaggcctcttggatacgctctccttttgagcaggaggacaggctctgatagacaactgtttgatttcggaatgggaaacaaactcccaactaaaagggcctctggaaactgtcaattattctccacttctcagctctgatttttcactgcagaggagcttagggaagggcaccatcctatcagcctggcctgccagattgaagaactgccatgcagaaaggttctgatgttctcaggctcatgtggcaagcgtaaaactcaaagccttgaagtttctagcctgttccagccttgatccaggccatgtttatcctgattccatcctttaaaacgaatgcctcactcttaatagcgcacggcagtttgaaccactaatttggtcgagttggaaacagtgaaatttcaattttaataagctgtgcataatgaagaggaatgtggaattggagcctttccatctgaagctattcataacaggcacaaagctgagttaattaggaatatgctgagatgaaggaaatgaggagagctgctcttttgggggctgtgcttctctccccaacccctcaaccccattgccatgctgcagatggggtggtgtctaaacatcagtggcgagtgcctgcattactctgctcgttgccttccagagaactcagcttctccaaatgctgagctcttttcagaatgggacctgccaccagtatttgaaagatttctagcctagcagaacagcagccacgttatcaaagtttggttggccaaaggaaggtacttgctaattagtttagtaggttttcagtccgcacagacatacgggattgttttattgtacatagacatcttcagaaacagtgtatgtatagaaatgtaaggtcaaaatttgaacctcagtgctttaaatctgaatttgtattaactgatatgaaatatttagacggttactttattttatatctgtcttccattatacttaatttggctcaagaatagttaggcaaaaagttgcccaaagagaaggatctcctagtaaatacaaagagaatgtaacatagttgctacaagttggagcatgttcagggatgtctttttttttttttttttttgagagagaggtctctctctgttgcccaggctggagtgcagtggtgtaatcatggctcactgcagcctcaatctcccaggcttaagcgatcctcccacctcagcctcccaagtagctgggactataggcatgcgccaccacacctagctaattttcgcattttttgtagtgtcacagtttcgccatgttgcccaggctagtctcgaattcctaggctcaagcagtgcttctgcctcagcctctctgagtagttaggactacaaatttgtggctccatgcccggctaatttttttatctttattttgtagagacaaggtctcactgtgttgcccaggctagtcttgaactcctgggctcaaacaaccctcccactttgggtttccaaagtgctgggattacaagtgtgagccactgagcccagtgacctctgggttttaaaaatgtgtaggcttcaattatttattttaaaaaatgaaatcctgcaatatatagttttctgcgttgtgtggtttgaatcaatctgggaactggcttgctggctgattgtggtaaagtaagaagtacttaatttagtagaaagtttaaatggcagacataacattaaacccagctgatttataaatgaagcaaaagaacaaaactcattcaggataattggttattctaaaatacagtcatttctaaaattatgaagtgttcaggacctttgggagtgaaagaatttgctaaagaaggatcagtgaaaaaaaggaatgatgggtgaagagctgtggagaaggaagagaagaaacagcacaaggaaggaagaatataaaatcagatgtgggaatccaggggaaagtgcaaacgaagcaagattgagaaaattctcaagtttttataaacagttctcacactctgccagttccttggaggtagacttttttgttaacttccaactacagtagtgaaaaaaaaaaaaaaaccctcaaatttgcaaaagcagtctgtggaattttctttacccagctttcctgactgttaactttttagcacacttaactttatcattcgtttattctctctgtttaaaattaaaaatgtaaattttaaaaagtaaaatgtttgttggttacaaacatttatacccctttgtctctaaatatcatttcattttaaaaaatgaataatctaagcctacacattctaaaatgtgtatattttctaaaaataagggcattctcttacataaccaatgtcacaattatttgatacagtgatcaaaatcaggaaactaacattgatataacactattatctaacctacagaccatcttcaaattttgtcctgctagtatcttttatgggtccagggtcacacagtgcatttggctataatgtatcttttttctctttttttgagacagggtctcactttgttgcccaggttggagtgcagtggtgcaattatggctcacggcagccttgacctccttgggctcaggtgatcctcccacctcagcctctcgagtagctggagaccacaggtgtgcaccaccatgcctggctaagttttgtattttttgtagagatggagcttcgccgtgttgccccggctggccttgaactcctgggctcaagtgaccctcccgccttggcctcccaaagtgctgggattacaggcgtgagtcaccacacctggccagttattagtatgtttagtctctttaatctggaacagtttctcagtcattctttatttttcatgacctggatgtttttgaagagtttaggccagctatttagcagaatgcctttcagtttggatttgtccagtgttttctcttgactatattctagtcatgcatttttggcaggactgtcacagaaatgttgttgtagtcttcttagtacatcacatcaggtacacactgttgatctgattcattactagtggtgttaactttgatcacttgaataaggtggtgtctgtcaaatttgtccaccgtaaagttacttgagcaaaacgtagctgggactacaggcgtagcaaaaaatgtagcaaaaagtagtatttttgctacattttttttttaggaacaaagtatttttcccttttaagttaatctcttgtccataaagttattatttttcccttttaagttaatatcttgtgggtagatactggagactgcgtaaattacctatttctcataatactttttttttttttgagatggagtctcgcaccgtctcccaggctggagtgcagtggtgcaatctcgggtcactgcaagctccacctcccgggttgacgccattctcctgcctcagcctcccaagtagttgggactacaggcgcccgccatcacacctggctaattttttgtatttttagtagagacggggtctcaccgtgttagccaggatggtcttgatctcctgaccttgtgatctgcccgccttggcctcccaaagtgctgggattacagatgtgagtcactgcgcccggctctcataatactttttgcctactaattttatattcattgattaaattcttgcctgaaaaaattattactgtggtatttgccaaatggcaattttctgtttccatcattgcctttcccccgcttttaaaagtataagtgacaaagaaaaactgtatataaagtgtacaccatgatattttgatatatgtatactttgtgaaatgattatcaaaattgagttaaataatgcatccaacatctcagttacttttttttttttttgagacagagtcttggtttgtcactaaggctggagtgcagtgccacaatctcggctcattacaacctccacctcccaggttcaagtgattctcctgccttggcctccccagtagctgggattacaggtgcccaccatcacacccggctaatttttgtatttttagtagaggtggggtttcactacgttggccaggctggtctcgaactcctgacctcaaatgatcctcccgtctcagctttccaaagtggtgggattacaggcgtgagccactgtgcccggccactcttagtaaattttaagtgtacatttttttttttttttttttgagatggagtctcactttgtcaccctggctggagtgcagtggcatgatcttgccacactggaacctctgcctcctgggttcattcaggtgcttctcccacctcagcctcccaagtagctgagactacaggtacccgccaccatgcctggctaattattgtatttttagtagagatgggggttcaccatgttagccaggctggcctcaaactcctgacctcaggtgatctacccacctcggcctcccaaagtactgagattacaggcatgagccaccacacccagccacattacgttagtattaactataatcaccatgctgtacattagatctccaaaatgtattcatcttatgtaacttcaagtttgtaccctttgaccaaagtctccttgttttccctacccccaacccctggtaatcactgctttaatctcagtttttatgagtttgactggtttagattccacatacaaatgagatcaggcagtgatggtttatttcacttagcataatgtcatccatgttcttgcaaatgacaggattttcttctttttaaaactaatatccatgctggacacggtggctcatgcctgtaatcccagcactttggaaggctgaggagggtggatcacttgaggtcaggagttcgagaccagcctggccaacatggtgaaaccccatctctaccaaaaatataaaaaattagctggatgtggtggcgcacacctgtgatcccagctacttgggacactgaggcaggaggatcgcttgaacccgggaggcggaggttgcagtgagccaagatggtgccactgcactttagcctggatgttgatgttgttccacttgtttatttttattttgttccctgtgcttttggtatcaaatcctaaaaaccattgccatgaccattgtcatgttactttccccatatgctttcttctagaacttttaaggttcatcattcccttttctgtttttagttgcaagcctactataaggaagggcttttctttcttccttatttatttattcatgtctatcagaatgggcaccttactactatttttgttgttattgcttgaattgacttgaatttggctagtggaaaccttttcagatcgggtactctgtccttttgatctctttccattttcaagcacttctttagacttaagatggtctaggctcatcttctcctttcccagccatttttcaaaggaacctgattccttttagtgaagagcagtattttgaaaccaagatctgggcactgggtctacttgtttgtactggtacagtgttctttgaattgctaattagctgatcaattactgctctatttgagttccctctttctaaaacctcacatatgtgtacagacggtccctgacttatgatggttcgacttatgatttttgattttatgatggtttgagagcaatacatccattctgtttttcacttttcattcaacactttattttaaaatagggattgtgagatgatattgcccacgtgtaggctaatgtaagtgttctgagcacgtttaaagtaggctaggctaagctgtggtgtttggtaggttagatatgttaaatgcattttcgactagtgatattttcaacttatgatgagtttattgggatgtatccccataaagtcgaggagcattatacatatctctgtataacagagtgagttccttatacctttcatccactttcccctgaagttaacattttacctaaccatgatacatttatcaaaactaaaacattaacatcaatacattgctattaactaaactagagtttaattggattttgccagttttccaatgaatatcctttttctgttccttgatccaattcatggtcacacactgagtttggtcacttgtcactgtagtcttctccaatctgcgacagcttcttaggctttccttgtttttcatgtactcttgacgatttttaagagtactggtcagatatcttgtaggatatcccacaacttgtgtttaatcttatgttttctcatgattagacttgagtaatggatttttgggaagaataccacagaggtatattgttaagtgttctcatcacttggaggtaaatgttatcaacatggcctggtgatgttaaacttgtcagtttgtttagttagtatctgccagatttttctcactgcataattacaaatcctccttaacttatgatggggttacagcctgataagcccatcataaattgaaaatatcataagtcaaaaatgcatttaatgcatctaaactactaaacatcacagcttagcctagcctgccttgaacgtattcaggacacttacattagcctacagttgggcaaaatcatctcatgggaagcctgttttataatgtgttgcatatcttatgtaatgtgttgagtactgtactcagaatgaaaaacagaagggttgtattgcttttgcaccatcataaaatcaaaaaaaccataaggcaaaccatcatgaagttggggactgcctgtacttttttcctctttccctgttcaattccttggaagaaagtcatttagttcagaccatactcaagaaaagggaaataaagctccatctcttggagcttaattgaaactggaatgactagtttctatatacattatttagaatccttttgtaagaaagatttgttccttctctccatttatttattccattatttatattgatagagacgcatgtacatttattttatactttgggttataatctatttttcttgctcaaattgttacagctttggtcactgggaggttcttcagattggctcctgtgtcatttgacatgtccccaccctctcgtttctgagtacttctctactttggcattacaaaagatgttccaggctcctcttatatttttccctgccgcagccctagaatcatccatttttctatggtgccctggttccttttactttagatgggggtttagaaaccaatctgggtgttgggtgtgctcattgctactggaatcactgcttctaggccctctcagcagatagagctagaaaacatatggctgtatatgaatccatggattcatatatatctataattgttttctgtatctggccatctatatatatattaagctaaacatgaattcatactgatgtctcagactcgaatccattgccgcagggctcattcttgccttcctcttgcttatttgtgacttctttctctaacagggagaaaccccagtctcattatcaccaacctatctactcatttgttcaaccctggtataggtgtaaagtagtttcagaattactaacctatacccatgtgagaattgtatttgcacttcttgtttgaaggaaatacatacaacacaggtagcgtctctacacttcagtatacagagatctgaacagtgttctctctgagtgaatcatattgcaggacagaaattacttttaaaaattctgtaatgggtcaggcctataatcctagcactttgggaggctgaggtgggcagatcacctgaggtcaggagttcgagaccagcctggccaaaatggtaaaaccccatctctacaaaaaatacaaaaattagccaggcgtagtggtgtgtgcctgtaatcccagctactcaggaggctgaggcacgagaatcacttgaacctgggaggcagagcttgcagtgagctgagattgagccactgcactccagtctgggcgacagagcgagactctgtctcaaaaaaaaaaaaaaaaaaaaattccataatgatagcagagctggaatagaaatgggattgcacaggctgaatctgagttgttgcaacagtaaacgagcaagatttaaactggccttgtgtagcacttgctatttggctcctcatattttattagacgcttattcttttttgtttggtgtcattcctttgagaaatatttgagtgccttttctgttgcagacattgattagatgctgaggttgtaacaatgaagaagatagccatcgctgttgcctcatggaactgaagttttactagatgtaaaatttgagttaacatgaggccgtgcccctatgtgccctattgtttcttcacacagctcccttcatctccttggtccaatgaaaaggttttttcatacttgttcattcattcctgcattaattaaagtaggttgtactgtgccaggcactgggaatatttaagtagttgtgttcctgaattggaaatgaatccagcatggttggagtagaaggagctggggggcaatgtggagtgtgatggggagattggaaaagtaagctgagaccagatttttcagtttggagggagaggtgggccttgtaggccatattacagattgtagactttatttggagggacatggaagtcattgaggagtctgaagcaggggaatgacataaaaagatcctcattttaggccggatgtggtggctcacgcctgtaatcccagcactttgggaggttgaagtgggtggattgcttgaggccaagagtttgagactagcctgggcaacatggtgaaaccctgtctctatcaaaaatacaaaaattagctgggcatggtggctcacacctgtagtcccagctacttgggaggctgaggcatgagaatcgcttgaacccgggaggcagagattgcagtgagccgagattgtgccactgcattccagcctgggtgacagagtgagacttcgtgtcaaaaaaaaaacaaaaaacccctcattttgaaagggaaccctggcttgagggtgaagaatgggtgggcactaggctagagcagctgcagggtcagtgaggagctgccgcagtgctgcacgtgagaacccgtcatggtttggtcagggtgggcaggactgacagtgagcacagagcgaagtaaaaccagcaaaatttcatgattggatagtggaaggaatcatggtgtttgtagtcttcaaatgtgaacccagagtgcactggacaagtagtctaggctgctctgtaaccaaggcaagtgttttcattttaccctctcttcctgctcttggcctttggattttttgtaatttaaggtttatgaatgtaatcagttacttaacatggaaagatacttaataccagatgattttggagtcttgtgatcaataccttctctcaatcttgggtgtgtgtcagttggcaaggccataaaatttgttataaacattgcagaaggcttggttactgtgctgtgacgttgaatttgggtggagatagatcaatttcagttgattttctaggcttcagaaacacattaccctctactccacaaacacaaatcaaaacaaaacaatccctattccctgagcatttctcttgatctataacacagcctgggctgtcacagtactaagacaagcccatctgatttgtgagtcagttttatttcttggtcttctacataagctaaaaagtttcaacattttaatgcttttccttggattcctttgagtcattgaagtaattcctgtttcatttgtactaattattccacactagaaaattctgttgtaatcactttatgtattaatagaaatactgatttttattttcaaggaagtattgagtagggagggggaaatagggatttgctgttcaatgggtatagagtttcagtaatacaagacaaaaaacttcagagatcttctatacagcagtgggtatatagttaacaatactgcacatctaacagtttgttaagagggtagatctcatgtcatgtgtttttaaaaattgcttttaaaaaaagtatcgagtaaaaaagcagttttactcctcagtttctatttatatttaaaatttttatttaaaaagtgagttgagatttttaaacctcaggataagttttattttttaaaaaatttattttttattattttttgagatggagtctcactccatctcaagtcacccaggctggagtgcagtggtgtcttggctcactgcgacctctatctcccaggttcaagtgtttctgctgcttcagcctcctgagtagctgggattacaggtctgcaccaccacgcctggctaatttttgtatttttagtagagatggggtgtcaccatgttggccaggcttgtcttgaactcctaacctcaagtgaccacctgccttggcctctcaaagtgctgggattacaggtatgagccacagtgcccggcgggataagttttaaaataatattctctgctggctgggcatggtggctcatgcctgtaaacccagcactttgggaggctgaggcaggagcatcactcgaggccaagagtttgagaccagtctgggcaacataatgagaccccctctctacaaaaaataaaaaaaatttggctgagtgtggcatgttcctgtagctatcgggaggctgagatgggaggattgcttgagcccaggagtttgaggctgcagtgagctatgattgcaccactgcgctctagtctgggtgacagtgtgagaccctgtctcttaaaaaaaaaaaaaaaaaaggccaggcacagtggctcaggcctgtaaccccagcactttgggaggccgaggcgggtggatcacttgaggccaggaatttgagaccaggctggccaacatgatgaaaccccgtctctactaaaaatacaaaaataagctgggtgttgtggtgcacacctgtaatcccagctacttgggaggctgagggagagaattgcttgaacctgggaggcagaggctacagtgagccgagatcacaccactgcactccagcctgggtgacagagcaagactccatctcaaaaacaacaacaacaaaaaaaccaaatgttcttgccaattcttccatttaatatttaattttgaattatattgtatctttctaaggattgtttcttatataagcaaagatttttcagtgctaaacatttacgactgctattcagaaatggttatttacaagtctttttgttttaagaaaatggctgttcaaaaaattaaaatagtatataaaccaaacaaaatatttttgctttggatgtctgttttgcagcttcttccctacactataagttcttactgactgctttatcacttaataaattggtttggctactttaacagaggcaaatagtatcaggcaaaaaattattttttatttttattttttgagacagtctcactccatcacccaggctgcagtgcagtggcctgatcttggctcactgcaacctccacctcccaggttcaagcgattctcatgcctcagcctcctgagtagctggaattataggcatgcaccaccacactcagctaatttttgtatttttagtagagacagggttttgccatgttgaccaggctagtcttgaactcctgacctcaagtgatccatctgctttggcctcccaaagtgctgggataacaggcatgagccaccatgcccagccctattttttattttttagagatgggtctcgctttttagagatgggtcttgttgcccaggccagagtgcagtggtgcgatcatagcttactgcagccttgaattcctgggctcaagcaattctcctgcctcagcctcccgagtagctgggactacaggcctgtgccaccaggcctggcttgtacattagtatttgatatggctaccctaagggcaatcctatagtgaagtcaacattagataatgatgctcatctgatggattagattttcagagttggctgtttccaggtgcctataggagtagaaaagggtgacaaacctcctaactagatgtcctaccaaatatagttcactccacatctgagatgagactgcatgactgctggttttctttgccttttcccccccagggtatcatcagaaccaaaaataaagttttaaaggtgggtcaggtgtgtgttggctcatgcctgtaatcctagcactttgggaggctgaggcaggtggatcatctgagctcaggagttcaagaccagcctggctaataacatggttaagccccatctctactaaaatacaaaaagttagctgggcatggtggtgggcacctgtaatcccagctactcaggaggctgaggcatgaaaatcgcttgaaccccagaggcgggggttgcagtgagccgagatcatgccactgcacactagcctgaacaacagagcaaggctctgtctccaaacaaacaaaaatggtgccagagtcttttccagggctgaggggagatacaatgaagtgtgttattttttctgataagagtgctaccatctttcattcttgtgtgccatttctagttggggtgaatttgttttcggagttcctttcccagctgtttgcctgaaaaaccatgaaatgtgttccacatgaactatgaaatgattagatgctaatgtggcaaagaaagtgtgaattctcttgtagaaacagggacatttggttcggtacagtaagttgttaatgcgtgactctgtgctttcaaattctgtggttcaaaagtacttttcactcctactgtgtatttaccttgagaaggtgaatcccctaacaatttggtcaatgtatcagtattctcaacccgtctatcaatttttttttctttctccctcttttttctttttttgggcaaaataccttttttgctttttatccccttaaaataaccattgtccctcacatgtgcactcttccaaatttcagaaaagcaagaggaaagggcacgaatatacaaatattaagtattctctagcggaccagacgagtggagatcagagccctctcccgccttgtactccaacgccaccctgtgcagagtaagtagtgctgaaggaaattctttttacctggtcatggtggtttaaaaaggtttaaaaaacaaaaacaaaaacaaaacacaagtttgtagcacatgcctttcactggtgcacgttcctgttgccctactgttagtgtatctgtgactggtgatatctattgattgtgttaatgctatctcaaccacgttttaattttcctaagctggccaggcacggtggctaacgcctgtaatcccagtgctttgggaggccgaggttcatggattactttgaagtcaggagttcgagaccagcctggccaacatggtgaaaccctgtctctactaaaaatacaaaaattagccgggcatggtggcgcatgcctgtaatcccagctactcaggaggctgaggcaggagaatcgcttgaacccaggaaacggatgttgcagtgagccgagatcatgccactgcactccagcctgggcgatagagtgagcctctgtctaaaaataaaataaaataaaataaattcctaaactgaaggctgactgctatgctagctaggattatatgggattttaagtatatcaagtggtggttctccaagaagaatctaatttttcttttgatgggctggggattgtaacaaaggaaggtcatatgtcttaatgatgtgttaaggctctttgcaaaatcaaagtaaataaattgaccactaatgtgtcagcccagccatgttctgctcatttgccaccagtcaacagaaatctactttgggtgtttaaaccaggagtcagcaaactacagctcacaaggccagatgtgggccatggcctgttactgtatggcctgttaatggttttaaagggttgtaaaacaaaagaacacaaaacaaagacccaataacaaaacaaagcccgaagaataatatgcgacagagaccatgtatggcatatagagcctaaaatactgactctcaagcccttcccagaaatccttcccgactccttgttgaaaacacggtaggaaagcatttgtcaaattgaggatatgaatagcaattgtaagttattatttttctatatattcgaaagtcacttgctagtataacatttaccttttatttttccctaagaatcttctctctgtttgctttcgacatggatttttaaacccctgcagattttaatattctatataaatgttttaggtggcatatatgaggtttgtattaacatttgctttctatttaacattgaaatgaaattatacagcagaggtattttctcgtccaagttgccacttctttctatcttttttcttttctttcccagtggactgcctgggaaaattgatattttaaattgctctctgcaataatttgcaatggaactggaatgccagggttctgagtccttgccagacagctcgtccctcctgttggcatgactgagtcagctgtcatgattccctcagtaccagtggcatgcctgtgacagacagcctgtctgcctttcattcccgtcgtctcccttgtagggttcagatccaggatacactggtcctggagcccctctcagcctggcacccacagctgctgggttccttactctcctggactgctctgatgtcatctccctgctcagcagaaagaagtctgggatcttgatgctttggccctctgtcctaggccctaaaccacccattgcccttcacataacctgagctggggctaaatagatctctcatcactgcctgcctgctcctgtattttcccttcttggagcttttgcctgttcagatccctctactggaaattaataggatttcattctatgtgtgcatttccaacctttcttcacagtgcgatccaaatgcctcatcctacaggcctccttaaaacaacctgctttctgccagaccccagggagcaccaggacttgaggcttttattgcacttctgttgtttttttgagatggagtctcgctctgtcgcccaggctggagtgcagtggcacgatctctgctcactgcaacctccatctcccgagttcaagagattcttctgcctcagcctctcaagcagctgggactacaggcatgtgccatgacacccggataatttttgtatttttagtagagacggggttcaccatattggccaggctggtctcaaactcctgacctcgtgatccacccacctgggcctcccaaagttctgggattacaggcgtgagccaccatgcccagcgttatttcacttctgcctctgtaattatattgctgtatggctatctcttctctccctgggaatgtcaggtcctaggcacaggaactgtgtctgtaccatatctggtgcccaaagaatgtagtatgtgttttatagatatcatgtaagcttaaacagcgtggtctacatttttgtaaatgtctttctttttcttttctctccagaatgagagaagacagtgctagagtctatgaaaacgtgggcctgatgcaacagcagaaaagtttcagatgagaaaacctgccaaaacttcagcacagaaataggtatttaaatgcaagtgctctattggttaattgtttatataattggcagtatttttaagcaggcaagcaatttgggaatgttttagcaaagtgtaccataattgagttttacaaaccaggctcctttttcctctccctgtacttctttttccaagatggttttagtttagagttcattaaacattaaaatcaaacacagaattaattctgcatgaggcaaggctagcacttattccagagaaatggctgatactggtggtagagtgcaggtatcactgttcctgcaatttttattagagttggttagcccaggctgtgctgggggatgatctgtagggatctgggaagcatcgggactcagcactgggtggttgggagtcaggaagcctgagttctcatttcagtcagtctctgaccaactgtgtggcatggggtgctagaccacttggctgccgactgggtcaccgacatcccttccagctctgctgctggaaattcatctctcccatatgttgcctccccatcaattacgttttttaagtgtgacccaagtatatgatgtatgttttcatgataaattagaaacttatctgggcatggtggctcatacctgtaatcccagcactttgggaggctgaggtgggcggatcacctgaggtcaggagttcgagaccagcctgaccaactaaaatagtagagaccaacccgtctctactaaaaatagaaaattagctgagcatggtggtgcatgcctataatcccagctactcaggaggctgaggcaggagaggcagcggttgcagtgtgccaagatcgcgccattgcactccacctgggccacaagagtgaaactccatctcaaaaaaaaaaaaaaaaaaaaaaaaactcagtgtcagtatttcatgtcgaaattccacttcaatgggtagtgtagttaaaagctctaagtctaccttaaaatcacctaatgctttgttaagcttttagatatatgttccttaaaaactcttaacttatttcttccccagatgtggactttcaccctctccctaaaaagatcaagaacagacgcaagaaagtttatgtgaagacagaatttggatttggaaggcttgcaatgtggttgactaccttttgataagcaaaatttgaaaccatttaaagaccactgtattttaactcaacaatacctgcttcccaattactcatttcctcagataagaagaaatcatctctacaatgtagacaacattatattttatagaatttgtttgaaattgaggaagcagttaaattgtgcgctgtattttgcagattatggggattcaaattctagtaataggcttttttatttttatttttatacccttaaccagtttaattttttttttcctcattgttggggatgatgagaagaaatgatttgggaaaattaagtaacaacgacctagaaaagtgagaacaatctcatttaccatcatgtatccagtagtggataattcattttgatggcttctatttttggccaaatgagaattaagccagtgcctgagactgtcagaagttgacctttgcactggcattaaagagtcatagaaaaagaatcatggatatttatgaattaaggtaagaggtgtggcttttttttttttcttttttccagccgttgaccaattatagttcggctgttgactgagaagtttgtggtgggaaaacgtttgccatattttctttgcatttgaataattgtcttgtacttagaaaaaaggcgtctatgaatgaccagtgtttttggtcgccaaatgttgctgacaaacttatcccaaaactttagtggcttaaaaaaacctgcccccaactgttagtcaatctgagctgggctcagctgggctgttcttctgccagcctgcaggtggccactcatgtggtcagcaggtcggcggagagactgggatggctgggcttctctctctgcctgcagtcctgagtctctccttcttcgtgtagtctctttcagtggcctggctggcagggtagctagacctctcacatgcagctcagagctcccaagagctcaaaagcagaaatggccaggccttctgaaaacttaagtccagaattgtcacagtgtcccttctacttccctctattgatgatgatgatgatgatgatgatgatgatgatgatgatgatgatggttttttctaatcagaagaaagctggggtatgccctctacttactaaacaagtcacaagcccagctcagattcaagaaaagggtgtgaagtagaggtgcagttaagtggggggccactagtctaacagacggtcacaaccagtgccatggaaaaccaaggatattagcaaaagcagaagttgctagtgaccttgggaagccgaagctgcttacagtagctgggacaagctgaaagtcagactaagaaataaagagagggccttcaagaagcttcctgaatgatttctgctagccctgagcctatttttggaaccagcacttggggaaactgatcttgtgaggatggatgtgtttagggacacagggcttttgagagcagcaccaccccactggggcatccccagacttgggaaacgtgactctttcttaatgccactgggttttagtcaggccacagtgagaaggaacagccctaacaggcctccagccaggttgaatgagctcatttttgttgtagccaaccagtaagatttgctaatgttctacattaagtgccttctccaaagacatccctctttgcctcatatgttgaatcatccagtgcggatatttcaatgaaaatatcattggttgacttttgtgatggtaataatgctatggcatctttgccatgaagttgtggcctccttggattcttctgactttggcttctgaaaggaaggcctagatccagccctggtggtagttcctttctgaggtctctcagtcccttgagactttggggtagtttggctgccattctcactgacaaaatgtatatcagcccccacctccaccccccaatattccttgaactttgaattgcttcagaacacaggtgtggcctgaaggtattcccttattagggaagtgtcactgctgtcttctagtcaaacttgtaaagaaaaagattccagttcagtatttgcagcaagaagcttgaatgctgttctttttatcgcattgttacatcgactcattctccattttgctttggttttgtcttgacttgacttgactttgggggtaaagtctttcaccagcacacaagagtttgattgtacaaatatatcttctgcattaacatctctgcctgttgcttaagatcagttgcttttatactcagaatggaaatacctgatcttggctagttttgttataagatattgatttcatttagatttccctccacgaggtcagcaaactatcatgttcttatgtaaacttaggccaaggccagagttatcatagtccctaggttgctacggcttatcatgtgcttggtaaaaggtgatcgcaggttctcagacgagtttactttacatgagatggaatcaggcagagaggctgggatgatggagaaagctcgaggtgaagttttaaaaaaaaagttgtggaaaggaaagttccaaagaggtggtttctgaggaagtcagagcgcccagggccagagcagtcagtaatgggtgaatgaggttgtttggaaagtcggtgtgacagacacatggatgccatctacttctaggttgctggtgggtattaaatatgcacaatattccatagctcactgaggattttaaaattataagcataggattttatattttggggtgaaagaattatctggcacattaggtattggagtttaaaaaaaaagccaaatttcacagtcttaataactttttttaaaaaaaactaaaaggcgcttcatgtccagtgtgtggcccttctgaaacttatggtcatctctcccactgaaaccaaggtcttttcaaatgtggctaaatggggatgaggagacacgggtaggactttcttggtgtgtgtgcattctttaaagagccaagttgcttcggggaaacagccaggaaaatggtcaagattatttttagaggttattttattggggattttaagaactaataacatcttgagttatttttaattcaggatgatgtggaaaggtttgcaattgtcaagtgttttgttgtagcttagtatccataagggaaacttagactacagacataactacaaagccagtgcagcttttgttttctgtatgttgttggggaactcaagtttcacatatagcaagcacgtggcctccctgatgtcaggatgcctttgttaggatctgtatttgcccttaattttgttgaaatcttttttccttcttcctcttgaaacattccaaactatagtttatagtatctttcatcactaaaaatttgtttgtttttcactacgggcagttcacacaaggcaaaaaccattgaacagttggttttagtgtgttgtataactttgctgtgtatcaaactaattttgacaagctttcatcataagcctcaaatcatgtaattaataatttgcctgtttatttatgacctaattgtgattcttttattaataaaagctaatgggaaaaggatccctgattaagctgatgactagacctacaattaattttcctgcagtatatgaagtattgtaccagagtattaaaagatatgtaatattttattgataaatctatcctttaaaaggaatacgttttaggatgtcatcattttgatgtgaatcatgtaaatgttgataatatgctgtttattatacatttagtgtttcaagagattcacttaattgcctttttgcccacgtatattatgtagtctatttgcaactgttcttaaaaaaatgacattaaaagaatagtttatgtagagaaacattagtggatgttaattgtctccccacctatatttatgggtgttagcgcaactgctttgctagttgcaaagctgtattatcagagtaaaagtgtatttgtaaactgtatgggaactaaaaattaggaataaaaccattttcttatatgatggcatttgtcgtttgcttcatcagaaatgtccaggaaaaaaatgggattattggtcactccacctctcacactggcaaaatactgacatttagcagctcttatctagaagtgacttggaacatagaataaaggcatgagttcctgaagaattcattgagtgtttcctgtagaaatagctttaggagatagggagttctatctgggagaacatatgagtaactcaagagtaaaaagtatagtctgtgtaaactatagaagaaatgctgggcatggtggcgcgcccctgtaatctcagctacttggaggctgagacgggaggattccttgaacccaggagcccaggagttttagaccagtctgggtaacatagtgagaccctttctcacctactctcactgcatgccccccaaaaatatatatgtgcgcgcacgcgcgcgcacacacacatacacacacacacacacacacacacacacagaggaaattgttagaaaacacacagaactgaatgtaaatagtattaggtgggaataagaagtaaagggatggtaaggaggcttggaggaggagtaaattatctgctatgggacatcagctcttcctttagagtaggtttaggtcacataccaacagggccactttgttctgacaacagtgtgcactgacatgggcagaaagaaaccattttatagatagcaaaacaggtggttattctttattagaaatataaggaatgatttggattacttatttacactgtaaaatactatgacccccctctcagtctcatttgaattgtttaatgcatctaatcaaatctagctggtttagtttgttagtcctgtcacctgtccattcagaaatacagagcatgggccaggcacagtgactcatgcctgtaatcccagcactttgggaagccaagacgggcggatcacttgaggccaggggttcgataccagcctggccgacatggcgaaaccccgcctctattaaagatactaaaattagttggccatggtggcgcatgcttgtaatcccagctactcgggaggctgaggcatgagacttgcttgagcccaggaggtggaggttgcagtgagccaaaattgcgccactgcactctagccctctagcctaggcgacagagtgagactctctctcaaaagaataaataaataaaaataacagagcaccttcaaaatactaggcactacacctgtgccctggggaggaacgctgcccgaaacaacctgatagggtgcctgtctaccagggagctaggccttgcaccgtcagaaggcagttcctgaagctgcccagagccaagacaaaagacagaagtgagacgactagttccaaacaagataagagccatgaagaggggctaagagtgtgtatcgcaccggaggattactacggggttttcaaaccatggtactgtttggtgattacccttgggtttcagaagaggtgctgtacacaatattgcttggagacacctcattccacataatccttcttgaggtcctggattgcatgttagagggcagtgacaatatcttgtccttggccatgccatgaaatgaccttctgtttgtgtagttcctactcacaagaagagttcccaagaaaatgagtacattaaaggcagagccggaatccctgcaataaatcctgcggacagagatgaggaattattcaacgtggtcaccttgtgaatgaaaaagcttctggtgtgagggtctactgttggctcatatgacatgtatgctttcatccacctcttctcttcgcctctacgagggggtagcaaaaaggggactgtgatctcaagtgaatggtttgattttgcaggtgctgttatttttcccctaggaactagctaagtttccaaacactgaatttgcaaatgggatgagccagaaatagagatttgctattttgtcagtggtgacagttaccagtgagctggtaatattcaagtcactggaggtcagatcatttaaatcctcaaataccatcatgatagaaaatatagctactgaaataagggttacaagaaagcaataccatactgccaagatctgtgagcagtttacggacaaaggaattgtatgtgatgcgcagacatgatgtcatttctacctgttacactgaactaaacagagtttgtttgggatccaaattttccatttggcaaagattaaatccccaataacagttaggcatcgggaagcagatgaataaaatagttcatgcatctgaggagctatgcatggagtcatagtcagggagacatatatattcaaatatttgtcatttgactagaatagacaatgataagattattaacttaaattgatggttgcatagaggagtgaattatagtgaggttagaattcagagaaggggtcacctgagcttactctgtcccccaggctggaatgcagtggtgagatctcagctcactgcaacctctgcctcccaggttcaagtgattctcctgcctcagcctcctgagtagctggaattacaggcatgtaccaccacatcaggctaatttttgtatttttattagagattgggtttcaccatgttggccaggctggtctcgaactcctgacctcaggtgatccacccacctcagccacccaaagtgctgggattacaggcgcgaaccagtgagccactgcgcccagctccctgtctcttttttttttttttttttttgacacaaggtctcactgtgttgcccaggctggagtgtagtggcacaatcttggctctgcaacctctccctcccaggttcaagcaattttcatgcctcagcctcccgagtagctgagattgcaggcgcaaaccaccacgtctggctattttttgtatattttgtagaggggagggttttgccatgctggacaggctggtctcgaacttctgagctcaagtgatctgcccaccttggcctcccaaagtgttgggattatagacgtgagtcactgcacccagcagcatttctctttaaagtgaggctgagcgtctttccatgtggttttcatgtgattttctgggaattcttcatgtctcttggcatttttgcctattgaattctggttctgtcttgctttgagtttaggaataaagatattttattattattattattatttcagacagggtctcactccgttgcttaggctggaatgcagtggtgtgatcttggctcactgcaacctctatttgccaggctcaagtgatcctcccacttcagcctcctgagtagctgggactataggcatgcgcgaccaaacccagctaatttttttaaattttttgtgtagatggtgtcccactatattctccaggctggttttgcactcctgggctcaaacaaacctcctgtcttggttcatcaaagtgctgggattacaagtgtgagtcactgtgcccagccaagatatttaattctttacaacggactgccatgactggagttattgaatcagtaggatcaatttcaatcaaatgcctttttataggtgcatgtgggatagctacccctatgtgtgagttgcagttttggccttgctgtgattataattctcagtgcggatggggagaacagcctgggaaatgcattctcagcactcccaagatggtgaaaccttgtctcagctgccatgtgagaccagtcttaattatcctggtgagtgagttgagaattatttcagattttctttcatattcaaaaccaccaagcagtatgcatgcatgcacccattcaagcactttttaatgagtacaatgaaccaggcattgggctaggtgctttggggaatacaaaataaatacttgtcttaatccctgtctgaacggactttatggcaatggcccatttagggagaggagacacacacaggctgaatacaagatggaaaacaaaacagctatggagggagcctggatcaagaccttaagatgaaggattgaaggaaatgataattcctttaatttactgacaattaggtgccaaacactgtcagcgggtttatataatgatatggtttggctctgtgtccccacccaaatctcatcttgacttgtaatccccacacgctgagagaatgacctggtgggaggtgattggatcaagggggcagtttccttcatgctgttttcatgatagtgagtaagttctcctgagatcagatggtttaaaagtgtggcactggccaggcgcagtggctcacgcctgcaatcccagcactttgggaggccaaggtggttggatcacctgaggtcaggagttcgagaccagcctgaccaatatggcgaaaccccgtctctactaaaaatatgaaaattagctgggcgtggtggcaggcacctgtaatcccagctacttgggaggctgaggcaggaggattgcttgaaccagggagatggaggttgcagtgagccaagattgcgccactgcactccaacctgggtgacagagcgagactctgtctcaaaacaaaaacaaaaacaaaaacaaaaaacacagaggttggccttgactccttccttcccgctcccattccagaccctgcttgttcagcccccagccacttctgctcatggtccttccaaaatatatatccacggtttgtcgcctctccctagctctgctaccaccacaatggggagcctctgttatctctgaaagacaagaaggtagggcaccagtcttcctggaacctggttagatttttttctcccccactggagacatggtcttgctctgtcacccaggctggagtgcagtggccccatcataactcactgcagcctcctacccctggattcaagggatccccccaacctcagcctctttaatagctgggactacaggcgcaggccaccataccggctaagttttttaattttttaatttattattattattttttgagacagagtctcactctgtcacccaggctgcagtgcagtggcatgatctccactcactgcagcctccgcccccccaggtttaagcaattttcatgcctcagcctcttgaatagctgagattacagctgtgcgccaccatgaccggctaattttttaatatttttagcagagacggggttttacaatgttggccaggctggtctcaaactcctggcctcaagtgaccttcctgccttggcctcctgcatcgctgggattacaggtgtgagccactgcacccagctccgatctgctaagatcttatgtggcctccccatctccactcagaccccacttctgccattctccccacagagccatctgttaaacatgcacatgggattctgctgccctcctgttccccagtggcctcccatcacattcagaataaaagccaaattctttactggccttttggagtgggcagaactttactgcatcagactctctggtatattttaggattttttgcttcctgggcctccacccagtaaatgtcaatagtgttcatagttactgtgacaaccacacacgtcccacacattaccaaattcccccggaggcccttagtgtttcccctgatggagaagcattgcgtgattctgtggcctcttccatgcctcctacctcaccatgccatcattcacccaacaatatatatcaaacactttttttttttgtgagatagagtctcactctgtagcccaggctggagtgcagtggcaggatctcagctcactgcagcctgcctcctgggttcaagtgattctcatgcctcagcctcctgagtagctgagaccagaggcacacgccaccacgcccggctaatttttgtatttttagtagagatgggcagggctggtctcgaactcctgacctcaagagatccacccgcctcagcctccccatgtgccgggattacaggcatgagccaccacgcacggcctattctgctctttttatttgttgatgggttgtctgtcttctccatgagaatgccagctccaagaggacagggagttggccttgtttattgcagtatccccagtgcctacaacagtgcctggcccagggtaggtatgaatgggtgattgaacaaacgagtgaatgacatcattctagagaagtcagccacgtgaggatctggagggagagcatttcaggaaagaggatgtgtacgtgcaaatgtcctgctgcaggaatcagcttgggcacgtttgaggactagacagctaaaaggaagagcagatttggggaaaaggtgctgggttcagtcttgaacattttacagttgtatctgaggtgccatatatctgccaggatctgggaagaaaacgaagttcactcacaagggttgaactgaagagaattttaagaagggactgtttgtgtaagtaagcagggttcagggttgcaacgtgggagggtgaaacaccagggacctacatcaggagggagctccttacacctacattagcagggatgc

SEQ ID NO: 269 - DNA, 2597 bp, Homo sapiens
ggcgggggcggaggaggagcgagccgggccggggggcagctgcacagtctccgggatccccaggcctggaggggggtctgtgcgcggccggctggctctgccccgcgtccggtcccgagcgggcctccctcgggccagcccgatgtgaccgagcccagcggagcctgagcaaggagcgggtccgtcgcggagccggagggcgggaggaacatgacatcgcggagatggtttcacccaaatatcactggtgtggaggcagaaaacctactgttgacaagaggagttgatggcagttttttggcaaggcctagtaaaagtaaccctggagacttcacactttccgttagaagaaatggagctgtcacccacatcaagattcagaacactggtgattactatgacctgtatggaggggagaaatttgccactttggctgagttggtccagtattacatggaacatcacgggcaattaaaagagaagaatggagatgtcattgagcttaaatatcctctgaactgtgcagatcctacctctgaaaggtggtttcatggacatctctctgggaaagaagcagagaaattattaactgaaaaaggaaaacatggtagttttcttgtacgagagagccagagccaccctggagattttgttctttctgtgcgcactggtgatgacaaaggggagagcaatgacggcaagtctaaagtgacccatgttatgattcgctgtcaggaactgaaatacgacgttggtggaggagaacggtttgattctttgacagatcttgtggaacattataagaagaatcctatggtggaaacattgggtacagtactacaactcaagcagccccttaacacgactcgtataaatgctgctgaaatagaaagcagagttcgagaactaagcaaattagctgagaccacagataaagtcaaacaaggcttttgggaagaatttgagacactacaacaacaggagtgcaaacttctctacagccgaaaagagggtcaaaggcaagaaaacaaaaacaaaaatagatataaaaacatcctgccctttgatcataccagggttgtcctacacgatggtgatcccaatgagcctgtttcagattacatcaatgcaaatatcatcatgcctgaatttgaaaccaagtgcaacaattcaaagcccaaaaagagttacattgccacacaaggctgcctgcaaaacacggtgaatgacttttggcggatggtgttccaagaaaactcccgagtgattgtcatgacaacgaaagaagtggagagaggaaagagtaaatgtgtcaaatactggcctgatgagtatgctctaaaagaatatggcgtcatgcgtgttaggaacgtcaaagaaagcgccgctcatgactatacgctaagagaacttaaactttcaaaggttggacaagggaatacggagagaacggtctggcaataccactttcggacctggccggaccacggcgtgcccagcgaccctgggggcgtgctggacttcctggaggaggtgcaccataagcaggagagcatcatggatgcagggccggtcgtggtgcactgcagtgctggaattggccggacagggacgttcattgtgattgatattcttattgacatcatcagagagaaaggtgttgactgcgatattgacgttcccaaaaccatccagatggtgcggtctcagaggtcagggatggtccagacagaagcacagtaccgatttatctatatggcggtccagcattatattgaaacactacagcgcaggattgaagaagagcagaaaagcaagaggaaagggcacgaatatacaaatattaagtattctctagcggaccagacgagtggagatcagagccctctcccgccttgtactccaacgccaccctgtgcagaaatgagagaagacagtgctagagtctatgaaaacgtgggcctgatgcaacagcagaaaagtttcagatgagaaaacctgccaaaacttcagcacagaaatagatgtggactttcaccctctccctaaaaagatcaagaacagacgcaagaaagtttatgtgaagacagaatttggatttggaaggcttgcaatgtggttgactaccttttgataagcaaaatttgaaaccatttaaagaccactgtattttaactcaacaatacctgcttcccaattactcatttcctcagataagaagaaatcatctctacaatgtagacaacattatattttatagaatttgtttgaaattgaggaagcagttaaattgtgcgctgtattttgcagattatggggattcaaattctagtaataggcttttttatttttatttttatacccttaaccagtttaattttttttttcctcattgttggggatgatgagaagaaatgatttgggaaaattaagtaacaacgacctagaaaagtgagaacaatctcatttaccatcatgtatccagtagtggataattcattttgatggcttctatttttggccaaatgagaattaagccagtgcctgagactgtcagaagttgacctttgcactggcattaaagagtcatagaaaaa

SEQ ID NO: 270 - protein, 589 aa, Homo sapiens
MTSRRWFHPNITGVEAENLLLTRGVDGSFLARPSKSNPGDFTLSVRRNGAVTHIKIQNTGDYYDLYGGEKFATLAELVQYYMEHHGQLKEKNGDVIELKYPLNCADPTSWFHGHLSGKEAEKLLTEKGKHGSFLVRESQSHPGDFVLSVRTGDDKGESNDGKSKVTHVMIRCQELKYDVGGGERFDSLTDLVEHYKKNPMVETLGTVLQLKQPLNTTRINAAEIESRVRELSKLAETTDKVKQGFWEEFETLQQQECKLKRKEGQRQENKNKNRYKNILPFDHTRVVLHDGDPNEPVSDYINANIIMPEFETKCNNSKPKKSYIATQGCLQNTVNDFWRMVFQENSRVIVMTTKEVERGKSKCVKYWPDEYALKEYGVMRVRNVKESAAHDYTLRELKLSKVGQGNTERTVWQYHFRTWPDHGVPSDPGGVLDFLEEVHHKQESIMDAGPVVVHCSAGIGRTGTFIVIDILIDIIREKGVDCDIDVPKTIQMVRSQRSGMVQTEAQYRFIYMAVQHYIETLQRRIEEEQKSKRKGHEYTNIKYSLADQTSGDQSPLPPCTPTPPCAEMREDSARVYENVGLMQQQKSFR

SEQ ID NO: 271 - DNA, 120239 bp, Mus musculus
  misc_feature (1)...(120239): n = A,T,C or G
gcaaaccttgtgattaatggggaaagtgttctagggacaggacagtacatgcaaaggccctgaggttggaatgaactaggtgtgttgggggaatattaaaacacctccctgtggggctgtggaaatgataataaagtaaggtttttaaaaggatctcctggctgcaatgactgtcaacagtggaaatgaggatactgggatagtttcgtagcgccccagagacaggtggtgctggcgggaggagagatgttgggaaacagagatggaggtgggcggtagagccagcatgctcatgcacatcacacaggtgatggagggtgagaagaggaggcaccagcgactgagcgtagctccaccctaggcagcagtgcttgatgacataggatttggagaatggtctctggggggatggatggaggtgaagataggaacctttacgtgtctgggctgcctcagcattgatggttaagtcaggagccaggggcaagtctggaggaggccagatgtgtcagggctgtacatgggcatttgactatgggtcttgtgtcttacctggagggtgtgggagggaaggaaagtcaggagggcccctcaaggtgaagagagaattcaggaatgaggacaaggttagcagcgttcactgaggtgggaatcctaagaatacaattggcttagtgtcataggccactggtgaccctgggtactgttttctccatggagtgccatggtggaggtggccttcagaattaacgcctggttattgaaccagggaaattagagtgcaggtagcgttagggagttctgtgcaggagtccagttaggaagaagtccatagagctggtgcacaggggacatcttgcctgagaaaacatctggtgatgagagaaaaggataccccaggagagctgaggggaagcggcctgtgcagtggcctgtgtggcatgatggcattgacccaatgctcagctgtaaaggtctagcttagccacgacgacgacaggaaagcgttgtctcatgtagacagaagagggctgctagagttggtggtttgataatagggtgttttcttctgagtgctttcattttctccagaaagcaagcaatgtagagaacaggttgtttgtggtttgaggagctagtctgctttaaatgctcatgtagaagtacagaccatggggggtgattatcggctgaacgaagggcccactgtaggcttgtggtctcagctttacaatgagataagccttccgcaccaggcagtcaagaagcagatttgggggctttccagggatgaagacgaagagctgggttgtgaatggtgacacaggggattgttgtgacgggtctggctttagctggggcagacagcagagagaggaggggacagacatctggagaaggtgtgattggataaggggcagaagtcccatgggatggaggattgatgggtggactgggagtctgagaatgggcacttggagttgagatggtgacatgacagtgtctttactgaggcctgagtggggaaggctgaactggtgggagggttgggcataggaagaccactggagaaaaaggttgaaccgtgatggctggatgtctgcttattcatgctgctaaaatacaagccaggcataaggtgacatcgagaaagacgacgagtgagactgtggtccagcacgtgatataacatgtgtagtagtatctctgcggtgtcctcagagagctgcaaagggctctcccacagaatgagcatcagtaccgctgccgtattctgaaggtatagcagtgccatgaggtgacaacagggaagaggacactcaagcttgtaactcctgagcctctttgaaaggcagggacaacagttgtctgacctcttgcatcggtagtgaggaactgacagaatgcaggggtggtacttgagccctgcactgatctgaccagaagaccccagaactggttggtgcccttacagaagcagagtggtccttggggaggaacactggctctcagagaccatatgtttccacaggaggatggctgaaagggagtatggctcaggaaggctctctaaacaggactcctttggttatacttgtccgggcaatgggttaagtgaagttttcaggtacttgataaagcatctgtttatggtggatggagggaagttcagagccactttcacttgggtgcgtgggaggagtcaggagaggccttgggcagctctgtcaatagtttgagcatggcagggcatagtctttcatgtgatgtaaactcatttgctatggtagcctccacaacgtgccatgggacacaatggagaggagagtgaggcttgtcattatctagtcattctcatgatcccccaacccttactgtgcaggtatgggccagagcgactgctgatccagggcctgattttgcaagaggttacaggaccccaggactgagcaaggaagaaatgactgtggatggcttcactagagccctggtggctggtgtgggtggaccagttacctggtgggaacctgtcctatggcctcaacccattggctgggagttgtgccagctctctggacctctctgtctgcccttctcagttgacagtactgccagttccagcaggttgaactatggagagctggagtggagattgcatgtccaggggtgggtgcaagagagagcatgccaacggtcctgaatctgctctcatcctcggagccacatcagaccacatgagcttccttctactgggtcctggaagcactcagtactgtgcccagggtgttactgtggcagagatgagtacaggacaggggttagctgtgtggaattctagcctctctcttcctgcccgggtagcctgagtaacagcagactgtttgtgcccatagattgcttctggctacaagagtctaggtgtctctcagtaggtttctgtcttcttcccttcttccactaatccaagtcaggcttagctggtcccatcagtaactgggtgactaaatcacttacctctgcactgggtcctttgtggggatgatcagggtctctgtaacccccggtgatgtcgtcatggtgggcacaacgtagatgctcagattatttgctgagtgaatctcatccatgttcactggcttttcagggcgagtcaaggtgtggcccagggccgccagagaagtagatctgcttggttcttcctagtgtgtttcaggagtcacactttcatctcaggggaatggtcattggcttggacatcgccctttcccaggcggctctagaggtgagatagcttagttgtctggggatcatactttgaaggcaaagaggtccacattcttgtgctgcccaattaatctttggccgccctctctctttctctccctttctccctttctccctttccctctccctgtctctgtctctgtctctgtctctgtctctgtctctgtctctctctctctctctctctctctctcactcagaatctaagcctcagtttaccaaaaaaagttctcctctgaatttcagagtcaggaaatgaaatgcctactgtgtgacactgagaagaagagagtaaatggaagagcagtacagaaggaatggtcaagaatcttctagattctctcagctctgagaaaaattgctagtttgctgtgctaccataaaggtcctgggacttctgcccaggcagcatagagtggtgggaagtgcacagtgtctggagtggggacagtgccctggcctgtggccagagattctctttgagtcccatcttccttcctcaacatctggtccatgggggttggttgagatgtgtgtggaaaatgcttacagcagacccagagcattgtccagtttttttgtcctttatggcctggacatttgctataggaaagttcaagaatagaggagccctagtctggttactatttttatttttatttttatttcatttcatttcatttattttattttatattactttgttttctgaagatgcttgaaaacacctcttcattgcagtattttcacatttccctctagttagtaatttttagtgtttttctcttcttcttgcttatatttttcccagcttctcaccctaatcttctctctggataagttctgttcattcctacggcacccgagtcgtttagtccctcattggtgatggacgctgtgccctctcctgccctctcccctctcactgtggaggtaacagggaattcgggacctctaactcccaggcagggtttatagcatgttacacatagatgaaatgtaactatcccaaggggccatgcaactcagactgttccttttcaaaaacttatttagatgtaattgaggcttatagaagagttgaagagtctcattcactttgcccagagttcccacacagctggatccctctctcccagtctcttgccttcctgccttctccacttttataggactctgtctctagacaactcaacaacattggtgcatgcttcaggatggaattcctaaaagcaagggctttcactcacatacatgtagcacagtgatcagactgggaaatcaatgcagaagaaaagtgttacagaagaccctgtaaccctgaaccacacctgtctcccgtctgccgcggagcccttaaaggagaagaaagccccgagtcactgctgggttcagttttcctgtctgacccagaggcaatcctgtgccttttagaaccatcatatattttgtagcccaggccagtcttgcccttgaatatccctcaccttgagactgtgaggactctcctgatggctggaatgaagataagtgtgtttcggaaaatccctgcagaaacagtggggccctctgagcatccttccagggcggccctcacttgcaaagatgttcatagttagagaaattctcaaatgtctgtgtggctggctgcctctggacttgttcttttaaatgcactggcctgcttacctaacccttttttttttcacctaatttaggtgctcagtgctgtcttaggccataggttaatattttaagagtcttagactctaccagaagctagaagttcatcttctgccaaagctttgtgaggactccacacctttctaagaggaatcctattgggattttgcccagaatccctggactctgtgagtccattctgagggaagtgatgtatttatggtgggccggcttcctgtgtagggtttttctctcctcattgttgtgcctttgacgtttctaggagactttcactatggtctcctgggtgactcactcttcttactgagtttgctatgtgctgtttcatagcttgggttactcacacagtgctgggaatggaacctgggacctcacacatactaaacgatcactctaaccagtgagctatattgtatccctgcctacccattctacttctcactaattattactggtgctggcttgtgagtatgtatcctatatatggatagttggccaattccatttagaattttgatgaatacagttgtgtctgtaaatagtggctttttttgggggggtggctttttgtagtagccaggatctcctctccggaagaatgttgaacagtgggcatgtttggatattcccaactttaactggaatagcgtccctgctttactattgtttgtgccatgattttgagacatatcctttcaaaagatgtaaggaaaattcctagcaaaataagtcttttttggaatggtattgagttttgcaatttggtatcgtatcttatttgctaacatttatttaaagaggttttgatctgtatgatttacataaaatttagtcacaatctttgctaacatttaaagagcaaagtttagatctgtatgatttcagtaaatgtatacactttttttttccgtgcccaattttaatagaaaatttggctttgtaagcaagaatttgaatgccccctcccccgacctcctgcccagccagtcagaaaacagatgtctttttactgagactttagtataatttgcttatggaattatttgtacagtcctgataattttataattcatattttccctctcagattattagcctattcagggtttttgtttcctcttgagtcagttttgtataattttcctttatttagaaaatgtttcttctacttgtgtttaagaatccatccatataaagtctcttgtggctcctcttctcacgaatatttccaatttctttgtatttccttgaccacacttactgagggggcaggcagggattagtgatttaaagcacttgtccctggttttattctcaagtcttcggattttctttcctttaacgtattttttcatttgtttctggttttgatttttttcttctccttcattcccgtttctgaatgacggctttagacctctcccttgggcattgctatacagcagcctcagtgttcattatttaagagtctgcattctttaacttcttttaaaaacactcccttaaatgaccttcaggttacagtcctagtggttaaagttttgtggctttctttttgtttagttttattgctttatggccagagaatatggcctagaaaattccagagtttttgttttttttttttaattgaaattttctttgtagcctctcacatgatcaacttgcgactgttctgtggatttttgacaaatgtattatgtaataaatgtatatgaaatctatcagacaggttagttgtatctttaaagtctcatattgcctcacttgtgcttgctttattttagtgggtgaccgacccattcctgggacatgagccatagtccccctcatttgaacggctttcccctccattgctccgtgtatttttggaagttttcatctgggctttttcttcatggatatacaaaatttccttattgtgaatttttttcaaatacgtttaagggtttgttctttacaaatttgttttgttttgttttgttttggggcctgttatcactttcatatgttattgcctaggtctggtgtaatttattaatttcttattgaaaataaaaaagttttttgttttaacataatacacaagaaaccacaaataggatattaaaatctgccttgcatggcgcccagccttgtggctacctccacagcaccccaggctcttctgttttggggtctctctttagttcttgacctacctgactgtatcaccctgtttgtgatacctaggtgtaacaggggagtttacatatcacccacatttgttacaatcacctctttaattttcaatgtcttccatttttgctccattttaattccccctccttttgttggattgctaaagttgtcttttcttcttaattcctctttcagcttgttttctttctgccctacccttcatatgccaaccttgctctttatgattcggaagtcacggtcctacttttcatgtcttatgtgtaaatctgtaacaaaggtatttaagctggagcaagaataaattagcattactaacactgccgtccccctgtagagaatgcacaccctccccaccccaagtagaactgacctttccctgcactggacctggctggacccttcccccaccatctctctggattaatggaatatgggattttaagttccagcttttaagagggagggaaacccatctgtattattctggggaatcataagtggcctccagccctcggtcaccctgtagatttagtctgtctggcccagttatggtgttcctttgcaattgcatcttttccttcatgttcacagtgtgggtctggaaaggacattgctttctctctgcctggagtgctgggctgggaactactttctccagacctctacccaccgcgcccttggtcttcacttagggagcctaggtcttatctctctatggattttctccagacctctacccaccacgcccttggtcttcacttagggagcctaggtcttgtttctctgtgggttttctccagacctctacccaacatgcccttggtcttcacttagggagcctaggtcttgtctctatgtgggttttctcccttcctggagaccttctcattgtccacaggttgggaatcttattagaagtgtcaaggagtttgttttatttcttttcgactttggaattcggtctttggctctggaaactctggccttttttctggtcctggtctccgctgtggagacggatgggtcagtcagtcttgaatcccagctacagtgcctgggacacttactatactctacctttgctaagactggctttccccatctggaagaggctagagggacttggctttgagtagcaagggttctcttcacagcaggagcagagatggaggctggatctgaactgaacttggagaacaggcaagctaaaactttggatggaacttgtgtttttatacactttttattatctacatttccacataaaatggcttgatgggagctaattttgctcgcctgagtcttaacgctccttacccaccccacatcaacatctcctcatcacccccatcccccattatctttggtctttctggttaatgtgactttactgaagtcagaatcaaacattgaaagagcttttactttgacacagcatgctttagactttaccaaaacccactttggtgcagtaaataagcgaccagtctttgcgcatgtttggagcctggcgtgcccgagattatgttctcttctgtgtgtgtggccacttgtcaactcagcagccaccctcccagctctgcacctccaggccctgcatgcagtaggcgcttagagaatgcatagagagagcaggagtcagcaatccaccgttctgtgctgggaaggatttcatctcacctcgctggccagagttcccatgcatttatggattcatgaaagattttatttgcggtcgagtgactggcgggggagttctttcaggaaaactagaagaaccggtttagaaccattgtgaaattccatttttaatagcagcaaggcaaggctcaggcaacttcaaaaaggggcaatcaagaattcttgtttgcacaagagaaagaaaggctgtcctagcaaggcttcagagttacctcaaactttgtataatctttagctccttttaaatgttttgtcttgtttttaacccactaaggtggttgacgaaagtgtaatgtatttggcagtatgttcagggttggtttgtcaagtggatgactggcccaggaatatcaccaggaagatgaaactatctaggagagaatgggagggcatggtatccaaatgtcttgcctttgcttagcaggcagttttgagtgcttgtgctgtttgatagcccagccacaagaatgggaagcaccagggaggtttgtggcggtgtagagctgggaggaccttgtccatacagggaaagtatccttgtcagcccttcacaggtttgggatgggggacccttattccattgtagggctataggtaccacttagcccctctgattagtgccagagataaccaaaactgcagagactcaggttcctgaactggactagtccacccagtgtttccctagccgatggtaggaaagagggttcagccttcaattattcaagtaaagtgttgggactccctggcacctgctccactatctttcttaatctgggctcagggtgttggaggttgaaggcctagcaggcatcttgcatctgaagtcacacttagagcccaaggtgacaatgtcccttgaactcagcctggattacccagtgagttctagactaccctggcctacaaagtgagactatttctaaaagcgtaatagaaaactaaaggagaggggtggttatatatttttctagttttcttttagcgggttttcattgataagtctgattgacaggtgtgatgggggataatggagatgcggtggcctcttagtgaaccctgctcagcctcccacagttggaacccactggaatgtctcccttttcttctccctagctgtgttgaagactaagaagaggatcagagaaataggctcaggcctcagccaaccccggaggagcacctgctgctacctccctctgtgctaggtatgagacattttcattttaaaaagcctttgttcttaaacacagatcacacagctgcctcgcagagatgcagtacaagctgtgatgtcagtttaaattttctagtggccggattgaaaaaaggaaaaaaaaacaaacccaaaaaaaaacaaaaaacaaaaaaacaaaaaaacaaaaaatgacacaggtgaaattaatttgaataacatatttcatgtaacccagcatctccacgggttatctcccatcatgtaatcataataaaggttctttcgaagatagataggcttcttgtcttatggagcatctccagaaccagtacttgttttccaagggcagtgcatgtcagtttgggacatatccatcacaacagcatactagccagatgggacttgtggtgaccatgctggacagtgtggctgtaacaggtgctcatgaaaaaaaaaaaaaaagatgctgtacagatggggaaagcacagaatctccagggaccagctatgtaggaggtcctgcttttcgcctgtctgagccctgctcaggcccactccttggctcactcacccttctagctccgtctctcccttccctcccagtgtcttgccctgagtttcccttccagcttcagagtcctcccacacctggatcaggttctcccctccagctgtctagcccttgccaaaccatctttctggttaggcagccattttcagggtgacctttgctcacctccatgccccccatctccagcagccacgttggatgctgtgattaggagaagcacacctactgcagtggtgattagctagctcttgaatgcctctctcacccttggcctgtgcattccaacacgaaagggccttgcacgcattctttgttctctgaggtttccacagcagctagcgagatggctactgaaaacggatgaccgataaataggaaatgaatgatgttaggctggatcaatcttgcagagaaacctaggcccgtgggaccccaccccaaccccacccatcgcagcaagatcaggagctcagctcttccagccagcactggccttcctgcttcatcttttgacagagccatccctctccctctcttgactggctttcggttgcctgtaaattatattttttggtggctgttaataaaaaatatagggctggggaaaaaaaaaagacttctcctaatagaattttattaaatggcactagtttaaaaatgtctcgtaaaaagttaattaatttgggatttggggatgaaaggcgtgatataaatgtcagttattattattacaatttcagcctcacgcttacgctctggatccagactctgatccagagtctctctgaatcccatggcctagctgctccactgacaggccagaggcagactgagctctgggatcctgtggggatggagaagactcctcaccaggttaggtggccctacctatccattcagaatgagacaggaccttgagaactggcaccactgccaggcccccagccgttctgagcgggagggtcttggcgctccagggagactccagctgcactcgcctgtaatatcaaggtcatgggcttatccccggctcagaattctgggatgttctagctgtaagtgagccaagagagttttagctctgctcttgttttacagggagggaaactgagtttgaaggggaagcggtggcttctctaacccaaggtcatgtagcaagttaattaaatttatggagaaaaagatgcagcgtgtgcagttagtaaaatggggggaagccgttgaggaaaggttcagacgatgtgatgttttggtgatgagtctagaatttgtttgtcaaggaagcagagtcctcagacttgttctcagagagtcctttgctcctttaagacacctcaccttctttccctaatggcacgcacagtacctagagggatgaaggtggccctgacctggtgtgtaattaccagagcaaggtggggggtgcaccactatgctaattgaatggctgcttgttcatcttctttgaaagagggcatgacagcacccaccgagaggtaggaaccaggagatggagacagtgaatcgtgtctgtctctagtcatggcctctcaaaaccttgctggagtctagcctcagagccgagactgacctcacacacaggttggtcatttgagaccaatgagtggctggtcattctcctctgcaagtatctgacaggtgtctgcttgttcagagctggacttcttccccacggcctgttcggaggggatggctgcagaaaggcgtgcctcctggggggtttctgcctcgctgtctttatactttgctccttatagtatgctcctctattttgagagttgacatctcctgtctccctgccaaatgaggcttcattactcattgttaacattcaacaaagtcatgtacgacacattcaggtgtggtgggcagaggcttagggagcaaggaggcaagctctataaactccggcctgggctttttagtgagtgttcctctaccagtgattactgttgtccaggggagtttgaattcagacacaactgtctgtgaacctggcttcctggagcgagagacttcacaccagtggtcttctatctctatagacagtggggtcaagaacaactactctgtagtatgaccttaagccccaagaggaaggatgaatgcagtcttcaatagtgaccaaacccccacttaggtggcactccagtcatggcagtacttgcttacagtgtccttgtggctcatgttaccttgttgacccttctgggcagggagtttcttgaggtgttcatcttattaagtccccacagttcagtacagatttactacagattcccactagaaccttccagttgccctgccacatgcccctggccagtgaagctgggtggggtgctctggcctctgcctacattaggtttcttatgtcccctcgctcaacagtgcaaactggtattgtttttgtgccagtgggcactgatatgaatggctgtgccctcactgatgtagggtatacccagggtcactgtgattgctgccatgactgggaagtgtactgcttcgcagcatttggaaactggcagccacgacttcttgtctgagaagtgggaaccgaagggcagtgatacagctggtcccatgtcagtttctcagcctggtcgtagtaggtgtgaatgaagcaggaatcctagcttcctggtctccagtcctggcatagcaggggctaccatgtgagtgagcttgctgggctttgggcttcttgtggtaacatagcttcttccacatggaggcattggaggaaatagctggaagaggaacgttttcctttcggccatcatagaggtctagattccctagacaagtaccataactcaggcagccgtggatggagtggtcctacatagaaagtgagcctttccttcccttaagcctcctttcctctctgtggcttgggaagagaacagatgtagaatcacccagttcattctcctagcaggctcctcagcatcccatagcctggccatccaacttgaatgcctactgccaaggggcttagatcctctccttcgggtccttcctctgaaacagatgttcctcttcaccctaatctcaggcctacctctttcttgcttccattctcagtggactatgtggtcccctagagcaataaagaggccccagaaggggccccacgttagctggcacggcactggctccacctgggaaagtactgttctcagacgtgtaattgtgtcattgccaataatagttggaaggctctagcaagcaagggctttgctaggattgcttcctgattaactaggtcaacatcaccaaaatcagttgccagccaggttgagctgcctggttcatgccacttcccacccagccaggccagagagtttacatggaaggcagttccctggctttggcttgggggagtccttgtccctacctgaaaattatttatattgctattttattaattttgccactgttatgaaccacaacatgaatacctgatatgcaagatatttgatatttgacttctataaaagggtcatctgttctcccaaaaggatcacaacccataggttgagacccactgccttaaactaacacagatctcacctcctgggctgcagctgaaggtagcagnnnnnnnnnnnnnnnnnnnntcccctggctttggcttgggggagtccttgtccctacctgagaagaaagccacactatacacggttcttcttcggtgactgagacttttttattttatctgcccccccccccttcaaaatcttccattaaacccccgtagatcctgtttcaaacaggcaattagactaacaacgtaattatatccctccatgctaattgtaactagtttaggggaaaaacaaagagaaagaggctctgaaatttctggaaaccaaaagccacagttgtaattccaggtatttcttgtgtctggttggtgaggggctggtgtctgctgttgtgttgcttgccttggtctaggctatttctaggagcaccctggctcttgtgtcttcttctgagtgtgcctgtggctcttcctgtcgctggccttccatagaattctttttctcctgccccgtctttgctgactgtgatctcacttctggctgactgaactgcattcactcacagagaatgaagataaggctatggaggccaaaggaggaaggaggaagcttttctttcagctcttgtttgtgcattgctccttgggaggttgtgggagcccagaattggcccaggtcctaggatttgaacctggggttgtatgacttgggtgacctggagtgagtttgtcacctacccattttagcatttgcctgagtgtctccttggggccaggccaagatttggtgaaagagcctgggtccttcctggcggcatccagcctaggagaagacagaggtaactggagctggagcctttgggaagagtgacatcagaagtcctctacttctgtttttaatggtggcatccaggtcataggtcaggatggggatagaccagaggtaacctgctgtgaaggccattcagagccagactgggaagatgggagagaagacagctgcttaggggcagggtagaagcacaggtatggtggagcatcgggtgtgaacgtggtgtgggaagacaggtggatgaagacgaacggaagctgtcgagaaggaggagggctgtggttttcacctcagtagaaatgagagtttgggatgcaatggtgaggaggtgagggagggtgacaaggtcagccttatgccttagagaggcaagctcgaggaaggctctcaaggggcggggtggtggcgttaaatggagataaggaagcctgaggggaggtatctcagaagcagaggtactttctgagatagagcggaaccagctgtgtgacgtgtggcatcacattccgagtagagcaggtgccagatcagcatttgtggctgggagccttgtaccaaccaaacccagagtgtcttctccagtgtgcactctgtctagtatccacttcagaggagcagagctcggtggttctgtggctgtggccctctcggatatgctgccattttgcattgtgccttttgcccttttggcctcagcccatgggagaaccagtgtttcctgtgtcatcttccttgtctcagtaatagcatcctaatagaatgaccactcttcccttaggacagatgtcacttcatggtgattctgaggtctggggtggagagatcgtgtcgtgttttaggtgcagctctgcttggaaccccctgtccttgacggtcttcttacctggtggtaccccatttgggctacttggtgccaggtggttcagtcctgggcttgccatcagctaatgcagaactggcatttcattaaaattccattagctattttttttctttttttaaaccaatgaacaatttatagattcattaactttttacagcacttgtgaaaccaggaagaaaggaataaaggaaatgaaatatttggtccgcagactttcactcaaagatagtggcccttaaataaggagcataaaaggtaggtatgaaggctagcctgagaagcattgggaagatatgggacctccttgatatatccaacactgaaggataacttattctcttcctgcctcttttcctattgccatactgggaagccattcttcttttcatccaaaaagtggttgctctcctgtgccagtggcctgtgggagctcatcacatccgacagtgactctacatgtgtttccttgtgttgaaatttgtgatgtcttgtggctcttgttctatttcctttagaagaaactgggatgccttgattgagttgtgggcgtcagggccagacaaacttgggctcaaactggggatgtatgaggaaggaaaggggaagcgatatggatattttgttgctgtgtttggacttctgatcctcctgccctgaccattctgagtgctaggatattcacagacaggcatgtgctgtctgacgtcatgaggtgctgtggattgaaatgctaagcaaacatcctgtcaaccaagctgcacactagttcacgagtaacccttatcacacaatggcctatcgaagatgaagtggaaggtggtctgattgtgtgcccattccagcctggactgtgattggaccacaggattgtaccagtttgtcatccacaggtgtgctcagtccacttagttctaccaacagcaggacatgtcctgttttgacacttccgtttccccaactgtaaagtgacgaatactgaggctgctggacaggatcagacacgatggtccgtttgggggctgacactccagagggtcttcacactagcagtggcctgctgctgtggttgctaccacttaagttatacaaacttacccaggatatgtatcacatacagaaccgcttacttggagatttgatgcccaagggatctcagaaggggaaaactgggactggaggaagacagctcagcagtcaagaacacttatgtttttctagaggactcaacttcaaatcagacttttcacaactgtctggaaccctccttgggactctatggacactgtcatacattggatggatatggatactgtcattcttgtatgtgtggaggtcagagattactttctgagagtcagttctcaacttccaagtgttagctgtgcagaaagcatctttattgactaagccatcttgtcagctccagaccaggtttcagtaaggttacaagtctcagtccagtgcagatgacactctgctgtcactttgtcccagtgcccatccttatagatgggcagccgaattgtttagagtattgtgaggttttcctcataagtaatggcaaagggacaaagcagggaggacgaggaaggccattcagttttgcaccctccagggtaattgctttggggatcgtgtgcgaatttgttttggttcactttatataaggtgtgtttgttcgctcgtatagttttaactgagctctggtcacttcagtttagcatttttgtttcacctagctctctccaccatttcaagcatcttgtcttcagggctttggaagcaggtatttgctgatgtttttattggctgtctgaaaattgctacataaatagtatagtgggcatcttggtgtgtgaagcttttcccttcttttgtacaatattcacagatgcagtttcttccttccttccttccttccttccttccttccttccttccttccttnnnnnnnnnnnnnnnnnnnnttccttccttccttccttccttccttcctttcttttggaggaaatgtatttttttatttttttattattgggtatttatttcatttacatttccaatgctatcccaaaagtcccccacactctcccacacccattcccccacccacccactccaacctcttggccctggcgtgcccctttactggggcatataaagtctgcacgaccaatgggcctccctttccactgatggccgactaggccatcttctgatacatatgcagctagagacacgaactctggggggtactggttagttcatattgttgttccacctatagggttgcagaccccctcagctccttgggtactttttctagctcctccattgggggccctgtgatccatccaatagctgactgtgagcatccacttctgtgtttgctaggccccgtcataatctcacaaaagacagctatatcagggtcctttcagcaaaatcttgctagtcagcgtttggaggctgattatgggatggatccccaggtatggcagcctctagatggctcatcctttcgtctcagctccaaactctgtctctgtagcccttccatgggtgccttgctcccaattccaagaaggggcaaagtatccacaccttggtctttgttcttcccgagcttcatgtgtttcgcaaattttatcttatatcttgggtattctaagtttctgggctaatatccacttatcagggagtacatatcatgtgagttcttttgtgattgagttacctcactcagaattatgccctccaggcccatccatttgcctaggaatttcataaattctttctttttaatagctgagtagtactccattgtgtaaatgtaccacattttctgtatacattcctctgttgagaggcatctgggttctttccagcttttggctattataaataaggctgctatgaacatagtggagcatgtgtccttcataccggttggaacatcttctggatatatgcccaggagaggtattgcaggatccttcggtagtactatgtccaactttttgaggaaccgccagactgatttccagagtggttgtacaagcttgcaatcccaccaacaatggaggagtgttcctctttctccacatcctcaccagcatctactgtcacctgaattttttatcttagccattctgactggtgtgaggtggaatctcagggttgttttaattttcattcccctgatgattaagggtgctgaacatttttttcaggtgcttctcagccatttggtattcctcaggtgagaattctttgttcagctctgagccccattttttaatggggttatttgattttctggagtccactttcttgagttttttatatataatggatattagtcccctatctgatttaggataggtaaagctcctttcccaatctgttggtggcctttttgtcttattgacggtgtctttttgccttacagaagctttgcaattttatgaggtcccatttctcaattcttgatcttacagcacaagccattgctgttctattcaggaatttttcccctgtgccctccttcgaggcttttccccactttctcctctataaatttcagtgtctctggttttatgtggagttccttaatccacttagatttgaccttagtacaaggagataggactggatcaattcgcattcttctacatgataaccgccagttgtgccagcaccatttgttgaaaatgctgtcttttttccactggatggttttagctcccttgtcaaagatcaggtgaccataggtgtgtgggttcatttctgggtcttcaattctattccattggtttacttgtttgtcgctataccagtaccatgcagtttttatcacaattgctctgtagtacagctttagatgaggcatggcaaatccaccagaggatcttttatccttgagaagagtttttgctatcctaggttttttgttattccagatgaatttacagattgccttttccaattcgttgaagaattgagttgtaattttgatggggattgcattgaatctgtagattgcttttggcaagatagccatttttactatattgatcctgccaatccatgagcatgggagatctttccatcttctgagatcgtctttaatttctttctttagagacttgaagttcttatcatacagatctttctcttccttaggtagagtcacgccaaggtattttatattatttgtgactactgagaagggtgttgtttccctaatttctttctcagcctgtttatgctttgtgtagagaaaggccattgacttgtttgagttaattttatatccagatacttcgttgaatctatttatcaggcttaggagttctctggtggaatttttagggtcacttatataaactatcatatcatctgcaaaaagtgatatgttgacttcttcctttccaatttgtatccccttgatctccttttgttgtctaattgctctggctaggacttccagtacaatgttgaatatgtagggagaaagtgggcagtcttgtctagtccctgattttagtgggattgcttccagcttctcaccatttactttgacattggctactggtttgctgtagattgcttttatcatgtttaggtatgggccttgaattcctgatctttccaagacttttattatgaatgggtattggattttgtcaaatgctttctcagcatctaaagatatgatcatgtggtttttgtctttgagtttgttatataatggattacgttgatggatttccgtatattaaaccatccttgcatccctggaatgaaacctacttggtcaggatggatgattgttttgatgtgttcttggatttggttagcgagaactttattgaggatttttgcatcaatatttataagtgatattggtctgaagttctttatctttgtggggtctttttgtggtttaggtatcagagtaattgtggcttcatagaatgagttgggtagagtaccttctgtttctattttgtggaacagtttgtgcagaactaggagtagatcttctttgaaggtctaatagaactctgcacgaaacccatctcgtcctgggcttttttttttnnnnnnnnnnnnnnnnnnnnnnnnnnnnnnnnnnnnnnnnnnnnnnnnnnnnnnnnnnnnnnnnnnnnnnnnnnnnnnnnnnnnnnnnnnnnnnnnnnnnnnnnnnnnnnnnnnnnnnnnnnnnnnnnnnnnnnnnnnnnnnnnnnnnnnnnnnnnnnnnnnnnnnnnnnnnnnnnnnnnnnnnnnnnnnnnnnnnnnnnnnnnnnnnnnnnnnnnnnnnnnnnnnnnnnnnnnnnnnnnnnnnnnnnnnnnnnnnnnnnnnnnnnnnnnnnnnnnnnnnnnnnnnnnnnnnnnnnnnnnnnnnnnnnnnnnnnnnnnnnnnnnnnnnnnnnnnnnnnnnnnnnnnnnnnnnnnnnnnnnnnnnnnnnnnnnnnnnnnnnnnnnnnnnnnnnnnnnnnnnnnnnnnnnnnnnnnnnnnnnnnnnnnnnnnnnnnnnnnnnnnnnnnnnnnnnnnnnnnnntcattgtgtcccataggtttgggtatgttgtggcttcattttcattaaactctaaaaagtccttaatttctttctttattccttccttgaccgaggtatcattgagaagagtgttgttcagtttccacgtaaatgttgactttctattatttatgttgttattgaagatcagccttagtccatggtgatctgataggatgcatgggacaatttcaatatttttgtatctgttaaggcctgttttgtgaccaagtatatgatcaattttggagaaggtagcatgaggtgatgagaagaaggtatatcctttgttttaggataaaatgttctgtagatatctgttacatccatttttttcataacttatgttagtttcactatgtccctgtttagtttctatttccatgatttgtccattgatgaaagtggtgtgttgaagtcccccactattattgtgtgaggtgcaatgtgtgctttgagctttactaaagtgtctttaatgaatgtggctgcccttgtatttggagcatagatattcagaattgagagttcctcttggaggattttatctttgagtatgaagtgcccctccttgtcttttttgatgactttgggttggaagtcgattttattcgatattagaatggctactccagcttgtttcttcagaccatttgcttgcaaaattgttttccagcctttcactctgaggtagtgtctgtctttatccctgagatgggtttcctgtaagcagcagaatgttgtgtcctgtttgtgtagccagtttgttagtctatgtctttttattggggagttgagtccattgatgttaagagatattaaggaaaagtaattgttgcttcctattatttttttgttaaagttggcattctgttcttgtggctgtcttcttttaggtttgttgaaggattactttcttacattttctaggatgtggtttctgtccttgtattggtttttttctgttattatcctttgaaggactggattcgtggaaagataatgtgtgaatttggttttgtcgtggaatactttggtttctccatctatggtaattgaaagtttggctgggtatagtagcctgggctggcatttgtgttctcttagtgtctgtataacatctgtccaggatcttctggctttcatagtctctggtgaaaagtcttgtgtaattctgataggcctgcctttatatgttacttgaccttttccccttactgcttgtaatattatatctttatttagtgcatttgttgttctgattattatgtgtcgggaggaatttctcttctggttcagtctatttggagttctgtaggcttcttgtatgttcatgggcatctctctctttaggtttgggaagttttcttctataattttgttgacgatatttgctggccctttaagttgaaaatcttcattctcatctactcccattatccgtaggtttggtcttctcgttgtgtcctggatttcctggatgttttaagttaggatctttttgcattttgcattgtctttgattgttgtgccgatgttctctatggaatcttctgtacctgagattctctcttccatttcttgtattctgttgctgatgctcacatctatggttccagatttctttcctagggtttctatctccagcgttgcctcactttgggttttctttattgtgtccacttctctttttaggtctagtatggttttgttcatttccatcacctgtttgggatgtgttttcctgtttttctttaaggacttgtaactctttagcagtgttctcctgtatttctttaagtgagttattaaagtccttcttgatgtcctctaccatcatcatgagatatgcctttaaatccaggtctagctttttgggtttttggggtacccaggactgactgggttgggagtgctgggttctgataatggtgagtggtcttggtttctgttagtaagattcttacgtctgcctttcaccatctggtaatctctggagtcagttgttatagttgtctctagttagagcttgttccttttgtgattctgttagcctctaccagcagacctgggagactagctctctcctgagtttcagtggttagagcactatctgcaggcaagctctcctcttgcagagaaggtgcactgatatctgttgatcggatttgcttcctggcagaagatgaaggcccgaaacacggcctgtcccaaaagctgttagcttctgtagtccacactctcacctgtgcagactagtcttggtgggatctgggaaggaagatggctcctgcggatgctcctgcaaagccctcccgcctggggtggacacctttcctctggcagggaaggtccccggatgtctggattgcaaaacggggtctgccacagaagctctgtggctcccgcctgtcccagaagctgttagcttctgtagtccacactctcacttgtgcagactagtcgtggtgggatacccagatgcagtttcttaaaatgagattatggagtcaaggaattttggaattggcacggctgtagtgatggtgccaggttagaaatggaacatggtgacacatgagagagacatgtagcttctctggagagtcttggtggcagtgaagacaaaagcctctgccctagtttgaaatcttagagggatgtgtggttgctaacttgtccaaagagtctggaccaagccatgagcggatggctgggatgttcagtttcccatgccaagctggaagttcatacttggttgttgtgatcaaagagccccatatacagtctagctaaagaaggcatatggctagcacccattagggaggctttcaatctccattctaacacacatgaccttccttttccatgcattcaacacactacctagctcagaaggccatgcatccatggcatagcttttacacggaagacttgcactggagaagcatatggaggtacaggaaggggagctgcaagactagctttggagaatgcagttgtgcttggtgcagtgtggtcagtgtttagggtagacttccaagaatctgactgtgtctccatgttttctgtaattgttaagtcctgagtcttttcataattttctagctcaaatgaatcatggcaattttccatagtctactactttgcttctgcattttgtttactatggatgttgtgataggatggtttaccagatgtatagacatggctgtatggatgctgatggtgaaagcaatagagtcgttaattccataaagtgtggtctgggctggtcattgatctaagagccttacgcttatgaactcctcttttttgttgaatgacttcatcaaatcaacccaatctgtgaaagagaaacaggatgtgggatcttggaaaggaaaggaacttggtagttgtcttggaagacgagaatttaaatctgcatgttgatcctaactgtatggctttcagtaaagtgacctgaatcttgctctttcctctctgacatggaaagtatgactccagcctggtgaactgaatgaggtcataggtgtagaaatctcccttcactaagtagacggatgcacagggctgatgagacatgtcattctccctcacccagacccaagcttcccagaacctgagtcatcttcccctttaaggatgctgtgtagacgtgcttgtctttggaccccagggaatacagaggcatggcccctgctggggaagatggatggtccagttgagaagacaggtcataaaaagatgactgagtatcccagctgcttgatcaatactgtttgaatggctcaggccataaatgctttaacaaaacagggagggaggtagtttctgtggcttggaggaggtgggaactgagccttgagggcaatctttcatagaatgtatctaaatcagaccttccccaatagccaggacaaagagattcccagagttgtgactgtgccctgatgtggtagtaatggtattgcctttagcaaacttaaacaacagcaaacagttggagtaatctggaatagccttgtagatggaagagtttggaacctgcagagcttctgtcccagagagtagtgaatggtctggtcaagagatgcttctagactgcttggatctcctggtggtgagttgggatagctagtcttccatgtttgggttaatagcaagctcttagaaaagaattaaaatatccatgaaaattatgcaggcatgcccactcatgtgccatgggtagactatggctagattccacacactctccagctgcagtcctgagatcccagaggctcttctctgagctctaagagggccaccttttcctagttgtgttgtgtggtagaggactacatttcctagatgcctttgctatctggccttcaactgttttcactcttagggagattggaatagaatagggtgaagcctaagatttttttcttctctgtctctgcttcatgaggtgtttcctgtgtggctgcagacctccctctgtgctccttttcttttgggttgctcttgtggttttgcttgtgtcagatagctctatcttttggcagcatgagttcttcatttctctccaggtcctggctgtcagcagctggtccctagatttgactttggtcaaaggcctcatggggctcagagctgtatgttaacttgcctgtatttaaaagacccaagttagaggccagcctgatccagctacagagcaagttgtaggacagtcagagctacacagaaaaaccctgtctcaaaaacaaaaaaagaaaagaaaagaaaagaaaaagaaaaagaaaaagaaaaagaaagaaggaaagaaagagagaacagaaagaaagaaagagaaaaaggaaaagaaaaaagaaaaagacccacagtgatcttcctctctctttctcctttaaaatgtgtttgtttgcttggttcattaatttgttttggcccattccctggaccccaaagaatggccttgacaggacactctgacactgcagtcttatggaatctattgtgaaaaatcacagctgccctaatgaattcagaacagcagatttttttttaattttttttttttttttttttttttgcatttcagaagaaaacagaattgtagaataatttcaaaatagtctggctgcccagatttcccagcaggcgctcgctgggatgtgtagacttaccatcttcttcatgttttgtaaggcttcttgttttgtgggggaagtgggcgactctttcctttccaactgagagagaaactattttgattttgaaaaaaacgtaatacagttgttcatcctccttcccctgttagcctggactgttgctcttgtgatatatttatagagcttgtggctggctgaccagcagttattttgcaagaggaatttgtaagatttttgacttagagcatgtgttccaagctttttcacacacacacacacacacacacacacacacacacatactttctctgtgatttgtttctgggtatctctttctctctgtgtgtgtatatataaccaaaatgtaaaagccccaaactatattgctctattgtcttgagatattttctgttgtgatgacctagaaagaagtgttttgggtcagggaactcagtatctttatctgtacaaagaaaatattggaccagtttagaggtgtgggcttgtaaccacccttagcttagttcatttgcagacattagtagaagatcacagtaatctctatggagctctaatatggccttggaatcctctgagcacacggtcccaggcaggcactactaattgaataaaattggctctgaaataaaacctgcttgcaattcctgggctagatgattccctagaccccagttagaaccatagttctctcagtattggcagtacaattcatttatgttttcaaccaggctcatgaagccccacccacatggagcacagccccagccctagtcgtggtgcagccacattcaggaagcctacagtgtggctggtaacaagactggaccaagttgtccatatgatcgtgaggacttcccgggcagaataatctagccagcaagacagcaggacaaagggacaacagagttgggaagcttcagagctgggagagtcctcaaaacccattctctccaagttttctgaacttggagaaactgaggtttggagaagagtatattttatctcccgtttattcgcatgtatacattttacttacctttcgagcttttagacagggtcttgctatgtagcccaagccggccttgaactctcgtccccttgtcatagtcttctgactgctgggattatagttgtgcctcatcactctgggcaatcaatgatggttttatgaagtccacttctaagaagtgattttagtaagaggtcattatttgtgtgggtctcggtgtgccagatgctctgtagagagctttgtactgcaggtcagtcctcaggaatcctgggaagtgagcatccttattgccttgtgttcatagataaggaaactgagtcacaagttaatgtgtcacccagatattaagctatggagccagggattaaacccagccatcagcctccatactccatgctgagaatcactatataaaatctgtcttgctggagtaagcaggatttcttttgaaactacgttaattttgtaccttaccgtctgtgtcatcagaatgactcttcaggcctatgggccatgggacattttagcactgactgagaatgtcccggcagcctttgtttttaatctctacttgacactggaggaaaaggagattcagagtgggaacatgactgggcaaggtctcaggacttgatatcctgggagaagcggagtgcaggactacctggtttcacaggttggtgttagagggcttgagaggtttctgacctggcaccccactgggcaaatggacaaactgtggaccaggaccatcatcccagcaggccatgagctcttcctcttccctgacaaggtcatctgggcagctgaagggatgtcaagcctcgggcctgctcgtgaagtgttggagagtggcctcttccacacccatctcacttaaaggcagccctatccttccattcttggtcatctcattcagacttcacacgcagcccttcctgtatttacaatagatttttttcctccccaggaagccaaaagaaaaaaaaagtttcttttgcatgcccctcacccacttcctgctgatctgaagtgaatatttatcacctatttaatgagtaacctgagtcttgccatggtgacagtgtgccaggacatggtttatagctgatctggttttaactcgctccagcaggttttccctggagttttctgtaaaattataaaccttgagagagaatttttgtggaaattggtcacatgactcgcccttctgtaaactgagaggttaactgggtgactgaaagaagattatctcccccccaccccctccccctcccccgtccctccctctctctccctccttttaaagaaaacaaacacagcagcattgatgcacccagaggagcatgtcccctccagatgacagagaaagtcactctccaaggtcaccttgcagcctggaaatcaggctgtcattgtaatgggacagcccagaccctagtcctgtgagcttttcttaactggtttctatagcttacctgtgaggcttccctgaccatcaggactgtccccaccttgaggagtggcagaggacatcagagagactaaggcacactctgtgccctgagctgctcctgcactgccgtgttatcttccttaaggttcttcttgctgcattaatggtgctaccacacctgtggatgggagacctggtatagaacatgtggctgataaatgcgtctcatccttaccatacctgggtgaggtgggcacagcacctcccaccttcattttacagaggagtgggaccactctgaagccttgacctttctaaagagttggccttatggcccatgctgaccctcaaggaggccgccacccctgactcgccctgtgggatcctcttcctgctgtggacattaaacctgagggttttgtgatttcttccctgcctgagcttccacctcagcctccatctgctttcaagatctctggtctgagtacttcggagacagaattctgacagtgtctcctctcctgaaggcccttctttaagacgaaagatagataagggcccccatactatctctggctgtcctttgaacatataaaataaacgtaatgtatttaaaaactgccacatctcactgggcctgacccaggagaactctctttctgaagcaacatttagaagcattgtgatcctcccatgttaggaaggcaggaacacacattcagagctggagccatcacagcagcctttgaatgcatgacccgacttgctgctcccatcgtagtgatgacaactagtccctagagatgggaccaggactgtgtagtctggagatccctgcatcaagctgtggaggaactgctgcctcttctgaggtcccatcagaggggattcatcaccttcttccctggtgggctggtctgtgcaagcaggtgattgtccctccctgctccctgcacactggaagaatggcaggaagttcttaacagcacagaactctattttgagaagcagcaacaaacttttgctactgtctgagcaactcccttatgcctgcttggtattggggcactttcttcatgccatcttagttgattgatccttgcccagagagtagcctgagctcagtggtctatgtgtttagtcaggatctcttagtgagagcctgtgcacactgatggactggtcctcctctacagaggtcaaggctgcagcacggacaacatggtgcccttggctctgctctgcccctggcatggcgctgctcccatatcttagtctatgcaagctccctccgcccccatatcttttatttcctccaggcagtctaaatgcacacacacacacacacacacacacacacacacacacacacaacccccaccccaccccagggaagccatacggaccctacagtctagttagagcctgttgatggggatgtccttggaaaatttatctttccagcacattggtggtaactgtgaccattggtgacaattggaagccaccaagtcaccactacctctctcctcagctgctcttgttatgggttccctagtaattgtcctggtgtttagcccatatggaacactcatcagagttccagttcttcattcccaaatcttctctatccgcccctactcaccccttagtcttgcaatccagggcagtcagtggctttgagcatccatgttcagttgggaaataagacacaaatttgaaacctaagtaccatataaataaaccattgagtgaggtctgagatacatggcctaaccggagagattataaataactccattttggggaacagaacctctttttataacgtgaaggtcttggctctgcatcggcaatagtcagcctgttttcatggcaggaagacacttcctactctttgcttggagcctgagtttggagatgaaggtccgagtgagtgcataaaggaagtggccatagtgaggagaactgatccagctgctcgacctgaaccattttgtcccctatggctgctgggtaaattgttatcagaaggatgtgtctgatagtggcgtctcctctcctcttcaggagaggtcacatggcccaatcctctcaccctctatgtgatatatgggctgctaaagatggataccaggaagctatccattctttactggtgttctgcttcaggttgccttgtgttttgacttttaattttcctcaccactttctctctctgcccagctcacatccatttcttgagtgagtcccgttctactttcttttccctacctctccactgccacatcccaggcactgttactttctggaccccacccatagcctcgccagcctccctcctgctcagggcctgttttctgagcagcagccactgcagtatttctgaagtggaactcaaattgtgtcgctttggcaagacctttttgtggctccccagggtaagaaaaccaatgctctttagtggcctctcagggcccgatgcgagctgacttctcattacttctccttgtctctttcacttactgtgtgggcacactcctggcttgtgggcttttgcagtggccattcaccctgacccagatacctcgtggccgggacttcacctcctcctggtgttcgctcagtggtgcctaccctaaccattttaaattctgttcataacccacaacttggccttgtgcccagcattcctgacatctttaccttggtctgctcctgcatcgaactcttttaaaatgatacatattttaccgattacattgaatgatgccatctgtcatttgactgcaagtgctctgaaggtagggttagctcggggaaggcattctgggagtgatgggcggatgactccctacctgggtccttgcttattggggaaggttgtgtgattaattcggaggctatgctggctgttgtgaaggaaagggatatgatgatactccgcagttcctcaacgtcttccataaatagtaagtagcataggactgttgctgggcaggtcctggggctctgagagctccttggcttgctaggccttctccctagcaattttaatttagcttatgtttaatttaaatctttgaggtaacatgcattctaaatatgggcacttgcacatacacacatgtacatacatgtcttttctggacacctaagaatgtggccttcgtgtgagttggtatgatggagcatgcagaaagctttcttttgcctgctggtttccggtgcctgaggatactacaaacagcaaagtgtactgactcctggggattggtttagaactcagcacagtacttgacacatagtaggttttcatgaaatacttacagaggtagtagggcatgaactgatcattgaaactcagttgatgattggggggggggagatggctcagttggtaacatgattatagcacaagcatgggggcctgagtctggaccccagcacccaagtaagaaccgcggaacattgtgtgcttgtaatcccagcactgagggaatgaagacggggaggtggggatccttggacttccctgaccagccagtctagctgcatccctgagagaccttttctcaacagataggctagaaagtaattgaaacaagtacctcccccgttgacctcttttctccatacacgtgagcacacatacatgcgtgtgtgcactcatccacatttcatccatgctgcgtacccagtgtggtctgatcatcagggcaatcttgcaaacagaatttcctgagcagcaatccctgtagcgaatccagtgccatgtgttgagtgttctacctgagctgggtgctggagacttggcctaggaggagtgacacattgtctggagtacaccaggtactcccagaagggtggccccagccctatggcgttggtgggaggtgctggtggtgctgtcttagcagtgcccagagaacaatgcacaaagacaagttaaatctagctgggggaggggagcgagtcagtcctcccgacaggaagtgattttcaagtagccatgggggatggggatggcaaagccaagaactaattataccactatggaaatgcaccatgcagaggcctgtcctggtgccatcttgaacatgcttaccccaagatggtcaccccttcaccttcactgaggtgccagatcacttcagccccctcttatcacagaaaggcattttcttcttggagatcaggcatccaggacccaaggagctgtttttcctccattgtgcaagcatgacaaatcattaatttttgattgatttgcttagaattatgggcgccccagcattctttccgccactgaacagctgtataacaaatgaatatatcacagtgcacaaaagattggagatctaagagaagcaattacattggccaccctcccccaccttcaccccttcccagccgggaggaaatttttatcaggaattcctcaagtggctgaacaaaaatgaaaagaaaaaaaaaaaacccttttcctaattgaattaaatcttcgtctctgtcttttacagctgatctccaaacacacaccggttctccacatgtttggttgggttttgtccatccaggaagaatctttaagaatagaatctcaacttgtgaactgaaaccaaaatgaaaaaaaaagagagaaaaaaagaaagaaagagagaaagagagaaatgctctctactccgatttctttctttttttttcttttttacattttctttttctttctttctttttttttttttttatttttcggttgctgctatgcctttaagattttggaactgtacccgtgcactaaatgtgacctccataacttttaaattaagaatttatgctggcttgaaatttatgaaatatttcagcatgaaagaaagcctttttccctcaggaaaattgagcaataaatcacagcgctgtggatttactgccctagagccagcgagagataggatttttttttttttgcttcattctgaaaaaaaaaatgtaataataagacagcttagctgctgtcctcccactctctagaatttttaatttcagctgtttctgcttggatttatttccaatattcctgctcggcttttcaatttcctcagttattaaattttaattcagtgcattagcatttaaattaaaaaagggtttattttatcgaaatcgttggccagcccccatccccgtagcacacgaattgcctgtttctgccatttgcacaaaatgtgaaatgcagctaatgtcttacaacttacatttgcacaaatttagaaataaaatttctgggtttggaataatattttctttccaagaaaacccttaataagagaatggaaaagaacatcttaacatgcatctgggaagggaaaggagggagggaggaaaccaaaactagccttgcccaggtactggagagaatctgggggtgaggaatggagggagctgggaacgagggcggggcaccagataggggctggagggccgccatgtctacccccagccagcaagaatcaggaggaggcttcccccataggccatctcttctatatctcattggtggtagaggttgggccaactcaacatagagaggcagaggtggtatggggctggatgtggggttggctttaccctcagcgcctgcccccattttgacccacagagagtgtcagtttacaagaagcctgcctgaggttcacagttagacacagacagaaccagagtgagagaagccgaaaggaggggtccttttggagcacatagtttctcagtagaggatcacactgtgatcatagcaatcacgttatctaagctgttgcaacttgggccctacctaggcttgaagctaaactgtacttggtgtcatctgggccattggagatagtcttggggttgtggtggtctggtagaacctatcgagctgccacctgagcaagggattctgggcagtccaggatggttctgcagtttgtgcagaccattctgctttcccgaaccttggtttcctaggctcagtaagtgttggcctctgggactgcttctggggctgctgagtccacactaaatatgtttacatatgtgaccttatttatctcagcctcatgccagtcacgaaaactatgcttaccatgtgctgctgcgatagtgacatattgtcttggagtctccctgctgtgtccattgcccatccacccttcatcttttcccagcactacctcatggtcacgaatggaagaacactccccggtctagatagtccttcctttagcagctctggtacctggtgccagccagcatcccccaccccacctcggccccattctctgcaaggacttgtttcaacaacagtttgaatagttggagacattttgtctttgtcactcatttttacaaaacaatcaggagtgacttcgagctatatggagccaccagtcagcgactgagaaatagctgagaactgtcacttgtgtccacacagagcatccatcctctcttcctgctacaccctcactgtgttggacctagccagcctggcataaaatcgtgataggaagggctagagagatggctcagcgtttaagaacatactgctcttgcagagggtcagagtttagttcccagcacccacagatggcagcccacaactacctgtaactccagcttcaggaaatctaacaccttctgaccatcacaggcgcatgtatatatatgtggtgctcataaactcatcaacacacacacacgcataaacagaaataataaatctttaaaaaaattgttgaaaaagacaatgttagaagtgtatgtgaaatatataactccatactcagaggtcaacctgaaaggcaagagattatttggaattttacaatttcttaaaaaccctcaggatcaaacgtcttctgctttgtaggacctgaacacaaaagcagccttatatcaagtctgaggaatggggtgtagggaagaggccgtagttgatccagttcctttgcttacatgaaatggcagacctctttccacttcgtttcttctgaaatcacaagctgtcactctttccaaaccatatgtacgtggcaccttccctgcctttaaactgtctgtatttgactgtgtgtggtgatggggacctccacagtgccacttggctcttccaaaatattggcagaggacaaaggattctagggctgagaagggtggcttctggagtgtccctggtctggtctcatagctgtgggactttggataaacaaagtctttgagcctttgagttgggacccactgtgggcattacaggggaggagtgcccttcactgacactcacggagaagtcggcaagggaggacccagcaaatgctggaactgagctgagagccaggaatgggctctgtggagaagcaggaatgtcaccactacttgcctattaccccggagggctgaatgtcactactggactatctggtgttttggtttggtttggttttaagaaaacctgggaacatgggctttaggggatgaaactcttgttatgaatggatgatttgttcaaatcaaacccagactgtggtctcgccaggttttaacctctcgtaggcacgcatcaaaaggcagctgctgtttttactttaaggctccacacaacttagaaagcttgggcacaaaaagatactgacctttgagcagtagagattgacccaagggaggagaggttgtccctcaggagtgcatgcagggtgactgtgtgtgtgtgtgttatcatagaaatagcaggtgcaccacagaccctgccaggagggcttgaaaatgtgtggcgtgtgcagtgggcactggggcacaagttcttgcacttcagacacgttctcctcgaattactatggttgctggtattttgagaacagtacccgtaatcagtgggagtgggatcttggcactgttcactttcctgtagcctcctttagtctctgggccaaagtcttcctgagtccgggactagtaagagtcatgaccccaggacattgtcagtcaggcctcctaagacaagaagaagcccccagggctgtagtctctccattcgaaccagaattttccgatttgtgaaaatttcatttggtcagcttgatctccccacccccctcaccctaaataaaaagattaagagctggccctctcttgctttcttctgctcatagggttggggggacagaatattttaacataatgggatttttcccctccggttggtaggaataaatctgcagccactgttttattggaaatcccagctgaaaataaaaacagagcaattcaatctcagatttaactagttacttactcctgccgcatccccagggcatgtggttgctggctttgtgctggcagtgggggtttgtgctggcagtgggggtttgtgttggcagtgggctctccactggatttaaatggccaagcagctgtgagtaggcaggtgtcctgactccctcttgccactggggacaggatcttttgcctggaggaatggaacagtttgtggccctgactctctggagactattctgtgggcaccacccagggtggtagtggtacccaaaatctgtatctcctgcagtgactgatggaggtgttctgggtttcttttgcaggtggacggagccagtgcacctggaaggaaaagcgcggttaacaggtacatccctcgccacaccacatccctccctgtcccaagtttgaccactggaaagaggagaggcacccatgcaagctcaagtatacgagctgttgggcagtttttcccatgcgccctctgtgggtatctctgatgactcattggagaacttagccagtggctgcttaaaaagttggggtgagcacagcaggggagcttagtcaatatagtgtcaactttaggataccccagaagtatggcactcccgggcccacatacttggacttatttttctgaacccatcacttcaaagcaaggctatccatgtgctggacaagaggtccatccttacccttgaagttggcaggagacgtgagaggaaagctagaggagagctgggttggtattggcagagaagggagaaagacatagaggcctaaccataaggcccaagctgtggtgttgcccagttggcacttggtaaagtgagcactggtgctgcacccatgtcttgggtaaagctctagtgatcctctgacctttgtttgaggccttggaggcagaggaaaggaaaccacagagacgagaggtggcttcctggcacatacagttgggggtcacctgctgaaccaggagctcatattttgattgccacatggcaaagtttgcctgtgggcccccagagaacagttctttaaaatgttgagggttttgggaggtgcggggttgtggggaatgaatgctctttctatggccaaatttaccaggaaacactggaatagacaatgtcaagcagattttttttttaattgctgtgggacattttagccttaaatgtgattatgtgcttgcttgggaggggaagaaaagaggagagaagggatggtgatgtcatgtctgtttcttagatctcatgaaccaagagaccctgttattgagattcacctacttaatacatatcccttggaacaccctttagaaatccttgggaggtttgttctttgagccgaaaggcaataggttcagctttgtttctgaagacttttgcagggtgaactggccatcatgaccccaggagggaagtccctttaacccacatgacctcgtagggtcaagtagatattttacataatgcaagagtcaggtaagtgaggtgatgcaggaacagggtagaatggaggagagattttttaaaaacttatgtttctatgataaaatattctgacagaaacagcttagaggaaagagctaacagaccaggatgtagttggctgtggggaagccggtgtagcagtatcctgaaacagctggtcaagagctggtgggggaggggaatgaaaatacacatgctcattcactcgcttatttgtgctcagtttgatttctgcacttttatacagtttgggaccccctgcttagggaatggtaccacccacagtgggctgggtcttaccatacagttccccacagatgcatacccacaagctaagccagtgtagacaattccttagttgagactctcttatcaggtcattctaattgtgtcaggttgacaattgaagaggtcatgttgttgaagctgatcaggccaggcctgtgaacattggtggtaaacactggtggcaaagcttatagccagcagtacccaggacacacctttcctggaacctggtagtagactttgtatgtgagtctgtggcctccaaagcagtggctcccttagctcttgaaagttctcttgaatcagaagctcaggactggaagggtcgtgggaattcatatcatctacagtctcactgtacatgtgaggacactgaggccatggcaaggaactatcctgctcagggccaccagaagaatgagtgactgtgccagaccagaaaacttaccagagatagtgccttcccctttcctacattcaagtgagggtgaagtcagctctttctaccttcttccatgtctgccttgcaccgtctgtggtaggccttgtgctgtgtgctgtgtactttgtgctttgatggatcaaggggcaattgatccagccagcttgtgtggcttctctgtgccaggccctgttctaagtgctgggtccacagccgtgcagggcaatgaagctccatctacgctgtcatcccaatagggatggggtacttcgctcattatctaatatatatctaatctaatctaacatctcctactccagaacacatatctgggtcattgtaaccagagcacataggtgggttttcccagtgctagtggtagcagctgtgcattgactacagtctcatgattatagtcaatggaagaggtgggtcagaattggttattgattcttacccaggaaagggtagaagaagggttacatgtgatttcctttactgaccagcttgggctctctaccacatatatttagggattgaaccccttatgagagatgtctttgcattattctgagttttctctgagaaagctgaggtagacatattgatgggcctcaggctgctcaattggaaagatacaggaggtgcaggctgcctctgacttctctggtgtcgttgcccactctggtttcctgcttttccaggtagagtggcttagttaagagttcgggggtcagggttgctgtctagtgggtagctgggtatgatggtctaaacttgtcaccctagctacttggaaggctaagagacagaagaattatgagtttgaggtctacctgggttgcagaaagagttcaaggctagcctcaataacttagggagactctatttcaaaacagaaataagataggaaaaaaagtgagggttcccaggtaagtattacgattctgtgattggaactaactgtatcctctgaaccaatggttctcaaccttcctaatgctgtgaccctttaataccgttcttcaggttttcatgacccaaccacaaaatttttcttgttgttagtttctaactaattttgctactgttatgaattgtgagctatatacctgtgtcttctgatggtcttaggtgatacccccgtgaaagggttcttggtccctgaagagggttgcgacccacaggttgggaacctcttctctaaatgaccaaacagtgtggctgttgagtagcttagtgtccccaggattgactgacatgttaaagcatcactttagctaatgtctctagagaatgtgatcctcaccaaatgggatatagtggacactggggatttgagcttactgagctggcttcagatggaaaatgaaggtttgaaagcctttcccccaaagtgaagactaagtctggagagccatgggcagaaatgaccttgaagaatggacagcccacgctcccagtctgtcagggttcccttctattgttccaaatgccctttaatccccactccttccttttggcctagaatacacaattttgttatttttcatgagggcctctggctaacccccaaaaccaacagcatgggctgctaaggaattagcagttaaattgagggggacaaggagaggcagcgttcccagtgttaaggaagagacaagtgtggtttgccgtacttccctgtaaccgaagccgagccgcttttacaagcccagtgatccagtgcttgggcgaatgttgatctgactgatgtgcaggctgcttgcttacatatgaaccgccacagaagctagacgtacacctccacagctgccaaatgctgcttgttctaaggggcagagggccttaaccgcaaaggtctagaggaaacttgggcttcataattaagcagatgcaaatagctcttagtgtactgtcttgaagaactgtgctcatttggcctgtggaaggttttcagagtggaaagctcctagtgattgagtcaaaccctctggacagctagagatcggagaggatcagcccactcactgcatccttgtggcaggtacaaacggtcccaaagatgggaaagccaggtctctcatccatccatccatccatccattcatttattcattcatccattcattctgtaagataccaagtgcccaggttctaatgatactgcagtgggcacaacagactgcaggcccagaccttgagaagttggggttctagtgagacaaatatgtaaagtgcctgcttgtgggatctaatgaaaattatggtggaaagatcagggagggtggcagggagactgagaggactgctacctcttcagtctgggggcttagtcacgaacgtcacccgggaggtgacacttgaccaaggacgtgaaagagaccagacctggcgctcctttgaaggaagtgttgttcagccagagagaactaccggtgccaggccctgcctgcagctgggcatgtcctttgcattcgcataacatcaaagagagcagtgtggctgcctagtccttcagacacgttgttaagacttcagccattacagcactcagcatcaggaaccagtagaagttttaaagagaggtgacatgctatttgattagaaaaggatcatttgcctttaaatggggagaagtatgggcaaagatgttgtaagagctactgctatataagcggctaatatccctgagtgccagcatccacggtgggtcctagaaggaagctctacagacaccagaggacaactgtaagaaggaattaagactttattgcatatgtaaaataaagtgtacaacattgacataaatgacagtaagaaggaagaaataacttgataatatattgcttgaatatagtctgtgatgagccatctgtaatataaatcatagagaaatcctatcattaattttcttattgctgtggccaaacacctgacaagaagcaatgtaagaagaaaagggtattttggctcatggtttgatggtgtagtctatcaggaaagaggaggcagtgttggcagaaatagttccaggttcagaccgacagggctatagaagataggcaaagagataacacaggatgggcttgtattttgaactccgagtcactgactgagagaagcctacatctgaaaacttacagcctcctgcttagtcccagaacagtcccagactgggcagtcatgtctgcatagttccctcttcctgaccttggcattccttcattccttgcttgcttcttgtttgcttgactgcctccttgcatgcacatcttccctgtccttgccctagccatgtgagggcctgggttcagatcctggcgttgtctcctcctgtgtgttacctgacctctgtgtattggtgcattttatttacctcgactgtacagtggaggttgtgtcagttcctcacctcagtgtgctaagatgtgtatgccctctgcacaaaacctagctgcagtaggtgatcagtgagcatctatttctgtagatgtttaccattgaggcttgggtaggggagagggtgaggttggagcttggttgccgagggccccttgggatctggtcactgtgtcttgatattacacataccttcttttctcctcaaagcaccgacgatggtggtgcctagtctcctccttcagagccagttgaagatgtccaagtgagagtagatggctttgggcttagtggagtcttaccttgaaagctgaggccttttaccagtagcttctgtaatcatgaccatgtgtgtgagcctgcataaccattctttaaaaagtggttcttgttagcatactgattttatgccctaaaataaaggttgtcccagacaaacctgtttcactagcaccaacgtttcccagtgaccttcagttggcactagagaaaagcaatggtgtggatggatgggattccctgagcactggcttgcttcagttggaggcttctgcctctggatccaggcttatgacagagcttagtgacagagcttggatttgatgcccaggaatggctcttatccctctgccagactctaggcaaagtgggggtcctgtatcctctcacacactaggtcaacgctaaagtttgcaccctggctccaagggactggttgctttactggtatgcagagttcactcattgcttcaacagttactgttaagtctacactgcgagtagagcggattcctgtgaatattcatatgcaactcttgctgtccactggagacagagaaatgcacaagctccctcacaggtatcaggaccaaaggttactttcactaaggggcattgagcagggtctcctgggaagtttgcttgagtctctctcctgaatcacgccatgtgtgtaccgtgagcaggtggggtgggggttcttcctgagaacctgactctgctgatgggagaagatgcaccctcgctcagctgaaacttgctcacacactattcaaagcatggtggtaacggaggtcccctgctccacagctcccttctgttcccttcctgtctgtttctcttgcagtgtgtctctactgtctgcctcatctcgctgctggctggagagcagccatgctcaccactcctttgtttttattggggctggaaattcctctggtcccttcatgtagaaagcgttccacctacgggctgaggttgattgaccttcattttcatagtctgagcaaaagtcacattgtgtgtctcctgtgtagggactagagaaaatgactacttgttgggtccctgatatggacagatgcttgcgtgggagaaaggctgtccaggactcccacccaccccaaggatactgaatcctatgatactcaggtcccatctgtaaaaggtgctctatatgtttgtaacctctgcatgatctcccatatgctttgaatagcctctgggttattcataactagtacagtataaatgctctgtgattggctgctagcctgtacagcttaggaagtcaagggataaaactctatccttgcctaacacacacatgcacgctcgtaaacacacacacacacacacacacacacacacacacacacacatacacacagagttactttatcacttagatacgatatggacatggagcctgagaagtcagagccagctgtatgcagtcacattctgggtacctcacacacacctggcctttaatcttctgaactgttttagcggtcagcgttaccattcctggtgacacacaaagagaggtgcagtggacaggctaaagaatctagtattagctggctgtgcatctagcgtctcatcctccgggctctcatgaggctgacagcagggcagagtctcctgtaggtctgcatgcttgagcggggtgctcctggagagatgactaggtacagcagatgttgggtgtattgcccactaaggtctggctggggacttgggagggaacacagcagaggggaggactacagagcatctactagcatgggaccaaagggtggaggaagagcagccatcctctgaggacgtctcccttcgccagtcctaggaagacgtgggcgatggggaggaggtgaaaaagagctactgagtcagagcctagtcaggaaatacggtgagtgggagacagagaatgttgattctggcgttgagccctgagtgaagtctgcccatagaggacctgccctctggggtctatctgagcctgtgtgtcctgaagcaggtctgtgcagggcagacccctgcatggcttctactccctatctgcctcgtcaaaggatgctgtgtgggcactactgtctgaggctgtggtctcattaggtgtgagagcaaggaacagtactcatgtggagcagctcacagacagtactgccaggcccactggcaaaagaaggtcacatgtttacttacaatgctataagcactaatcccatgtactagtcaggtctgggccagcctcccatgtgccccagtgcccatgaagtaagctcctagctttaagcaaaacaccccagtagcatttgtgacttgacagggtctcttgctattgcctacattagttttcaattaaccagggaattttctcttaatatttaaatctttattctgtctctctgagcggcaatattactcagtgttgtggctgactgacaccgtgcattgaagaaaattaagtgcctaggaattatctcaaagtaatgatgtatttatgcattgtaggttatttcgagtttctagaatgttaagagttgtttaatacattaacagttttaatctattaatttaatcttttcttcttgactatttattaaaatatatcagccatatatgacaggagtggaagcgtagacaatttggagggttgttgatgggcaggcaatggagcaaggattggaaatgggcagaccagcaaatacaggtcccaggctggtcccctgtctctcctgagccttgctgcagagtccttatcacccttgcagtctctcagtcagaagccagcctcttggctgtatgtccaaaggacacattgtagcaagcagccatcagggagcagcatcggggagaattagtggttggcagtgggtaccaagcctgagtagctttctctgtggaagacaggatcccatcactcctcacttggtgttatacctgtatagctactgtgtctagtggattctccatgactcttaagaaggcagccaaagatgagatccagtcactgtttggagttcctagaggtccacatatgttaattaagccaacaagtattttaccatcctctcttcctttgagagatgaaaactaaacccatccaaatagttcgaagcctctgctttggagtcaggcagacccaggtagcatcttctctctgtcattaggaagctcagggacatgttggtattcctgtccctgccttctttcctggaatgtagacaatgcctgccttgtaaggtgctgcacgggatagtgagagtagctttccagtgtgaggtgccacaactggacacacatcatagagatctactccattgccacaccccacggtgtgtgtaccgtccacagcatcaccaccggcttcacctctgcacgtgctgacgtgtgggagcctagtcacttacagaaagcacagagagcagagatgtctggatgtttttcagagttgcacggaagtcataggtacagattggggtttggagcacggtgtattagtgtgggataagccttgcagggttctgcctcatgagaggggccctaacctgccctcggggacatttgccatggcaaccccacagtctgaagagagaatgtcactgtacgacaggtatccaagtgttccattttagaccctagggagaatggtgcttcatctagaagagtaaaggtaactgataataaaggaacaaggtccattcattcacaaaattggcctccttggacaaatctccagcccacaacacacagagggcggcaagcaagagacatccctccatgctgttttaaatattccagaagtgagacaccatcagtaatgacagggatgggctgtccatcgaaagggcttggccttattaggggctatgggtgctaccattgatgccccccagtgagcaggctcttagctagcatctgcaatgtgtcctcactcttctggggacagtgaatcaataagaccaagttctgccttcttgtagctcacattctagttggagaaacagaataagtaaacaaagagattataggagatggtaggtcggaaaatactcaggagcaataaatgagctatgagcctagaattgactcgacctggatcgtcagcatcagcaccattctgtctttctgtcaaacatacatcacagctcagtggagaggctgtagccagaaagggggcatggctccaggtggaggtgtgacggaggttgtaaggggagtttcagggcacacttggcaggtggacttgatggaactcatggtgggcctgttggttgagatgaggaaaagtgaagtcaaggatgagtctggagtccaggcaagcggtgctggagggtggcatctgtctgttagtcagctcagggagctgcagttacaggaatgtctcacatcagtaccatgagaagagcttgtgaggcaggacggccccagacagcggctctgcttgccatctgtttgatttgcgataactattagaaggtgcagagtaggagtcaagtaggtgcttacataagtcaaacagtggagtgcagccccaagctcgaggcggaaacctgagctttatcataataaagctaacatatttaaaagtatgaaagctggaggcaaatatgggtatgcatacttggcatgttctcgcaggtggaggctgagacaggttcatgagttcaaggccagcctgggctacatagcagaagcttgtctgagataagcaagcaaacaaaggtttggcgtgttcacaagctcacccaaggagtgcctggataagcatagagaggccccaaggctgctccgtgcagggagatgaagattccacagaacaaacaggcgtggccagaaaacgagttcagcacaaagttggggaaagggctgggtagaggaaagcggctgaggatatagcatgtcgggtggagactgggagggacagtacaggtcactgggcctcagaaaagcagtggacaccaatgcctgtagactgctgaagtgttgccaagggcagggtctgtgataattcactgacaggaagctgtcaagagacttaagtaatcagtgggagggcagcttgatagggaatggtggacttgatctcagttcagcctctgcagcggatcacaggcccaggaaggtttgcagtatgtcgtagttgatttcagatccctgcatctgcacgacctggagagaataaaaacagcccgagtcatagcaaggcactgtttgcatgctgcgaggggagggcttttcctctaaccagtaacactgtctgtaaaaccatgagcaccagggtaaatggcacctttggaggaagtagggtggtcctctggctgcatttagaggcacaggtgaacacacagctttctgcttatagggaaagacacacctgtgcatatggagttcacttctgcatgggctttagatatctccaggtaaagaaactgaaccccagaagcctgacgtggtatcgtggtgctgatggacccagccactcagaaggttgagtgagctcaagtatgtaatactggcctaggcagcatagtgagacctcaccttaaaaggcaaaggtttgcaaaatcagtccccgggaggcaacagcagaagccgggctcaagtccaggcagttgatgtctctgtttacaggaactgggtagaacttcatacattagcatgctttggtgggatggtaaagaaattgtgcctaagaacaacattgtctggctcaggcgcctagtgtcacctgggactgtcctccaccactcccagaaattgcatgtctctggtcttggatctgcttgatggtgttgtcttaggccgtggggtttgtgataactgagcaacagtggaagccagattgttttctactagagtggtcatcattaagagtctggtgaccacgggtgtgtcctttgctgtgaaggactactacctgtatgcagtgaagagctgctgtgcgctgcagcttgctctcttctgggcactgggttctctgtctggcagcaggacgtggagtgggtgggtgagactggaggaggaagattgtttctggggtctcttgcagagggcacaggagactggccacatgcctaggacagtgaccaggaagaagataagggagaactggtgtgagggagagtcaggtttccagactctgctgtttgaagccatcgcttcagaatgatttctctatagtgtggttgtttcctgtggcctagccaacaagttacagtagtccccctcccccagccctttctctggctcatggtttcactttctgtagtttcagaactacatcccccccaaaaaaataaacaaaaaagttccaggaataaattgcttgtaaatttttcagtgacttactatattctccgtggtattgttgaaatcccatgcagaactagtatgttcaggatgccagtcagagcacagtgtttccatgctatgtgtgtctctctctctgtgtgtgtatagtatatgtatgtgcatgtgtatgtttatggtatttgtatggtatgttcatgtatatgtatatggtatatatatggtatgtatgtgtatatgcatgtgtatggtatgtgtatggtatatgtatgtgtatggtatatgtatgtgtatgatatgtgtatgtgtgtggtatgtgcatgtgcatgtgtgtggtatgtgcatgtatatgctatgtgtnnnnnnnnnnnnnnnnnnnntgctatgtgtatgtgtatggtatatgtataatatgtgtatgtatatagtatgttatggtatatgtatggtatatgtatgtatatggtatatgtatatgtatatgcatggtatgtgtatgtgtatggtagtgtattgtatgtgtatgatatgtgtatgtgtgtggtatatgtatggtatgtgtatagtatgtgtatgtatatgccacgcatctcttctcactagtatcttggttctcacctcagctatctccacttctgtttgagtaaccgtaatgtcacttaataatgtttccaaagctcagaagtcatgatgccaaggagacatgagcacaggcgcggtgggagggcaggatgcctttggtgcagtgtggcagagctgtggggcacagagaaaaatggtgtcagcacagcccaagcttcgagcacatacagtcagggaatcttgaatacatcccttacagagaagaggccctttgcacctcagattgggtgggttagagcagcataaacttattccttcaaaatcttgagccagaattcagaaatcggagggccagaaggttagcacacactctagaggccttgggggagggtgtgtatggtaccttctgctgcttgcagctgtcattgttccttgatttatggccacgtctacctggatgtcaaatagcttcttccatttctgtgggacctcttctgtctcaaatatctgtgctttcagcaacacttgctaatacatataacaagttcacctccaatatcctcacacctgagaacatccgttctttccaaataagctcacattcataccaggggagatagctcaggggataaagcgcttgtcatactgcatgaggtccagggttcagatctcaagtacttacgcaaaggctaggtgggtgtggtgacatgcctgtaatcccagcactcacaggagagatgggtacgggcaatcctctgagcaagctgtttagccaggtgaccaatggttccatgagctctggattcagggagagaccctgtatgtgcagatgggtacggcctcagtaaagtagtgaatgatcaaagacaatccagtgtcagtgtcttgcctgtaaccagcacccaacattcattcattcattcattcattctctttttctctctttattctttctccatctctctctctcatctatgtgtgaacatgcatatatacacatacatgttaaaaacatgtgggctggagagatgactcagtggttaggagcactgactcctcttccagaggtcctgagttcaattcccagcaaccacgtggtggctcacaaccagctgtgatgggatatgatgccctcttctgttgtgtgtctgaacacagctacagtatactcataaataaaactaaacaaatctttaaaaaaaaaacatgttcatacattctagggttaggatgtaaacatgtattttggggaagctccagtcaccccactacaaggaagaagttaaaatatctttatatcaagcaacaaaacaaagatgtgtctgtctattgaaaatggaggaaatgagttcttacacagggccagcctcaccatcctcacctcctggttcctgggagtgcccttgaggaccacactgggagaaccattacccaagagatgggcaggagattttagcacttcctggggtggggggacccattggcctctctccaggcagtccatgctcgcagtaaccagagagaagagggagagcgggtgcttactgagaaatacccttttactgcccatctttggattttatgttgaagtgtgactcgggttaaatataaaattcacagcatatcttgagcaactattttgtagttatctatatataaatctattttacagcgacacaaatagaatagattatggagtgtcagcatgtagatagattccgagtgcttttccactaatatacctaatgattcgtgctgagaatattcaagggctccactgtacatttaaatggatataattaaaataatgagctctattttaaaaaatgatatatgaaaaaaaatttttaagaagttggaaggagctgcaccactaattcaaagtgatctaagtacttgtgtgatgccgttgttattaggacacacaattaaatgcggagcagctgagagaaagagaggtttgggcttgtaaatctcagtgcaggagtcgaggaagagatggaagctgcctgtgaccttggtaccacaggcatttaaggaaggggacccagtggctctgtgacctgctgtcatgcccacctgtgtcgagagactgcgtctcatccccatcttccataggcagagtcaggggtcaggctgcacgcagttgcacctggatttccagagcaagctggtactcatttagaatgtggcaggtatgtgtgggagggactaagagtctacctgtccttggtaggaagtcattcgctcttcctcactccagaaccctggtaacttggctggcggtcccagaggtcaggagatgtggcctcaagacctgagttggctccatgccctgagtctccctgtgatatatttccacgcagaattattacagaagggtatggctaccattaagtatggatctatactgtcctagtgggcccttgcgggtcacagaagacaaaagccccaatgactgtttaaccaggaggcaagtcttctcttgatcagtaaacaagtacagtatttatggagtatttatcgtatgttagagatacagtggcacacaggctgctcttagggtgggggatttgctaagtcattaatggacaagacattttcagatagtagtcagggttttgaagagaatagaagaaggtgatgaccgagaggctggacagtggggtcagatgtggcaggtgtgccaaaaagaatctgtaagcatgctggatagctgtgagagtcacttgtcgtgaggaaatgtgacttccgcagaaggaatatggtttcatcattctggaaaggcttcaaggtggtcagagtgacatcatggaccaatgtcattatcataataataacttggaaatttatatggatatccacttcaggccagtgccccagctggactccttacagatgtccccacccctccttctgtctagcaatgattctcacatgttagacatggaaatgaaggctcagggaaggttttttgactaatggaatatgggcaagcaggttagagatacaaggtatgtctgacccatagctgtaggtggtgttagctactttgtgggttctgctttcttccacccttctccaccctttcctaccctttcactagataagagggaaaacaggatagaaaggaaagggggtgatattatcattagactacttcttgagattgatcttggctgtcaggatatctaatttctttttgtttcttctttgcacatcaatacttaacaaaccacgaccaacaacaaccaacagcaaactaccaacaatccactaatcaactcgcccaccgcttggggacattgcagttatataccttctgaaaagtccctggaattcccagcatcactcagtcccagaaactatctgcagctggcaaaaccacacacctgctagagcatgcggcaaatcatagtcagctgctgtggacaacttgatgcagcccctgggattaaaatgaaaacatactcttatgatacttatgtagtttttttattgtttgtttgtttgtttttacagaacccaaaatccaaccttgtcactacacagagtacctcttgcccccgacagggtggcctgcaaccaatgaggacctaatgatcaagaagggacctggggtctgttcagggtgggttgtgggactgaaattgagaacatcgtgaacaagctggggaagagatgctgatattccttcctgttctatttctgagcttccaaaccttggagagattaggactcatccaggcctttggcagtcccctttatgtgtggaaaaactgtgattcttggccacctttcattaatcctttattgctgtctcatgagcagctcaggttctcacacctagttcccagcagtgatggcaaaccagagctggggtttggaaacccacgagttgaatgtattgtgtttcatgtgctagcatgtgtgttgtgtcagaggtttcccttgaatcttccatactttctgttttagtctggtttctgttgatgtgataaaatactcaaggctgagtagtttataaagacaaaaggtttattcgacttaacactggaggagccagcatgagttcatctcaggtgaggtctggcaaatggattgattcacagtgacctaatagcaggtcattattaataggctaagtactcacctaaatgttttctgtgtgtacactgattaaatcttatgtgacaaccctgtcatctgtgctttgcagatgaggagacccaggcttctaggtgaggtggtgggttcaagcttcacattagggaagtaacagagctggagacttgaagccaagtcaggggtcagatggcttgggctctggggaggagctattaccaagcttgccgacaaccactgtgttctccaagaataacttttatacctttacttatttatcttggagcaagggcataaagtgtgagaaggtcagagagcagcctgtgggaatcaattttctccttccactctatgggtcacagggttgaaaccagggtcacaaggcttcaccaaattgccttcactggctgaggcttctcgctggtccaagaatgcctcttataaagtcactaatctcatcatgaaggctccaccatgatctcatttaaccctaattacctccctatcattccagccccagaaacagccatgtttgcggttgggatattaacgtgtgtatttgggggtggatgggcatagtttggtccagagtacctccccagcggcctttctctgcaactcccttgtaaacaggccctcaaggattctgtcttagctcagcatcagcctttcccctctctggatgcagctgtagccagggatcagcttgtgcagtgaaaccattgctattcaactgttggagctgccaagacccagagagcagggcttttacaggtccccacagtgggtcccagacccccctcccagctcaccatgccttcacagtgctttgctttgcttgtcatgtggctggacctgaacacgcctcgagtctaggcttctctgagtagatgaaagggctgggtatagccaggcactatcccagggtctgggataagatttgatttctaccctgtgtctgccttgccctcctcacctcccgaacagaggttgtgaggatagtttacctatggagactcatgttgaaagagtaatgtgagtgtgggtgccagagctacctgtgttctcctgcatccgcttttatgacctagggaagtcatggctctgttccaaactacaaaatgggctcagcttcctgcccaactccatctgacctccgttccttgagggtgttctcaaatatttggagagcagtcctttggctccaggacaccctcaccaggagagcctcttgagactggagtttccccgttttaaagtgggaaagagaagagcttggatgtgctctgcggccccgatgccaaggaacagaaacagcgcaagatacttggcatgctctgagcatattgctcacgggactgatgccagaccagagcccaggctgcctgaaccagaccctacatctatcaaggctcccagcttaaagttggacaggaatatattcccagtatccagaggtgccttttaaggtcacttgtaactccaattgtgaaagatacaaacaaatgacaggaggtgagctgggtactctggaaggctttagaccttcacttacccagatgtaaaatggggctgcatgaaaggccaaggagccctcctttatatttaatacacagcctgtcatgagtctctatgctgctaaggactggtgggtttccctgtgtgtcagtggccagttctgcgtcccctctcaatgacccccctctcttctttcccagggaacgcttgaagcgcagtcaaaagagcagcaaggtggagggcccggagccagtgccggctgaggcctcgctgagtgctgagcaggggacgatgacggaggtgaaggtgaaaacagaagtaccagacgactacatacaggaggtcatctggcagggggaggccaaggaggagaaggcaggtggcaaggacagcaccggagatgtgcctgccgagatctgcgtggtgattggtggcgtccgcaaccagcagaccctaggtgagtgcccgagtaagatccgcagtcagggtagaaatgtctggtcaggtaggctggcatctctgagagagaaccttctgccccaagggagaaagcagagctcctggttggcttggcagggtgagttctagcctggagagttcactttccacttggtgtaacaagaccccatggttttgtcaagctcttgatattcagattgtctgctggcccagtgaatccatcacaccttgagccccctaagcgtcccatagggaaccagcacaaacctgaactgcttgcttggtattctgagtacatgtcctgtctgccttgcccctgacctgactggggacttctgggggggggggttctttttgattggtgacagttatgcgccttcccacacctggaagactctcctagtaacctactctgaggctgtggtttcccccttctgccctccaaggaactcccagaactactgctagattcaaggactcagatggccatcaggtcctgataggcttgcagagcctacagaacaggaggctcttctgaggctggctgctcatgtatattgtccatcctcatcttcctcgatggttgtcatgtccagagtgttcttggctgtgcttttccctcctccatggtccttttgaggtccaggtctggcctgttcctccttccttctatgcccctctgtcttcctggcttgcatactgtttgtaacccacaaggcattgtggggtgatgccctttgtttccacgatgaaccctcaagtcccgacacctgtccttagctgctggcctcggcctcttgctcccttcctagctgtattcagtggtcccacctgggtcaccacagcatcccatgaccagccatactttagtgtctctctgcctgacatactccgttcagctggcctcaaggaagccacaggaaatacaaaaggtacgccatgttgtttctctttacagaccttgagattgagttgtgctatctccagaaccaagctccagcaccaggatcctctgttgtccctttgtttgtttttggcttctgattatcccagacctctcagcacagtgtccacctgtcatcctgtctgctcttcctgctccccactctgggaatactgctacccatttcccaagttcagcttctccttcaaggacaattccagagctatctctccttttttatgatctcctctggccagaggggtcaacatggactgtgcctgttccctgccaaatttggatctccaggacctgcctggtttctgctccccacttgtactctacagtgccgagcaagatgccggcttttaggaatctgtattggttgtggtactatgactgagtgtcaggatgggtctaggtgatgctgcagtaatgaaaggtctcaaaagtagtgtgtcttggtaactcagaaccctgaaaatttatttcttcttgacactgtccactgtggtgcacatgaggctctacctgtctctaggctcaaacacaggataaccattttcacagatggccaggtggcagaagatagcaagccctagatgaactcaagcaggtcattgactgctagcatgagaaggaagaggcatggcttccgtttagatgtcagaccaaactattcatatgactgccccaaatctgagggggctaagaagtacccatatcctatgggtagtatgaagatgctacaaaagatgtttgatggggagccttgcctgacctctgcccctcagcattcactccccaaagccaaggaccaagtttcctccaggatctatgaatggagaagagggcatatctttattctcacgctaatactcttgaagcccagcagccatttctgccctccccctgatatcctatggagggtagctgaggcagatctggttagggaatccttcagcaggcaggctagggaactatggagtgacttccctgagccagtggcccacacagtgaagaccctgagccctcaggctttctgccagccaggctcattatccactcaagtcactgctcatcagccaggactttggcccataggatatgagtagttcttagccccctcagatgagggaagccatatgaagagtttggtctgccatctacatggaagctatacctcttccttctcatggtacaaggcctctgtgtgctgcagtgcccaccatacagattcttgtgttatgtaaggacatggtagaaggtgttctaagtacctgatactgtgcctagtgacaggtgaacaggctattgaggtagtacagtctgcgtgttggtatgtgaagtaccagcttttctccctagtctaaaaaataagccaatgtgatatagacctcgggtggggatgaggatgaaaatcagcaccaggtgagttcccattcccttctaggttggcctccctacaactcaagtcttgagtgtcttgggtaatttcctgtaaccttctcttggtagaagagactatagaatacccagagatgacccctagaaaatccaccatctggaaagctgagccacataggaccatgtggctcctctcctgtccccaagacaggtcctttttgctatgtggtttgtgcacagggtcagactaagaggaagctgtcctgaccttgttgccaaccaaggaagccacagaaagaacccagggactctctgtgggaagagaaacaaacccatctcttgctagcaaatggattttacctgaagcccaggtcctggtttcatctgttgctgtggagagttcaatgttgaggatctcaaagagggaatggttggctgttagagtatgtgttggtatagatgtggacagtggaatctgcatgctctcgcttgacctgaccccaccgttttatagggaggcagatcttgtgggaagcaagagagttcttggctgcacagcacaccggtggagtacgactcctgtttctaagatcctgctctccttgacagcatctgctttagccctgcttttgagcatcagtgaagtgctggcgtgtgtgccttcttgccccggtatctgagtgtgcttagttcatggtcctgagtcacttggtgacacacatgggctttgcacactctgagctcagcagctctgttactgaatagaatagtgcccctgttcagtcacacagctccaggcagtgaagcctacccaagtcctcactggacataagccatcaacagttttcccagggacacaaacattattcaagacatttcctaccagggtcatgggtacatggctgacattggctgggagaatcctgctgtggctgttggtgcccagaaggctggctgctgcctagggagggcctgggctgagaaaagcatgtcttgctcttagcatctcgatgcagttacagccagcttgggatttgtgggccagacccaggactcgttttctgttgttgttctttcgttttgtttttgttttcttttgttttggtttttcttaacaagagcagagatgatactgagcctgacagtgttgtaagagaaaaccagaagtgaatcgatgtgttaaccgatgcctggcccatctgacatgctgtaggtacagctttgccctaaagcctggggaggggctggaacacgtaaggttttagctcctttatgcagaatgacacatgcaggcacccctgttgccactcccaattccaggtttgtgttagcatcattaactgacccctgtacactgttctgcaaaatcctcaatatagtgaagtgcactgccaatcagctggaatcaggaaattggaaatgggacctgtttgctgtcatcatgctagatggagagtaggatggccacttgtgtttacctcatctaggacatcatggtagaccattgcctggtcccaagagataagggtggcaggcactcattctggttttcaaaagttaccatcatggagtgagtgtgctgtggaaccaaccagagcctgggtatcccatgttcatggagacagactctgcttcttgtgactactgagccaaccaggtcattcccaggtgttaacgcattatagagaggggcacgtgggcaagcaagaattgtttcctggagaagcaaaggggcctataggggacagggagcagggtgatggaggctagatactcacaacatacagtatttggggatactaaacagacatattccaggaggtccaaccagtatggagtggccaggaagtcattcgtgacagaaatgatttgataaccaaataaaacctgtgagagaatgagtttctggtcccggaggtggacaaggatggtggctggtcccactacaagaatcaagggtcatgtggaaactagatagtgcagggaggtgtcctaggcacactgcatgcacaaagccatcctgggatggggagtggaggaagaagagggaaccccagtcatgtggaagccacggggctgtagctctggatggagtgatgagttccatggaagctcagacacagccacgtgggcttcagtccttgacaaatccaggaggagaggtgccaggtcttactgggtaatgccagctgatagtgagtttcctatttcagtaggctattggcagatctaggtgcctgagcgtgccagaaccaacacttaggttttgctgtaaccacaagggaaggcgcagggctggctgccctccagacccagttttctccactgttggctctccatctggggtaaaccgggaaggggtacgggtggagaatccctgttgaaaagggatcccggctgtatgttagaagagctcgagtctgccccactgtgtctggaatgctcggtggaatatatatgctgggtcattgggacaagaaggaagcagtgttgtgagaatagctttaaaggtggactaaaagacaagctaggctctggcacaaggcatcaacacctccaggatgactgtggtgatgagacaaatctcgcaggtcaggatatcaaacaccctcagtttaggcctccaaaaagaacatcttttcattttttttttttaccaattgcaatgttataattcctaggatattgtattgcttttttaaagtggcattttgcaaataatcacaatgccactgctttttagggcctgccattgtcactttaaagaaacatctgaacaagctcatctttagcagacagagattttatatcttccttttttttctctccttgaacggccatttctagcccacccacccccacagggttttttcctaatgtaatatatttttatgcttgaaagtcttttattgatcaccgtttcacactcatctgccacaacaagaggtacataaattgaaatagaaatttctgggggaaaattttttccctgggatcataaagctctgcatttaaaaacctcttaatttttcccccagattgagttgtgattaggctgcaatttgtcaagaacaaatttagataaatagtaagtgtaaaaataaaaaattatccaagacacccttctcggtgaaacagttaacggctgcccgtctttctcgatcggctcgtgtatctgtgaatgaggatttcttacgtgtagaatgagaccgggcttggccttcatttcatgatgatttctattgtttgcagggaaagggcttggagagctggggtgtgtgaacagggagccggagaccatggggtttgcttcatggtgtcacttgattctttgactccttccaagatgtatgccaaaaaaaaaaaaaaaaaaccaggcgaggttctatgttcttaatggcttcttcatttacagctctgttagatgtgcgtgtgcgtgtgcgtgtgcgtgtgtgtgtgtgtgtgtgtgtgtgtgtgtgtatgtgtgtgtgtgtgtgtgtgtagaggccataacacaacctcaggtattcaggtatcattcctcaggtaccagcacccctcctcttttggatccaggcagggtctcttgttggcccagaacttaccaagtataataacctggctgaccagccagcaccggggatctatctactctgacctctggagtgctaggattataaatatacctcatgaccagtgtcttctacatgatttctggcaatcaaattcagatcctcatgcttgcagcccagctgtcttcttagccctgttcattagttttgagaaagagtctagctctgtagctcagttggcctaaaactcagtatgtagtgcagcaggctagccttgaacctaccatcctcccacctcagcctcctgagttttgggattataggcatgtgtcacatcacctagctgtgagccaaagctatcaagttgaggaggttgccacatggccctattcttattaatgtcagctaggaggactgaggccctgatagcccaggtgcctggctacccccttctccagctggccttgaccctaagctaaataataaggcgttctccaacgttaagggctctttctgatttcttacgtaattcagatggaaaagctccggaaggcagcccccacggcggatctgttcggagtcggtattcagggacctggatttttgaccaagctttgaaatatgcatctggtacgtgatggctgagggatgaggcctgatttgggtcatcatggagggtgggcacagctggctgtggctgccagctggataccctgagtgagcaaactctgctagtacctcagggcctgaggggccaccctcccccacaccccatccagccattgtgagcagatcttgagtccaccctcagggatagcaggacatctggacatctggtggtctacactctgaaacatttgagcagcacttcctctggatcacagacacagaagaaggagcgccccacagccacccgtgtttatgacctcagtccttccctgcaggacttccagcccgaagcagctttgtgccttgtgtctcaccagcacagggccaggcactaagcattttcttggtcactgttggccatgaacctcctcctcctgagcattctggaactttgcttctgaagaaagcgcttttgaaaagctggtggtcaccacagctcttacgtacggcgtgtctgccgaggaccaggcttcatgctaaggactcacagtggtaccgctcctcaccacccaggctgttctttcacagagaggagtcctagaactccctgagggctttcctgactgactgccagtgagctaagatttggacccaggttggctgttcttactgctcagtgaggccaccactctggggagcttccggtttctctgctcatttagcaccttgcacacacagggcccagagggaccaagggtgatggaagggtgagcttgggaattcctcctgccagcatatggcgtccgtcctcactctggaaggggtggggagatggttagaggccatggcagcctgcacccttagctctccagaaacagaggagatgaattgactgccttaaaggcactcattataagcagcattgactctgtacactgcactcctcactacagctgggcaggggctcacctcgagcctccaggtcctcctctggctgtcacaacaccatcaccacgttttctccaggcctgctgacccatctgccccccattagatggagggcagggatcacatccatctcgctgctgagcctcggtgcctggccatcgcaaatgctcaataaatccttggttggtggaaagaaattggcagaagctgttagagtaggtggaggcaccaagaagaaagtcaggaagttatcacttggagattgatgagtatagcagcgagccaacatgaaatactgagtcctcactgtgtgccagccacggggccgaatgcaaagaaatacacgtgctttatcgctccggggttgtgtggctggggtgatgtgtgcagaaacccctcaaaggccagcttctgagtgctgtatggcaaaaggatgtcagtgggcccagagtatctcacagtaacacggccaccggccctggccactgtcccctagtacttcctgtgtgccagtggctcatgtactctgtctgtgtcttgctatcactgtttaagagtcaggagccacagtcttggtggcaagtgaggaatccaacactcagacaagtaaaagtgagttcgatgggggagcaaggttggcatccaaactctttgaagctgcctgacagaagagtgtccgctgctaggcccagaaacagagggtggcgcttagtaatcatgatcgctccccatgtgtctacagagtatgtggtcctcattcagctatctcattgctcctcctccagagaagacacttaggtatggactgtgaacggcagagccatgctcctctggacctgcactaaagaagtgatgtcccccaccttgactgcagggcaccaggagtttcctggaaaggcacatgcctaggtccccagaccagcagcttgtgtatggcctgacctgggaccaagacttcttgcacattcttcctggcctggctgttctggaaggtgtgagctgggtccaagtagcttcaagcctgcagaagggctttttctagtggagatgaacaggcactttacctggggtcccttgccaggttaggtcctgtcatcgagatccagcctccctgccacgtactttgtttcaggtcctaaaaatggtaggtcatgtttggatcccccatgagggtcagccatttaattctctgcacctggaaaggctccaagaagcagaagtcaggtgtgtgtgtactgtgaggctgttctgtgtctgacagcaacatagttcctagcaggtggggactgctcttcttggtgagctctgtcatgggacaggacacttgctagaggaagtgaagaaccagttggaggaaggtgaacagaccagagcctatgaggtctggagaagtccccaggctcaggctgctggcaggtgcgggacagacactggaacccctgtggccgaatgtgaagcctgtggtcttcctctctgtcaccctgctgggagcacgtcagcctgagtgacatccttatggtgtggtggctcatcacagagtactctgggtccctctcctttttcctctcaatgtataaggtcaggactcagtcaaggctgtcacctttatcttacagatttggaagccgaggcacagagaacggttgcaggtggctgtaaagtgtaggcttcatgaactccagctcagcgctgtctctgttggtcctcgatgctcttttgtctgccgaggctccatccctgcccagtggcactgtgggtcctgggccttgtgggacaaggtagctgatgggccctccccttgctgttttccagggtcctatgaatgcgggatctgcggcaagaagtacaagtactacaactgcttccagacgcacgtgcgggcacaccgaggtgagtgacatccggctgtcccgtcctctgctgggtatccctaggggccctgacagctcagtctccttcaaccataggagggagggccatggaggaataaggaagcctccttgatgtgggaagaatgatgggggttcaggagttaggcctctgatgaccttggggctgctcagtcttgctctgtaatcaccttcccctcccccacaaggccatgtgctcacatcctctctagttcccctcccccacaaggccatgcgctcacatcctctctagttccccatgacaactcaagagagaaaccagaagctgtttcccattctgaaggtcaggggataaatggactggcacttgtccctcctgagccaggtgacagggaagagagacccaggtgcaggccttgctgaccttgagcctcagaacagaaatgagccttgtccctcctagtgtccatgggtggacagcacttcccgactccccatagctgttccacagccctgactctgccatcattctcgcctattggctatctccttcctagctctctctttctttctctcacagatactgaagccacctcaggggagggagtctcccagagcagtgagtactttccccacatcctgggttggtggggatcaggcagtgagcttgggaagtagctgttcttccctcccaggacagccttggagaaacacgttggtggaggccaagccttaagaccagaggggctttgtgaagtaagagcagaccttttccaagtgggttccatagcatgcacattctgaggaggggtctctcaaaaaagggttctcgggccaagtactctgggaaaccttgagttgacatctttactatggttgtcctgtgccatcatgaacatactttggaccctgacttatgggcttagggttctgtgctggggaacagttctctgagagaaccctcgcctctgggacagttgctccttggtgctttgttttaggtagggttctggatgctgagaccccgtgatagttgtcctctatcacaacaggtcctgcttgccccaactccaacctcatgggatgataagcagacagtccacagggtacactctgaggccaccctaccagtggacagcatggacttcaagagttctaccatcagtgactatcacagataggcatatgtctaggtccagccaaagatgcaaactcaaatgttcttagagtgttgttcctgacaaccctaaagcagaagacacccagatggtcagtgttaggagttgctgcgtaagtccaacctcctaaaggaccgagtgcataagtgacggtggatgcaacctagctaccatgggtgtgcgtgcgcacagagctctcagccctgacgaatgaagccaggcactgaggggctcactgctaagactgtcagaaagcactggcatggagtgcttagtggaaatcagaagattgggcacccttgaaagtgtctgctttctggttcttgagccacgttccatgacactttctgtgggtggacagaccaagctgtttgcttaagacataaacattttgtcctgtaggggccaaggaatgttttctgtggaggaccagatgatgaggaggttatacccaggggcatggcatctctgtgccccttccttgtagtggaaactccaaggggacatgaaactaaattcctaccagtaaagatggtgacaggatctggccccgggaaccagaatgtgatcctgttcattgtttttattgcaccgttatagaatactcaaagataataaatgttacccaaaaacagagtaggctggcaggaatggcagccgtctttcccacagcccaaccccatctctgtctgcttcaataactcctcccttcttttctggcccctgtggtctgcctgtggtcagccacacatttaaagaccttccgtatttatccttccttccttccttggctattctgggtccctggtctccctggaatcctggcaatgggctgttgtgctgtgtctggtttacactgtattagatcactggtgtcgatgctgtcacaagagtgtttttagacctttactcatttttttccttcctctttatggagcattttccccatagccaaagagctgtcttctctatcctatgtctcaacctaggtcagaccaccagcagcgctctgtgtctagtgagcttatgggacagccttggcacagagctgtagggcattggagctgaaaggctcccgccaattccagactgccactttgcacaagaagacctgggttcaaaagagtggaagccattagcttgttagcagtagaggcaggcctggcacaacagttcttatgcttcctagtctaaggacctgccatgcattaagccgggagacagtccagtcatacccatagagacacacccacccgctcacccgtctttcagtgtgagaggagtaaagaccagacctccaccatatacttctccagctcccgtgttcgtctcctaggtcttgctgggtgacatgtaccctgttagtcaggtggtaaccattgtgttctgtctaacttcgagttactgttgccatgatgaaacaccatgaccaaaaacaacctggggagaaaagaggtgtattaggctgacacttccacagcaccattcatcactgaaagaagtcagaacaggatctcaaacagggtagggatctggaggcagtagctgatgcagaagctaatgaggggattgcttactgcctggcttccttcatggctttcttagcctgctttcttatacaacccaggaccaccagcccagggatggtaccactcacaatggactgggccctcaatcactaatcagtcagtaattaagaaaatgccttacagctggatcttgttccgttcttcattataaagatctgttattcccatctcacaggggcattagggagtgagtccaaagtcagtcatacttttgtcaatggtagagtggggtttgggcttaggtgtctcatctgagaatcggcttcctgtaacaggtccatggtggcattcctgggatgccaagttctcttgtgacagtatgacttaactggcagactcctttaggaataaccctctctccctattcaactcttccattaaaattctggaatatgagtctacagggtggattcagtagggcggatgaaggtggttttcagggacaggaagctgaggaaagggtgtctctaagttttactggagctgggaactgtggcccgtgggggaggggagcaagcctgctgacaggagaggctgtgggcagagagagaagcaagcagagtgagcagttgcagagggcaggcgactccagggaatctgagagaggaatgtcagaccgaggcctcatctggagttagcccccaggtagctgtccctgttggtatccatagaagatgatggaattacgggagaagctggggattatgggacagaatgggaagaaagttttctctgagctgccttgtttgcatggagtatgtcattggctcttctactggatgctgaggagcaggacatggctccagaacaaagtaccccagcatagtttatctcaacagagaaaggctgtgcaccctggcctgctttgccttgaagttaagtgagtagttagtccctcttcttccctctgcacagcgttgagcaagctgctgcacctctgcatgctgcctagggaccctaaggagacaggattaacatgctctccacaggtcactcacatacaccaggtctgagctagttcaaatgcaagagggtgtgccctggaaggaaaggtgtaggcctagtttgctgctggccttactgtgggaggcctacagaacaggccaacttgtggccagtgttagctgtcttactgtgtagcacaagtctataaaacttaatgactcaaagtaactaacccaggcttcctcacagtttctatggtttggaatttgagtgtggcttttcagggccctttggcttagagacttgcacaggactacaggttgggttggccagagctgtggtctcatcccagggctcagcttgtaggtttcttttctaggtttatttgggtgagggttacaggaccctgtccctcctaaactattggtctaagggcctcagttcccactagccactcacagagggccagactcaactccttgccacctgagtctctctatgactaaactgagaacatagtagccaaccacagagtgagcatggggcacatggcaggcatgtcctggctgcctgtcatctaacttcagaatgacatcccatccctttgaccacattccaacagaaagagtttcatggggtgtgaacactagctacaagggacatcagtaaatctccagagccagggcacctatgggagcacttgggcagatcacttctctttagtttgctcatacgttcataggagtctccctccgtggttgagagaaccccaagagaagagtgtggcccagctaccttgctcacagttacatctggccttcaccatgggagctgcaataattgttactcttccatgatgggagggagatgagaccgatgtgaaccaagtcctagagaacttagctctcacagggagggtctgagggtcagtttggtgagcaaaactccgaggtctcttatggttctgggtctgcacagaggatacatgttgtcataagccgtatagttcagaatgcaatctaaggctgcccagaatggaggtccagagaggaatagagggggacctggctaagcatggaggagctgctcagaggttcagggagtaaggccacagctgtctctgttcagaagagatgggcggtgctgagactcagtggatcgggatcaagttctccatggggccctccagttgggcctcactggcttggttccatcttgatttcagggtctgatgcactgagcatcaggtgaccagtgtgctgttcagctcagtgtctttctgttccctctccccagacaatttcaggtacacatgtgacatctgtgggaagaaatacaaatactacagctgcttccaggagcaccgagatctccatgctgtggatggtgagtcaggcccctcactcttgggtcacaccagaaaaatgcccttcttccagatcactgttcctgcatagtgccacatccctggggagagggacctaccatgcaagattctggggagggaatgtcccctcatgtacatgttcccttctgtggccgatccagatgaaatttctggggttttttgtttgtttgtttgtttgttttgttttgtttttttgttttttgttttttaatagttcaaagtgagttgaatattgaaacttcaggtcaggtcgtttctacagttttatattgaatgtttgcattcaatagtgaaattaaaccaatttgttaaaatgaatgatgtcctttgacatcttagattatcgaggtggatgttagaacaatacattcaagccattcatctgtagaatgttaagattcccagaaggagggttttagacccagaaaggacctgaggttccccgtctagccctacacctccagtactgagcagtgatggaaggccttcttcctctgccccattctcctctcgcctcccttttcccttcatcctctttgagctactttgctcctgttcttccaccccatgactgctgtggagttctgaggccctagtaaggaggaagagtggcccagggtgggggatgtgccttgctgtgaccctgccttcctgggcttcctcctgggccaggtcaggtctcctggtggcacaggctaccccatgaatgtaggaaaggctggcagaggtagcaatggccagggactcacaggactcttgtttgttttgttcctcctgcggctgtcgcctcccgcctgggtacagtgttcagtgtggaaggggctcccgagaaccgggcaggtaagtctttgtggccacccgttttctctatttccagctgggttcttatgtcttcagtgagcaaaatgtttaaggccgtgtgttctcccacagacccctttgaccaaggtgtcgtggctactgatgaggtgaaggaggagcccccagagcctttccagaaaattggaccaagtatgtgggactctggggcccaggactggggggtgggtgggtgagggaggtgggctgacagttgggctgggcagtctagggacattagccttctaggagctgcagacagggtgtggtcaaggtcacggtagtgaaagtagccagctcacagcaattcatttatggttccctgctagcctgctgaacttctgcctcccatagcagtgagagaaatactcctggccaacttggtagatgttaatgagcttgcagactgcatggtaacacagtgtctggaacatgttaggaactcagagggtgatgaccgaggacatttgagggacatttcagtgaacaaagctgagtagggcagccacctgcagacatctacacttattccataaaacccctgaggacacgaaccatgcttgtaacttgtgtgtcctcagcaaacttgtcttgaaggctgtacagatatggttgacagacatggctctgcacttgggtgtgaggctgtagacaagtgagcagacagaacccaaagcacttcaggggccaaagaagctcagaatgagaacctcaaagatttccaggcaaagacaggtaggaatggagccctacatttcaggcagaggtgtgcatggtgtgtgtgtgtgtgtgtgtgtgtgtgtgtgtgtgtccatccacacatgcacactggctttggcaaagggatgagacacaatggtgagttcacatcttagaggactctgagttttaggatccagtgtgtagacttggtctttatggagctgagttcaggatggagaggaactcaggctgctaggaggagactagatagggagagatccccagggtcagtgtaggcaggtaccgtaggaccacaaagagggacatggatcccgtgcattggtgactatcttgcaagaagagaccgttatggacttaggctgttcgttatgatcaggagccaaggctgtttgcaaaagcacacaccaaaacagaatgaggggataaggaatgctgtggagaggggagctctgcctgggctcttggaaggttccagatgctgcccgtggggccttcccttcctgttgtctcaacagacttaggggagctcttcccgactcatttgggagcctgcagaagacacggtgtttgcagaggggctcgtgcagtgcctgtcacatacatactaaacatcggagacgtgggggcatgaaaatcgtcctgtgggttgggaagacaatgaaatccccatactgagagggaggttgtaggagcacagcagacgctcacctggaaactgggcacaggaactggaacaccttttccatggctaggggaatatatgtagtaagtgtccagcccagtttctgcctcttatccaaggtgtgagatgagggtgttactgggaagccaaccaggacaggaatttgaaatctggccccaaacctacaccctaactctacaccaagctgcatggtatcttacttctgaagtctatctgagccaccctgcagtggagtgacgatagccttcccctttcagcatggtcacagggattgggtaggactctactgtaagtaaattagcatggtccttgtcacattaactaggtaggacctatagaccaaccattaagatgcaggatgcacatgcttttgatcccagaactccagacagcaaagacaggcggatctctgagtttgaggctagcctagtctacagagtgagttccaggatagccaggactatacagagaaaccctgtcttaaaaaccaaaccaaaccaacaaccaaccaaccaaccaaccaaccaaacaaacaaacaaaaaagaatgaagagcaggatgagcctatctgtgcataacctgatgtgcagccctttctaggatctggaggactcctcactgagtgctttgggatttccccgaggaactcgggattggtagtcagcacacccccagctcgccccagcaggactaagatagctgcagccatgtcaggtcccctgtagagtgagagagtgtgggagaggatgaggatgctacgtgagaaggcctgtgctatgaatctctgaaaaataaagtaagcataggacaaggggagcctggttaccctaagggaagccccacagttccagggaagaggagggttcctggaggaaagtctgctttccacactacatcagctgagcaagcggaagaggaggaagcaaagtcatggtgacccagagaacagcagctggaagaagagtgttggttggctgccagaccctgtgagctgcaggctggggttgactgctgtggctgtgggcagaagggacatgaaggacagttttcatctattgagagggaagctggctcacatggtcttcctgcttggataagggagagagcatgaaaaacagaaacaaaaactcaagaacaatgaaaattccacttgataagaaaaaaatgcaaggagagtccagggaagactgtatctctaaacaccatctgtgaccaggtctagacagaaacagttctgcacatcacatataagaaattaatataggttccatacggtagcactttcttgtatttctggtactgagtgctaagccaggaggatttcaagttcaaggccagcttggactacagagcaagaatcctgtgtggaggaggggaggaggaagtggtggaggaagaggaagaggagagagagaaagttgttaccactcatttcccacatgggctgccatcacataccacacagcctaaaggattaacagtagctgctacagctctggaagcccaatgttgtcctgcccatggggtttggttctggtgagttgtgtcttcctggtttacagatgacttttgtatgtcaccccttatgggtggcaggggaagagagatgggaggctgagacctggtgtctcttctaaggacactagtccccatgtggttcctaccctcatgatctcactgaatcctaatcatgtctcagaggtcccaactccagatggcatcacagtggagcccagtacttcagcatgtacgtactagagggactgttcaccggttgcacagccctggggttgtatggtgaaaagcagtagataaaattaaaaaggaacagagcagaagatcagagaggatgtggagaagacagaatacaacagcagaatgaaacactgcatgacagtaatgacagaattgctctgcacaggagtaattagcaacatgaaggacaagtggtaatggaagactttaagaaatgcatgagagcaaggaactagctcaaagggaccgatagtgtgacccatatgacaaagatcacaaggacataatagaagaaacagttgttgagctaatggaacttctgtatgtgagagtttgaaaggcctgtcataacgtcaagtgcagtcaacatgtgaatgtactaacaccagtagatccttgtggctaacggtgtaggtagaaagaggaaaaaggaggcatctgcatgtagaaagcaagttgtatctacccctgagttccaatcagatgtcttgagaatacgaatatcatcttggcaacattgtatgtgccaagaaagtcagtatgtttggaaggagaaaggctgtaagaattttacacctgggcaaattggaattgacatgcaaataaaaaagcaaattcaggaaacctttaaaaaaaaacatctactcagcaaactggtcaatggagcatgtggaagcacccgagaagctgtagtgtaaggagatgtgtgaacaaagaagttttaaccattgtaaatcagattatcctaaatatagatgtgagttataaaactggactgagagtagctcagcttgtagatggatatttcttgagcatgctcagaccctccctgcgctcgatctatagcaccacataaactgggcatggtggtgcatgccaaacacaaccatgtggtaagtttggggccagcctgaacttgtgagaccctgctcctaaaaaagggataaaaattgaaagtaagagagaggcatagattggtgagtcacacaatagagttacagtgctgtgcacagcagaagactggctaatcccactgggctcagagtgtggtccatggccagcaggatcagctcatcaaaagtttatccaaaatggaaattctttaactgtagccgaaacctatagcaccagaatctctggagtagagcctggtggttgatctgtactgtgggactttcttacatgtgctaaaaagtctcagataaaaggtctggagagacagctcagtggttaaaggctgctttcctggaggatcagagttcaattcccagcacccacatccagcagtttatagcatacacctataaccctagatccaggagatctgatgccctcttctggcctccatggacatccacactcacgtggcatccacacagagacacataaatacaaataatttttttcagtttaataagaagtaggttaaacaccctttctcagcagtgaaagactttaaaatgccacttctatcccacctttaacaattaaagaaatatatctttatgctgtctaaaataataaggaatattggacacaggtgaaaatgggaaagcaaagagctcatacccaaacaggcagagcccaggaagacacaccagagtataatgcacagaaaaagtgcaggttgacgctcctgtagccaagatacttaagactaataataggttttgatttttggatttttttttttgcgtatcataatgaaatattccaggatggaatctgaatctaaatgcagaatttacttacctttcatatacgtgtgtagataacctctaagtgatctcgttaaatatttgtaatgtgacacagagactcagagcttggagttccctagttgtggcatcttgctggagcattacgggtgtggggattagggatgttcaccatgtaaaaccaaattgatcgtggcaataaaagcaagccttatagtctccctggtgagaaaacagaagctgtcaagctcatttgaaataatcccaatcactgatggtttactaacatcatacctagttcttatcttttctcgttgcttctgtgtgtctttcttggggactttgcccttctcccttaaagagattaaaggcccccgtcatggcttattgtggcaccgctgtctgtttccttgtgcgcacatactgccggtgcagttttgaagtcgtgtgatggtttgatcgtctgcctccctttccacacagcaacttgaggataaggacatgacagtttctgctcagcctccgcttcagtgccatccttgcttaatgaatgaaagcacgggatcgtgtaggaacatgtcattagacacatgcaaacacgtaggaatcatgacctgacagatcactaggaacttaataatattaatgccagatgaactaataaagtggtttaattaaatgtttgagcaatgcttcttaaactctcccatgcattagaatgttctcattagaagataaatttatgagccacacccatagagattttcttttaacagatcttggatttctgtcaggctcctttggtcctaatgttactggtctgggaaccacttaggagcagtgtcttagggcaggtctcatgtaacatagcccaggatgacgtagaattctacgtgcagatgaacctcttccccgtgcttccctattgcaggggttacaaatatgcaccaccatgtgcagtttatgcagaactggggagggaacatcgggtattctgcatgctgggcaagttttctatccccgcagtagagattttgaggcacaagctttcatacaccaagcaataatgtgcctaaattaaaaagtaaatccagagacgcaatggaatgggagggcttattgaagcctttactctttgctggagcaaatggataagattatatagattgaaataatataactaaattaatatagttgatccaataaccttgacaggaactaatatacatactttttcagtattcatgaatcagacccaaacattgtttaactactcaaaatcctaaagtttccgtcttgggagggaagcagaggggactaagaagccggcagagacaaagctgcctgtaatacgtgtgacaaagtgttgatatcaggactctacaaataatgtagcaattttttaaaaaggagattcacaaagaaaaagctatagttaattatacaagaaaaaattaaccaatttccttagcaatcaaagaaaaggaaaataaacgtgtagtgtaattggttcctccctcccaggtcagagatgcaaaatagagaggtggtaatagtgcagggtatggttgggtggtggtgccgaggttagcagaagcctccagaagggcatccttgcccacctagccctaggaagtcatgggcaggctcctaagcagtgactgttttttagatcacgtaccagatgtgcagaagcccctgcaagggtgtggatgccagcgctttttaataagggagggagtgacttgcaacaacctgaatgtcccttggtggagggcaactggctcagcaaattcccaagtcccatgggagccatgtatccaataaaggcagtcctggagatcaatacttattgattgggcaagatgtccacaaagtattgtcgattgaatacactaggttacaaagaggatatcgatcagggatggctaattcaaggccataggagccagacaaatggtagcagcagagaaacaccagaggggagggtggaggggtgtggggcagggcggggcagctgttgatgtcctgtgagatgatgttccccttggtatagggattgtagaagatggcacttgctcctttaaaaatcgttgagcttgtgtttatcaatattttataactgtccccagatgaaccattttacattagacatctttaaaggaggatttagacagaacctagagaaatataatggtaagagtctatgatggaccagcaagatggctcagggataaaatgcttgcctcattacctcgtgcctgatacctgagcttgatccccagaacgcatgaaaaggtggaaagagagaaccacataaagttgttctctgacctctacctgtactctgcagcacatatgcacccacatatacctcagacacacataacaataaacaaacaaatttaaacctagtgaggactaagaagtaggacctcagctctggtgggtggggctaccctggagataagggaccatggttgtgaccccagcagtgggcaaggcttacagaaaggctgatggaaaggttggcttggggatccagctggggtcttcttagcaccagggctggagcttttgagaccagagactaggatatgtccggcactgttctaagaattccacactcagagctaaccctcacagcagtcctctggatatcccccctgttacctccctcttacaggtagaaaaatggagggacaaagtggttaggggcaggggagttagttcagttcataaagtgctttcatggagacttgaggaccttcgttcatatccccagggcccaaataaaaagccaggtgtagcagcatatgcctgtaattccaagctggcagagaagggtggattcctggagtacactggccagccattcccccaaaacagtgagctctaggctcagcaagagaccttgtttcaaaagatgaagtaaaaaactgttgaggaaaaaacccaaagttgacctcaggcctcctcacgtatgagaacccatgcacacatgcgtacatgcacccactctaccccatacacagagcacaaactgtcatagattacaagagaggccatgccgggacttgaaccagacagaacaactccacagtccaagttgagtctggctggtgatcccataatgaattggagtttgggtgctaagagataactgatctcttgggggaggcaggcgcctgttctcacacctttctctccttctgcagaaaccggcaattacacctgtgagttctgtgggaagcaatacaagtactacacgccctaccaggagcacgtggccttacatgcccccatcagtgagttacttcttcagtcggggaatggggaggcctgggagggacagtggttagccactggccaggactctggagccttgccagggaacgtgtcaggaaggtgaactcaggtctgggctatcaggtgtctgtgctgggcccatgaggtagaatagcctagaaagcctgctcagaaaccaactcggcagagtcctctcaaagtagcttaggggactgtctctcatacagtgggtgtctaatagatgtgatttgtccaggaactgaagtgggccctgtctctaccttctccacacacctgcacgttgtggattgcctgactctgtgcacacccctatagtatctatcttgggatgtagctttctttctggttgaccagtgcccaaccttgctgatgggagggtgcctagacaagacagcccaagtggtagaaagctaaggagacagacagcatgctaaagtgggaggcaaaagacctgaaaaccaggcccagggatcagaggcttactggagaccatgaccatccctattcctctcctggcaaggatacaaaggcactccattgcccctcccagggaacatcagtcttccattcttcccatgcctggaagccttcctggtgacttccccggtgtctttctgcggatggcagtcagaggaaggtcaatccctaagtgtatgagccagagggcctcagcctttcaccctttcctgtacaggcagagacataagttgtgatgaggcaggacttacatgacctctggggcagtagggtggggtgtttaggagcctctgctaatttacctgtgtggacatctcactgcataactatggggatcatcccccattctgagagggggaagagttgggggagagagaccacctaaggtcatagcactgtctgtgggtggtcccaggccttcaacagcagcataggcaggtggcttccctgagggtatacaagtaaggatagagtcatccacggctcaaagggggtagcctcccaaggagttcctccctgctagcagagtggttaggcaaagtgcctctttggatggcagcttcaatcctacatttgtgctgggctgtggtccttggactggttctgtgctgagctgtttcgtgaccttttgcctgatgagtctctctgggctcaggtgtcccatctgtgggagttcttgtggtctttctaccccaggatctggactgacatctgcagtgggagatgactttcaggtagacacctactgtgtggccctaatgcacaccatatggagagagtgtgtatgtcagaggctctactggctgggtaccatcctgtccttctgatgctggtgccaggcattgggctgtttgtgggtagctgctgcccagtgccagagagcatgttacctagaatgctcttagagagaggcgtactcacaagacctaaggcagctgggtttcagcatttatgtttcttctttgcttcccagagcacattgttccattcattgtgttagtaagaggggtgtgggctctgaacccctccaggcagctgcaagcttgcccctccaccctgaagctgtgcagtctccctttggcacatgaagaagaacaccacttgcaccctaacttccctgataccctggtgcttccccccaatggactccctacatctctttcttattttcgtttctctctctctctctctctctctctctctctctctgatctgatgtaggttctgtttttctgtatctatctgttgaatgtgtttgtctggtacttatttgctgatgtcttctgagaattttagaagcacctttaaaagaaaaaagatttagtctagtttgagcagaatggcttcttcaaggctgggcaggagacagtggcctcggaactggatctgtgtggggaaggtaggagctgagtgtgaaggtgtgattgggtgggtggccatggctgggcatgtatctggcgagaatccagaaggctgaccggggaagttctcctgagtcccgtgtgtgtgtgcgtgcgtgcgtgcatgcgtgcgtgtgtgtgtgtgtgtgtgtgtctgtgtgtgtctgtgtgtgtctgtgtgtgtctgtgtgtgtgtgcacgcgcgcacgcacttatgtctgcttttgatttcactcacaaaacatttggaaggctcactggtgttataatatcagctcctttgttgctgctgatgggtcccccactgtgaagaatcagagtctgtttgatcacttacctgttcacttgggtcagttccagctttaggctgacatgaatggagcttctgagaagtgcttttgtgatgctgtctgtgggcttgtgggtcatttctccaggatagataccaagggatggagtgactggggaatagatttgtttctttttctaattataactgacaaaccattttccaaatagcccataggctccccaggatctccactgcctgttatggggtgttaggtgcatccagcaatctgcttcctgttgctttaatgtggatttaagttctgcttcatggtagctggtgatgttcatactcggcatggacttactgtttgtctccttattttaatctggaaaatatttgtgtagatacttttcctagggttttttgttgttgtttgtttgtttttaaagtttggttgtttgtcctttcattggctgtcgaaattcttgtctgttcaggttggtccacatccctcgtcatgtgggtattttctctggcagaactggtaggttctatgcagcacacaccgatgagtgtctctcacgaagcgtactttatcattctttgctacagtaggtgctttctggatctttctgaggttatccttgcctgcctcataatggtgaggctcttgctcatactggttagcagtgtcccagacctttgtaacatccacacttaggtctgcagttgagttgcactcacctatgactgaggtgaggcgtgaggttaggcttgtcctgtgtagactctggtcgcctgacactgtttgttggtgttacctttccatgttcagggctgctgtgctcctgctgtgtgactagttgaatgtctaagagtgaatggctttctttttgattgatccatttttctatctttatacacacaccataggtcttacttattactgctctttaggaaatcttaaaacagctcttgttaggttttttcactttattcttctatttaacaaaaaaatatggctcatctaggaactttatttttttcacataaatgttagaggctcgccagtttctgtcaaaataacaatgatgaggaaaggtgggaaggatagaggaagagaggggccaaggaagagaaggaggaggaggaagaggaaaagaagggaggagagggagttggggcagaaagaaaaaagtcagttgaaattttgtttgggattacattgaatctacggtgttgggtctttggtccgtccatggctatggtgttgggtctttggtctgtccatggctatggtgttgggtctttggtccgtccatggctatggtgttgggtctttggtccgtccatggctatggtgttaggactttggtccattcatggctacagtattgggtctttggcccatccatgactatagtgttgggtctcccagtcaattcctggctgcagtgcagctctccagggatctggggcttctttagtttctctcagcccgtgtactcctcagtcttgacacctgtttcattatatattgtgtgacttgggatgctactgtaattcttaaacttgaatttccagatcgttcctgccgttgcacaggagcagtagaactttgtgttctggatctgtatcctgcaagtttatcagatttgcttgttggttctcgtgggttccttttcctgtggatctcttgatcacgatgaagtgatctgctaataaaaactctctcctccccggcatgcattctttctgatatctgagggtgttgtgatcctcacagccttgtgttgcacaatgttgaatgggagaggtgagcgtgtgcacccgcctgcttcccatcacagggttcagtgtctcacggctcagtgccatcttgttgtcctttcctgttgtgtcagttgcagcaggttctcaaggcactcgtcagctcaggccacccttcatgtggagcctgctggaagtcggacctgtaaatcagggttatgtggctttttccttccgttaagatgattgtgtggatttttaacttttgttgttgttttgctagagtagtaagtggcatgttttcttaatgagtcattgtgcctatgtcttattaaaatagttgagcataccagaaaatcagagtgtggaagaaagttacaacattgggatgtcccttctctgtcaaattttctgtttaaaatagaatatatttgatgtatacaactaactttaaatatacacacctataaatatacagaagaacacactaaagaagccatcacagtgtggaatttgcagaggaactttgaattataggatagttagcgtagcttgaacacttattttctttaaggacatcttttctactctgataaaaatttctctggatttttcctgacatttaaccaaactctcccaagggcagggaactatgatcttagattaggaacatgctctgtgaccaaccagtggggtattactaagggtcctttatcaagaaataagtctttaaaacacaaaacaccaccagtgaaatatgttaatcctataacaaagttcctaccatttacaatgtaaaagcagtaagctttggttcatggatgccccaaaattcagaatgtaaactcacagtcaccttgtgcccttttgtaatcccttactcaccatattcccatcccccaacagtcaccaatctgccaatattattgttttcgaatttgcattcccaacatatgtggaccatgacagaacgtgcttcatcactgagtgctagcctgcctttctgtagctcacgtctttccatgaatgaatacacccatacattgcttaaggacaagcacagtctgggaaatgcactagggcatttcgttgtgcaagcatcagagtgtataatttacacaaaataagacaactgcatctgttttaagtgatatgacattatggaatcattaccatctctgtggtctgtcattgaccagagcactgaatggcaagcagtatatgatagatatcatccagcctttatctgctttctcttgggtaaatatttggattgtctccaccttggacctcatgcaaatggagctgccataactatatgtacgagtcttagtggtatggctagatcggcagatatacgtttgaaaacagctagttgttgaggctggccgatagctcattgggtaaaacacctgatgtgcaagcatgaggacctcaatttggttccccagcatccacttaaaagctgaatgtggaagcttgagttggtgatcccaatactggggtaggaatggagagaagtgtataccaagcgctcgctatccagcaaaaacagtgagttctggattcagtgacagaccctatctcaaaagtgctactgctaacaccaccaccaacagtactagcagtactgtggagaactaagaaagcagtctgaggttaaagtctggcctcatctaccccaacaaggcacacctctgatccttctcaagtagtgctattccctgataaccaagcattcaaagatgtaaatctatgggagccattcttattcaaaccaccacagtctactccctggcccccataggcttatagccatatcataaagcaaaaatacatgcaatccaacattaacggaaacagcaaaaaataatgtagaaaactaataaagctatctgaggttgacctctggccatcatatgtgcacacacagatgagtgcactaacacatatgtacacaaacacatacatatccacagattagctacagttttcaaaggtaagtgagccattttaactccaatcactgccatgttcttcctataatgtccttgctaatttaactaactaaattaattaattaattaattgtgtgtcatagcaactctgtttcatagaagcagtttcacagaaaattcccttctcttccattttctgaagaatttatatagagtcgaaattgctttctataaatattttgatagaaattcaacacttacattctcaaatctggcattttcttcataggaaacatcatttagaaaatgtattctttctctatataattatttaaattttctatatttatttttattatatatttatatctattaaatctataatatataacaacaacattaataatttagtaaatttaataaattaacaattaatttattaaaatataataccaaaatataattttgtcatatatttatatttattatatacattatatttaaaatataaaaacaagtaattattttaaaattataattgattttaatttatttctgttgtgatcaaatatgtattgttatttctgatctttgcaatttattgagttttgttttatggtcaaccatgtatatggtctctctttgctatgttttttatgttcatttaccaaaagtaattaatcatgagtaagcttgtgatttgttttgtagtatcaattagttgaagttgattgataatgttcaagtctctctagcctttcttgacttcaaaaagaaattggttggctttatcaggtactaacccaaaacctcaggagcctcagctgggtttttccagttcctctttaagacgcatccatttttgactagttggtttggatgtctgctgttaaatgcacacacagtgtcactgtgctttgaagagctgaagtatcactgtaaatggtgcagtgttcttcatctctaaaatcttctgtaatcttccctacaatatattatggccaccacacagaggggcttttctactggtgtttatacagtgtttctttccccaggcttttgtttggtcactttccgtcattttaaatataaagctatcggcagtcctaacttctttatctgctgtggtaatctgtgcttttccccttttaaaattttatttttaagcttcaaattaaaatggaacatacaagccaggaatgatggtatacgtgtttaatcccaaccttcaggaggcaaaggcacaagattctctgtgagttcaaggccaacctggtctacttaatgagttccaggccagccagggctacacagagaaaccctgtcacacacacacaaaagaaacatatagtcatggtacagtacatgtgaaagtaaacagagaatagaactatttccttttaattgaacactttaatacatttacatttaatatagcttataggcatggttggatttcacttgatactacgtatttttccattcatattgctaattttcactcttgttttcttgtctactgctgtactaataaagtattttcaatttattttgttaatattcttctattagctcttttttactttgtggtttatagtatacatcgtccaggtattatagtctatcatgaatttaggtcataaccactgagtcctctgtctagacctctgaagccttttaagtactagccagtaatactagttcttaccaacctgatttttgttgagattcatcagctttggccaagagatttatatttttcttctctaatttctttctcctctcccgagactttaattgcacgtttattagatgcctggaagtgcttacagtcagtccagcctgggtttactatttcatccgtattgttcctctgtgattcagtttgccctgctttcagattcattaatctttccttctacagcatctaatctctgcaaattccttcttaatagctccctttgtgctctgctacattcatagtcttctttaaacctttgagtactgggtatgtttaatagctgctttaaggtttatcactcataattttatcatcattcttatttctgtttctcctgattggtcttccttctgattttgaactacattttcctggttctcctcaaaagcaattgttttatgctgcacattgtagatggtgtgttgtgggcttaactgggttgtgttttctttctctgaaaagtgtcaccttctttctggcagattttcttacagagcaacttgatacttcatagtcttgctttgagaaagggtcagaacaagtcaggagtcattcgtattccagggttacagtagctcttccaaggcagagcccttctgcttaagacagcaggccttctcctttctagcaggtgagaccagaaagttctcctaatcttgtgcaacttctttgaaacctctgagtgcacacacatgcgcgcgcgtgcacacacacacacacacgcacgcacacacacgcacgcacacgcacacacacgcacacgcacacacacacacacatgttttctctgtagagattcgctttacacaaattatttacatttcagctagagccgttaaggaagcctcagtgcacatttctggaattccttcttggctcagttatctcttctttgtcattctgtcctgccctgtccagcctcatcacaaatcctgccctggatcactgtcctttcggtttaggttcagtgagagggtgtgcccactgggccctactctgtcctgtgagctgattatctctaatagagtttggggaatgagctgagacgccccaggtctgctctgtggatcacatcaccaattgatgagggctgtaagctttgatttaattgtcttagcttcatcaggaaccccagtcctgtcccagccactccatcatggccagaagtcttctttccaggccatgacgtttcacccgttcctaccttctgcctttagtgcgcaggattcctgacttcacctctgctctgtagagtatagagacaacccatgcctctccactctcttaatttttatctgtatttttttctacctgtgttaattttcaacttcctataggagagactttgcaccctgccattgtttaggcatgttatgaataaaaatctcacgggtatttctttcaatgggatgtagccaatctttgagagatgctcatttctagtgcaagtccaggtatcagctccagcctgatggtgctcatatgaggtcaacatctggagcagactggtaggtaatgtcagttgggaacctgctgggacccatccatgctcaccgttaatccactaagtgatcctgaagtagtgaccagacctctatgaccccatctgctttgtcctttggggcaatgggaggagaaggagagcctggtggccccgttacagcctcttgttgagcttcctaactctgtactctacctcggtattccacgtctcccagttctgactcttcagtacatccgctcatggatggcatgagtcgtctccatcactccctgtgattctctcaggtaatgagctcctacactcaatgcgtgaagatagggggatgaactggaacacttgggcctatagagagcagggtcatccatggtcacagcactcgtcattgatggcagtcagttcctgtaaaggaagaggtcatgatgtggacagatgatcaagaaaggcactttcaaggagggcttcctgaggaagtgtagcatgtaggcctaacagttactcgatcaaaggaaacagcctgggagaaggccttgagctctaaggagaaccggtgttagaggagttgagagagtgaggggcctgagctgagtctggtgaggtgagaaggcccaggcagggcagctagaaacagatgattgcctcggtttactggatcgggtgtctcacaggtgccctgaggtctctgttctaaggaatgccagcagacatcaaatgtgaaactatccccagacatggttctgcagccacagaaatggatctctgaggaaagccgctggccagactgctgctcatggcctctgtccttgttctcagggctctgtatgtgtggatccatggtgtctcatgattctcagaggggatctaggatattcctaggtctccttgagcttctggctgcctgagatcccatgtcatctggcacctttttcctggatgtccttaaggactgcgttagagctcctgggccttcgttttcctgtctctaagcaggaacatcagtagcgatttccttgtgtggagcagttactttaaggggatgtctctgggctttctagatgtctcaccgattcactgtgaggctacccactcagagagggccatcctgtctcatcagtggggctagacaggggaaactctgggccctgtagagttcggagtccaggactgttgaggccagcagccctggagctaggcttccacgatgggctggcctctccagcctcagtacaggcctgagagtgagcctctaaccctaaactgttcctcccaccgggagacagtcaacagtcagaggtgttccaggacagcatcagtgttgaatgtgttgggagaagccatcagataagccacccttcctgtttgactcaagtcagaaagaaagggaaagcatacaaggtatccctagccagcagggagctccctcagcttccctcacagcgaggccctgggcatctcctcagccatgctgggtcacgctagagctgtgactgagtgactcccctccctgtggcacagctggccttataaagacaagcatctctgagagcagaattgtaacaatgacctgcctcatggagccagaaagccagattggctcagagcagtgacccaggccctgtgcacaggtggggctctcaggatggtgctcactcctggggtttctgggatccccctctctgcctggttctgttctttccatggggagacataactgtagaccttccatggtttcatgaagcaggtcttgtttgcttctcttctgagtgagtcagtttaggcccaggctcaaggcactctgcccacccaagaccaccattctcaggacctagctccctagaggatatgagtaaggaaggcttttcaaaccttacagggaacaggcacacctctgtgacaaaggcagagtctcctaaagagagcagttcccagcccctgcccatagggttctgtagagcctctctcccttccctctcccctctcccttctctgctccactatccagccccaaagaaccttctgctcaccatcacttccgagccagattccctttgaaggaaaagggctgagaagcagatatgctagaaaatgttctcggggctggggtgactaatccagattccccaaggctaaagacacagacccgcagagactgcacagagatgatggggggcaaacaggaagccctgagcacgatccagaggtcaggcttcctgagaaggtaaaaggaaaactagggaagattcccgactttcaaaggttctcgggctcctcatgggcgcttgagcccttgctttctatacaaggaaggcaagttgggcagagaggcatcagagtgggccttcagggacccgtggctgagaagccacctcgtcggcaggctccaagggccctcaaggactgagagcatgaccctctcaggtaccgcccccgggtgggagccaccggaagatccagacacgggttctgagtgttcccatccagaggtcaccccatctccacgcttcgtggcagcgaagacccagtcgaaccagtcggggaaaaaagctccagcctccgtggtccgatgcaccagcctcttacaccgcacgcctccagccacccaaactcagacgttccgagctccaaactcgggatctccggccagcaaggcagcagcaggtactgacggcctttctcaccggtgcctccctggtttcccacccaccacgtgccgtagctgttcccctgcaagaacaagactggagttcccatcatgctttggtgcagactgggacccatggcctctggccacctctgtaaccctggcagaccaagttataaatctcagctggaggtttatacaacgaaatttgcaaacattttcaaagtaatttgatgtttttttttcccaaatcatggcctaatgggttctgttttatttggcctttgtaaagtttaaaagccttttattaaagattaataggaagtatttgaatatgaggagagtctgtataaaaagaagtttgggtttctggctgtgttaagacatcaaatctggctcctgggtcatgttcctgcagggtaatggttcgtgcctccttcatagtatgtgtctgtacacttcccctgttctacaatccccactacaccctgctgcatccctgccacagtagtcccatggcaggatggcaggtaccatttctgtttgtgaccacactgttgtctgtgaccatccagccctgtttggacctcatggcatgagctttcattgtcacctttcagaaaactatctcaagctgtttcagcatagaaatggcctccatcaaatggggcggccgactccagctctgtctctgtgggctcccactccctagagtttacccatgaagccctccaggaggtagagactcagcaggaaatcagaggatgtcagccccaggcctatgcaaaagggggctatggctccagaaggtgactgggtagcaaggtccccagtagttgtttcttccaaaacagaagacatactatgtgctaggtaccagtttccaggagtcctgggactcagacttgtatgagaaaagccttggtctacctacccagatgactgaggctctgggtctttcagttgctttcaggaggccaaagctgcccactaaatgtacaaaatgtttgcattgcgaggtcagatgagtgagccactgaggtcatttattggtagcctgtgcttgcctttcctctggtttaagaagctaatttgggccaggctgtggttttgtgtttactgtgcttatatttcccaaaaggaggggagtcgaccaaccttgaagtgtggatttttcaaatgctgtgttgtgacagttgtgtttttgcttgcaggtaggaggctaagtcagggggatcaaaatttcaagccctgcttgggctatggagtgggttcaaggccagactaatcaacttagttagaccctgtcttaaagtaagaaaagagggttggggggtagctcagtgataagagtaattatggagaccttgcttggcgttccatcctcagcaccttaaaagaattagattgtccaccatggtctccttggtggtagacattggctcaccagattgtagggtcagggctttcttgactttaccctttttcttgagctttgtggctgagcttttgaaggtccgtagcatctgcagagaattgtctgtggagactgcagtcattgaatgtcactgtctccaggcaagtgtcaagcaaaccatgggcacatcagtggctgcctctgtgagacttggaatccctggggtggatcttacctgggcaaactgtatggtcaaatccaagggcaccaggttaggggctgtgaaatggtgcgtgtgagaggtcgagactgtcactgtcattatcctggagaatatggctgtttgtgtgcaggtggacatacacacatggatttatatttctcctgaaatacctacctgcctgttcccctatgaatacagatgaaggcagagaaggggaccttccttcttacagaggaggcacctgccccagataaagccttacgtgctatcctagtgggtccaggagcctgacaacttcagtgtgtctctctgcctgttaaatgggtcgtactgcattcgtggtgttgggaggattagctggtatacagtaggtgctcaagaatgagagcccctcaccctctgtagatagagaatgaatgggcctctgccagcttacatgctgtctggaggtactcaaccaagctgtaagggacacagaggaagcatggtccttacagtgccacaaagcctctacaggctgtgggagagtttgaggcaaatggaagacctgagcaggcctataggaactgcctcaggctggctgcctcatccgtcatccatatcactcagcacttcgttgggtaggacagacctgctgagtggtgtttctccagctgattttcaaacagcaccacttggaaggatatgtaatccttaaaaatccctatattttgggtgcaggttaagttaaagcccagcgactctccttctggtcagtgtctcggagccattggtagcctcatccaagctgtataaggggcagagatggctgagtatctcaaattgactttcctgagaccttcatgtactggatcagctgtgttctgtagtacccagagcatcatagaaagaagagctgggttgttgtctgctcgtgtgggtggggatataagtatagagttttgcttggccgagtccatccctgcattgtggggtttccagagagatgctgcagatgtaagctttggggaaggtactagacgtggctgacaaggagttcctacttccccatgcaagttctgaccctcctcacacagtctttggccttcccagagcaagtatgaaactacccctccctacttgtcacatgttctgtcccagaacatcctttatgccttgagattcttgttgggtcaaagttgcctccaggaaatggactgacatcctcaatcctcatttgggagctgtcgcagcagaatcttccagagaaaacagggaagctcatcccagcgactcaatcctggagtagaaaatggggccctgacctgtctgccggctgcatttcaccagtgtgtccttgggcaggtcaccctttccctctccatccctctacctcccagacacacattctctgagctccatgggcctcctgcccactcagccctgacagacaagctgaccattccccgtgccatatcacgccccctctctgcctccttccagcagaaaacaccttcagtcgtcgagtagaaagcaaagcacagaaccactttgaagagaccaatagcagctcacaaaattccagcggtgagtctgtctgtggtgtgacatgtggcatcacgtgtcacctcccacagaagagcaggtacctatgactggggtcttctgatgcatggtggggcttgttgggagaggggctgggtagggaaagagagagagagcagagcttatgagaagcagaagggaccattatatctaggagcccgtctgtggcttctgcccttgcccacagacagggaacttccttaatcccaaactcaggcatcaacctcgccagcccagatgggtaaccctaagagagccatttgctgagtagtgccatatgtagcaggcttctttccagagaggcaaatggggtgatactggagccagaggtcccaggttctgtacccaataccacagaagagagtctcttctagaccctgcagtgctatggcttggcctgagagctcctggtggtgtttgctgccacctggtggctgccttgtactggcacagcttgggactccaggatttataaagccttggcaggaatgtggatggtcaccagcaatccctatcttagaaagggacaggaagaatgtatgcacagttatggccaggacaggaggggacaggtcttctgccactatgaagctgatgtcattgaatattaggcctgagtgaatgccccactgtgctgacactgcctggtacatacctgtagtgggtgcttcttggccacatgggcttcagcaaatggttcgttcggatcacagataccagatggaggcttctgcctagtagtagacccaagctccttcaaacccaagtttgatccctgctcctctggctccagtgagtggtctagatgagtcccaactcctcctcggctgcaagtagcttgaggagcacggacagccccagagaacacaggcaggaggaggggagggagtgttgctttgggcgttgcttggcttgttttaccttggtgtaaaccaagcacttggtgcaagtaccacttgggtcatcactgtgaccctcagagcttctgtaattggttggtctaggaggaaagcatgacctgcccggggccacagaggattaagtggcagcctggagctagaacgtgtctcctgtcataccctgggctctccacccaagccatgctgcaccccttacagctctactgccaccagggctaacgtttatgcagggacagcactgtcatgggctgctgcttgcgctggcagccaccattcattgagcacttacgacgtggctggcatgtgttccgagctctgtgtgttgcgtctgttttcacccttgccacagtcctgtggggatagtgttcctgttactcccactttctggatgaggaaactgaggctcaggataagtccactgtagccccaggtcccccagactacaggtggagccaggaccctcctactttgcctgcactccactttgctgcctgctatattgaaggcttaccagccccactctctggcaatgccagacagtaggagggcttgccagaagacaaccaagtggctaagtgcgtggccatatgagcatcatacctgggtcacagagcctcactgtcagagcaccctgaggcttggtcgatatcaagtgacactgccttctctgatggctgtgcctttctaccagcacctctcacctaccttcccacacagactgtgtgtccaccaaggagctctctccaaagagggccccctggctcgctcaccagctgtggtgccttcacagcccccggactggggaacatttagctaaactgtttctcttttgcagaaactgcaagtcccctgatttccaaccctttccctctcctgcagagtaagtgatggtcctgatgggagggttgaagagggcacagcagggcagagagtgactctctggcctccctgaggtatagacaggccttggaccaccctgagggttagtcccagtaatagccttgggaggatgctaggggctccggagggtggagaggtcaggtaggtagaaccctgagcacacaggaggggggacaggttacccacttctgattatccagacagcctcaggacttctcttccaagccacctttttccctctctttccctccccttctacctaacagtgtggtctttctttcctcccactgcccccttctttgccaggcactagtgtgcttcctgaatactctgagcttttggtgtccctgctgcctgctccacttagcccatcctccagcttatccagttgtacccactgcctcgcttcccccctctttctctcattgcttccccctcccattgtgagtgtccttattcatctgtgcatgcgtgcatcttgtttcctccatgaacagtgatgctcgtgtggtcccacgggcagagggttaagctgtgaatcccaaggggcagagtctgtttcctgggagctcctggtgcctggatgttgtccttcccatgtgctcagaacagtgcctgccacggagtaagcgcccaggaagcagcaggcccgttgagttagcagcctatatctgtgtggcttcccctctttctgctcctgcctctccttggcctttctgtctccaagctagtggacaggccagttaacaggctgggcccagggccccaagtatgcacctggatccccaccttcgaagctgcctgcagcccagtgtcagggtgcctgagtatggaccacctgtcacatgcccacctgtctccccagaaccctacacgtgcggcgcctgtgggatccagtttcagttctacagcaacctgctggagcacatgcagtcccacgcaggtaaggcccagagaccagcagaacccacgcagagcacaccccccccccctccatcccattataactggacacacacatctctggcacttcccgggaacttaccttctgagccccagccagcctgcccttcatagctgactagtatgaactctggcatctcagctctgcctcagggtggtttggggaggagggaggaagatgggtttcccagaggttgcaggtccgaaaaaaagacctgtaaataggttcaaggtcaacatgagcagaagcggatggtagagagagtccagcagttgcgtagattgtgctcaggccttccccagggcagtcctgtgcactcaccatttctacctcttgaaagccctggttctcaaactggagctcatgaagcaaatgagcaggggggaggctggggcagagggagtccacaggctgccagggctaggaccgctctccctcccaggctcagccatccactggcagccttctgaacccatcctcaccattgccattgcacagctcaggcattcagttttccagtctgtatccgcagacatcaatcacagtggcaccagcttctggtctaaattctacttagtcagaattactgtgtgtccatagggagagtccccaggccccagcacttccacaaacagttactatgtatccatacagctgttgcaagaagcctggctggggccctcccacatgggtactcagggatccaggtcctttccctcttatggtcctatacacccctgggtacttagaggctttcagctctgactggtggtgtggggagaagtgaggggttacacatgtgacacaggtcctaaaagctgtcgccattggcacatgaccatcctaagtctgtggcagaaggctgctcagagcctctgtccaggaacaacccaacacattgcagaaataactgtgcatctgggcaatggggcaactactacctgtccatccagatagctcttctagaggcattcgaaataacacgtaaagtggggtggtgatgaacacatataatctcagcccctgggaaccggagacaggggagtcacaagtttaaagccctccttggtgacacagatcttctttcaaaaaaaaatcaaagaaatgaaaataaacactgcatgaaatatgtgtggtgtatgatgggggctgattagtcagcatagttgttatcatgtgtgtcccctgaggtttacaaagctgtcaggtaatcctccagattaagcctgactagctcaactgtccaggttgtctcagtcactgttgctgggaagagacaccatgaccacaacacctcttacaagagaaagcatttaactagggtttgcttacagtttcagacgtttagtccattatcatcatagcagggagcattgtggcacacaggcaaatacggtgctggagaagtagctgggagttcgacatccagatccaagggcagcaggaaaagagaaatactacacctagctttggcttttgaaaccccaacaccacccccagtgaaacactttcttccacaaggccacacctactctactaagccacacctcctaatccttctcaagcagtgccattctgtgatgaccaggcattcaaagatataagcctatgggggccattcttactcaaaccaccacacaggggtagaccaccacattccactccctggaatcccaccccctccccccgcccaggtttgcagccatatcataaagcaaaattgcattcaattcaactttaagagtccccataatttatcacagtctccacaagtccaaagttcagagtctcttgtatccttgactctaaagccagaatgtggccaaagctgccaagttctgctgcttgatggggctgggacatggcccccttgttcagttacatctgcaccagctttctgttgttgacggtttctttcactgcttaatcttttctttaatcacttttcacaagtcggaagcttagctgggtaaggtcttaccctgaggttaccacttcctttattcatttagcttcaggtgttttttttttattgttttgttttttaaaaatgttttatgtccttgaacacagggcatagctccaccacacttcctggtctgcttttctcttcaaactgtacaatttgtaattttccttaataagcttgctccttttcataatagtcttcataagagtagctgctaataaccatagtcaaggcatggggggaggtagccacattctttgccaaaatattacaaaaatggtctctaggccatttgtaatagtctttccctctgaaacttcttgagttggaccccacagttcaagtcgccccagcactgctttccccactcctgctaataaaacccattaaactccactaaaagccttcaacggagtcctaattcaaagtcccaaagtcaacactctacccacgagctggtcaggcctgtatcaggaatgcaccactccttggtatcaactgtgccttagtttctattgctgtgaagcgacaccatgaccacagcaattcttataaaagaaaaacatttcactgaagccctgctcacagttccagaggtttagtccattatcatcgtgtcagagagcacggtgccacccagcagacaaggtgaagtagctgagagttccacatccagatccatgggtagcaggaagagagccactaagcccgacttgagagcccaccctcagtaacacaaagacacagctaccccacaagaacacacctcctaatgtgtctccctagtgactaagcattcgaatatataagcccatgggagctgttcttactcaaaccatcacacatgggtagacttcatcttccattagatgacacaatgttactccagcctccgttcactcatttcaaaaagtgctgcacaccaggccgtaattcatattgccttgggagagctccctctcctataaatcattctacaaacacaaccaagccttttagtggtagtcaggactccagagttctagttctgctccctacaggccatgagacttcaggcaggaatctctccccatctttaaaagcaatgacacacaggctcctgtggcctggtatctttgcctcacatttcaggtgtctcccatctcccaacgtctccacgatcagctgggggtagttcaaagcatttacacatgcccctaatgggatttacagccctggaggtgatagccatggtccctctctttgggcaccatgtctggttcctgagccttacagcccagcctcccacagttaattcagattcattcatgccttcctgcttctgtctgtctctgtctgtctctgtttgtctctgtctctgtctctctgtttctgaatgtctctgtatgtctctttctgtgtctctgtctctctgtctctctctgtctctgtctgtctctctccctctctctctctctctctctctctgtgtgtgtgtgtgtgtgtgtgtgtgtgtgtgtgtagctgtgagtttggatgtgggtgcttccccatcattctggcagatggtggacagaagaatgatgattcaagtctgggctgagccaggaagtggccgcactatctctcagcatcttggctggttcagagtctcggaagggctgctttgtgctggtccagcgcagccagagaatgccttcctcgaaatccagtgcaaagccaggcggaatcccagccaggctgaatcaggattaaaggattggcttcatggagggaaattaagcattgtgagctgcacagttcacagcgccgatgataaggggatcagcctcaagtaacaccaatctcattaagagcctctgaatggcacaggctaattcacactagtgaacttatgtgctgaaggggacctgtctgccctggtgacaggtcaggactaggactagcagacatgatgttatctatagtgagtggtagtgagtgcttgccatgtgttgggtactggtcatgggtcgggtatgttgactgaggtacatttccatcccctttataaaggcctagaaaactatgtctgccatggctcataactatctaacatcatttcaactcatacttgctgccaggtcttggtctgagagttttacatatattcaccatttaattctcaaagtagctctctacatgccacattaactccatttcacagaaaaggatgctaaagagctggaaaaatggctcttagtacagtgtttgccttgcaggaatgaggaactgagttcagttcccaaaacccacatagaacgactaggcatgacagtatacacttgtaaacctagcctggagaggcaaagagagggaatccttggggctccctgaccagccagcctggcctacctagtaaggtggatgccagtgatagagtctgtaacaataaaataaaataaaataaaataaaataaaataaaataaaataaaaaaataaaataaagagggggtgggggagagtggcccctaaggaacaagattgtcctctggccttcacacacacattggcatgcacccagcacacacctgcatatgctcacacacataccaagaaaaaggagtctgaagcaaaagtgattaaattcacttgtcagggttataaactcagtgataactggaccgggattctcactcccggaatgaactcggtttagatagcatggccttttaacattcacgctgaagccgaggtctgtcctggtggagtcagtggactgactcagggctgggcccttgcagtcccctccagtgagggtggagagcacagttaagaagcacccaggagtctttgcagagaataaattaaatcagcagttctctgttttacactggggaggtggccaaccctgatttctgatcccttgaaccacttcacaactttggaattccttttttccactgtaagagtttttcaaacctttccttccaaagatgagggttgcagaggtgatatattcaaagactatgataccttctatggcctagcctcacctcactccatcacctgttggaggtacaagttgagcatctgagatgcttggaagcggaagtgtttcagttcacacagctcagagtatgggatatttgattatgtagagcatgcgttctaactgttctcattccttccctttctcaccttccgccgacctccttccccccaaaagcatttcctgacgctcatatctgtctgctttgtttcgtgacttactgaatttaactacagctgtctgtatgaccctgggtttagaattatccattggatggtgatgagcttagcagtgggcaagcagttgaagatgattaattcccatcttccagagcctgttatagctgatagtgtagtagtagggaatagggctccacagcccttcccacatccatggatgattgctgacagggacggtcttctataggttcagtgctggtaaccgtagctgctatgagttcgtgagtgttatggttgtgtaatgcctagaaaatgacattttccagcccttcttcctatctttagctctttcattcttcctgatcccacctcctcagtttccctgagcggaagaggagtagtacaaggtcttttttagggcgaggcactcagatatcacttatccttggtaccctgggcagccacgaatctctgcactccacttatattcactgtcaaaaaagcttctctgattagggctgagagtcgtttttgtctagttgtatgaaagaggtgcttagtcattttagttagacagtagcaataagttatacccttgggtctctggcttccccaagtatggattgttggcctggcttccagtactaagcatggattccttcctgtggagtggcgctcaaattgaatcagagggtgattagtggatcacacaatagttgtaccgctactccacaggtgggcacgtcttgcctagaaggttgattagtgagattcacagcaaggtaacttcattgacttgctgcctgcatcacaactcctggctctttgaaagttagccaggagggagagtatttccagtgagttccaacttgctttctttttctcttataagtgatgtgtgtagagttttcagccagggggttttaacactgtagttctgatcagcattcaagagaactgacaagaacctgtgttgttttgtgcccccctggaacctcctgaccagctcctttaaggtaccccatatctggcaccaggagtttcgtatggtgacccactgcttctaggagaagcattatcaagtaatgatgggtgtctctcatcaatctctatatttttaaatagcttaaaaagtagtaaattttcatatggctcttttgttcatccttggttttggttaactctctcctgccctctctccctgatctaccaccctctgaccctgcttaaatattaagacccctcctgttgccactctcgactttgcctgtgttctatccacactcttgtaaggcactcccctctcccagtttcctctttctagtctccagactacagggaagagtactctaggttaaacagagctaaagagtggaagctgaggttcacgtatgaaagagaccaagtggtgttttattcctgggctgtcttatcccactcactataatgcttttccagttccagttgtttacatgaaaacttcatggcctaatttttcttcctagttggatgaaattccattttgtatttgtacctgttttcattatccattcatcagttgatggacatccgggctttcattagcttactcttgcccatcaagcatgggtatgcaagtatctatgcagtatgatataagatcttatgcatatatgaccagaggaagtatagctgggtcatctggttctagttgctttgttttgttttgagaaacctgagttccaaagtgtctgcactagtttactatgaaactagatccctgtctttcacctcgcacaaagttcaactccaaatggatcaaggacatcgacataagaactaattccctgaaagtgccagggaaggaagtagggagcaccttaaatacttcctgaataggactcatggaggcacagaaaataaaaccaacagcagacaaatgggatgtcctgaaactgaaaaagcctctgtacagtaaaggaaacaactgtcaatagaataaagaggctgcctataaattgagagaaaaagacgcatctgtgtgttggacagagggtgtttgtgtctgaaagaaactcaagaaactgaccatgaagaaagcaaacaactcagttataaaggaggttatggaattatgcacagagttctcaaaagaagaaatgcagatggttaataaacactttttaaagtgtacaacgttcttatcactcagggagatgcatgttaaagctactttaagatttcatctcatggggctggagagctgtctcagtgatttagagcactggctgttcttgcataggacccaagttcaactcccagctcccacatgacagtcccaggatctgacgccatcttctggtcttcacaggtaccagacattcatgtagcacacagacatacaggcaggccaaacatgcatacacataaatttttttttaaatgtttaattaaaatatgccatctcactttagtcaaaatggctgtcatcaagaatacaaatgacaataccagtctcataaaaggaagcttgagagtcttcctacccatgttttctaggagaatttgtattattatttgagttttgttctgttttgtttttttacaaagttagccaatgaacctttaagagtctggaggtttctttatgagaagttacttaactctgagctatttctttaatgggtgtaggactcgagttatcaatttcttctgggatgagctatgtttctttgtgtttttgaggtgtttctcttgcctgacttgttgaattcattggactaaagttcataattacttttagcccttcatgacatctgtgggctctgtagtgatgacccttcattattgatccaagtgatgtttatcctctggtgagaggtttatcaagtgtattaatctttccaacaactgggcttttgatttcattggtttttctctttgaaaaataattcttgattctttgttaatgtcacaccatgcatcccaatcccattcatctctccattccttcatatccaccctctgccctcccaaactccccccaagagacatacacacacacacacgtacatacatacatacatacatacatacatacatacatacatacatacatttatacatcttgtcatggaagctatagtatgtcacagtgtgtcccacagtgtactcttttatccatacatctttacttattcattgaagtgagtcatgatttgaagcttctggcttctgctacaccatcaatactggatgctcactgggactcctcttaggtatcctgttgttgccttgtgtcatggaggtcctgcacctttatttctgtaggactagccccttcatgtgttccagcagttcatagatgaggtatatgttggggtgagccaactcgaagctctggatctgagcctgggtggtagctaaatttgtcagaccaacagctctccggtacccacaccaccagggcaagctctctagcacagtcttggctagcttacccagtactgcagccaacaagggatagggccagctctcctgaaatcatgacctcagggctggttcacttgtgccttcaccaccagggccagttctactgtgctctcctgactactgcagccagtgaggggtcaggcttctgggccggccagctttcccacctgccatgctacaggcatcaaggggcaagagggagacatctctccctcacccacaccaacacaaggcagatggagggctgggccagctctcctactctcataagatgcacctgtgcccttctcccccaccaccaccagggccagctctactgtgctacctaggcatggtgtagggccacttctcctcagggacagggccagctctgcacagagcatcaacatagtcccgtgagtggtaatttgagctatggacccctactgttgcatggccatagaccagacatggccctcagcaggagcacaagccaggacttcaccatgtcttaggtggcagagaagactattcatctccgccctcatgtttccaaccccacctctcttcatagtgctcaggccatccccttctctttatttcccgtctgtacaccccattctggcacgttgtagtggcttctgctgtggatgggccgcaaagctagtggctcctgggtaatcatagggtgcnnnnnnnnnnnnnnnnnnnngcctctgggtaatcatagggtgcctggagggctgatgttctttgtaagaagtcctctatgtcctcggctttccttgttgtctccatagtccttcctgaagttgtggggtggccataccattgtcctaagtttctaaattgtacagatgaggctttgaaaccataaacagtcgtgtgagaagcctgaactcaactccctgcggcatgtgttgctttacccctagttgctcatcacccacacacacactcctgccccacacacccacccctgacccccacacacccactcctgacccccacaccccacccctgcccctttgatcttacctttctcttcagcttcctcttacctttcaacgtgacccattactccctttgttctgcagctgacaatgaaaacaacatcacctccaaccagtcccgatctccacctgctgcagtggaagaaaagtggaaacctcaggcccagaggaacagtgccaacaacagtacgtctcagtatgctggagcccgggacccctggaagtcctacagccccagtgcatctgtagcctgtctccctactgcatctatagcctgtttttccattgcatctataccctgcatccccactgcatctataccctgcagtcccactgcatctataccctgtagtcccactgcatctataatctgttccctactgcatccataccctgtctcccctctgcatctataccctatctccccactgcatccataccctgtctccccactgcatccataccctgtctccccactgcatctatagcctgtctccctactgcatctatagcctgtctccccactgcatccataccctgtctccccactgcatctatagtctgtctccccactgcatccataatctgtctctcattgcatctatagcctgtctccccactgcatccatagtctgtctccccactgcatccataccctgtctctcattgctaacacctgtacttcctgtgagactgaagatgatgcttacttgtccttaggactcaggcaggaattcttaacttacagataggcaaaagaaagccaggaagaaagggtgtgtgtgtgtgtgtgtgtgtgtgtgtccaatgcactacttttttttttcttccagagctgaggaccgaacccagggccttgtgcttgctaggcaagctctctgccactgagctaaatccccaacccccaacacactacttaaagccagagtcacagctagaaccccacatgtttacaatttccgtagactcttttcctgacactagccctacaacactttcctcactaacgattcctatataattcctgctgaagaaaaggttgtattcaaaggtttaggtaactggcacatgtggcaagtatgttgcatacataccactctatacccacggtaggcattatttatcaaccatagaactttatccccatggtgccatagggatatggtacagaccatatcaatttgtatgcaaaacaaaatctatttgttattcttcatgctaactatttaggatattgctactgccagttgaagtagctttgaacgtcaaaaataatcctttctctttttgtgtcccctgccagccacaaccagtggtttgacgcctaacagtgtaatccctgagaaggagcggcaaaacatcgcagagcggctactgcgagtcatgtgcgctgacctgggtgcgctgagcgtggtcagtgggaaagagttcctcaagttggctcaaaccttggtagacagtggcgcccgctacggggccttctcggtcactgagatcttgggcaattttaacaccttggcactgaagcacctgccacgcatgtacaaccaggtgaaggtgaaggtgacatgtgccctaggcagcaatgcctgcctgggcataggtgtcacatgccactcccagagcgtgggccctgactcctgctacatcctaacggcctaccaggctgagggtaaccacatcaagagctatgtgctgggtgtgaagggggcagacattcgtgacagtggtgacttggtgcatcactgggtgcagaacgtgctatcagagtttgtgatgtcagagatccggaccgtatacgtgacagactgccgggtgagcacgtctgccttctccaaggctggcatgtgccttcgctgctcagcctgtgccttgaactcagtggtgcagagtgtgctgagcaagcggacgctgcaggcccgcagcatgcatgaggtcatcgagctgctcaacgtgtgtgaggacctagcaggctctacgggcctggccaaggagacctttggctctctggaggagacgtcaccgccaccctgctggaactcagtgacggactcgctgctgctggtccacgagcgctatgagcagatctgcgagttctacagccgtgccaagaagatgaacctcattcagagcctcaacaagcacttgctgagcaacctggccgccatcctgacccctgtgaagcaggctgtcatagagctgagcaacgagagccagcccaccctacagctcgtgctccctacctacgtcaggctcgagaagctgttcacagccaaggccaacgacgcgggcaccgtcagcaagctgtgccatctctttctggaagcgctcaaggagaacttcaaggtgcacccggcccacaaggtggccatgatcctggatcctcagcagaagcttcggccggtgccgccctaccagcacgaggagatcattagcaaggtgtgtgaactcatcaatgaggtgaaggagtcctgggccgaggaggccgacttcgaacctgctgccaagaaggctcgctcagccaccggagaacaccccgccgctcaggaagaggaccggctgggcaagaacgaagtctatgattatcttcaggaacccctctttcaggccactcctgatctcttccagtactggtcatgcgtgacccaaaagcacacgaaactggccaagctagccttctggctcctggccgttcctgctgtcggggctcggagcgggtgtgtaaatatgtgtgaacaagcacttctgatcaaaaggaggcgactgcttagtcctgaagatatgaacaagctcatgtttttgaaatctaacatgctttaagactcaactttgagggaaaaaaagacaaaaaaaaaaaaaaacaagaaaaacattaggaacacacacaacactgtcacaaacaaagaaatttaagttctaaacactgtggaacctcattgtaaatgccccttgggaacttaagtgctttttttttcggtgtgtgtttgtgtgtgtgtgtgtgtgtgtgtgtgtgtgtgtgtgtgtgtgtggtgtagtgtatgcacacgtgtccatacccacacacatgacattgcatgggtaaaggatgtgggaaactcatactcaaatgcacagccagagaacctccacatgcgtgcacacacacacaggcacacacacacacacaaacacacaaccctggtgcgtgcatacatgcctttccttgggtgtgtgtgcactgaacggggtgggtcaggaaagctgagagagtggggaaacaggagcggtttcgcttttctcggacaggggctctaaggactcccgttttcaggtgtgcagattgggagaagctggggctgtgagatattcaggcagctgagggctgaagtggcttgaactcccatcccccaacccagccctccctcatcagaccttcatcccctcaacctgtggtacccatcctctgccccagctgctccggccggttgtccaaactgtgtcagatggacagtttctgcactggactttatttcttgtttcaccttcagggcattaagctgctgtacctgggacctccccctcgggtgtccagggcagctgccttagaaaacacactatctatctccccaaatcaggaaaggagactctagaaatataaagctgatgttctactttttaatataagagagagagagagagaaaaaaaacaagactttctttttccagagacatagctgactctccactcaattttgttgttgttgttgttgttgtcgtcatttttcacaatactttagcaaattttttatcttatgggggactcggtttcttttcacatgtgatttctgggaggcactgaatgtctgacttatgttctggagtcttgtttgttttactcgccctcttttattcctaagtcacactgtaaactagctcatctcaatggcgctgtccaggactcacctaaccaagatcaaggccatgactgtgggtctggagtagggagctgggaggagccctgggtccttggctgtggggcttggtggaagctatagtgggaagcatatgactttagggatcctgaatgtcatcgagagagccgctgcctggttcctgcctgtggtcatgtgaatgtctgcctcatgaatgtctgccccctgtcctcagactgcttcctcctgctcaccgtggcctgacctccagttctgcagggacactgacttaagtccatgtttgtgtctgtcagacccacagcctctcccactccccaaatctcaggggttctgggagtttacagccctcagaggtccccacaggcacctcagacctgtagtcaggacagtggtggagcacaggatgttgctggctggacagtaggcattctgcaggtggatgtgctgactaaatgctgtgaaagggcttgttagcccttgcttctaatccccttggccaggaactaacgcttctacacacagtccagatgccaagagggggccgccattctcttcacaggatgatgagcaaaactaccccataaaggtctttagcttggtgtttctgatccctccagtgaccacagctgtggtatggggatgcttagatttcatgttgagaatggccacccctgaggggttatttgcaaaagcacctctcctacctggggcttggactgcccccctcctctgtcataaagcattacacaactgaaagatacctcgacttcaaaagcactgtacccgtagcccttgcccgtcagcaggaggggagtggagatgtgaagactcagtggcttccagttatgctcaaggttccagaactctgtccttgaggcctaagcccacactcttcgcctcacaagtctaaccaagctctcctgtagagtctcagacacacaaacagatcagagaaggctgcgtccacatccactccagcaagctatggtctcaggaaccaccatacaatccctactgcaagggatgtggtagacatttccatcatggtgtcttcaacttggcacttaccgtcagaggaacctctgtccacagtggagagatccagacaggaactgaatgttgcaccctgaagaatgtaggaatgtcttcacactgcccgtggacttccaggaggtgggctctggattgatgatgaaggatacctctggtctccctcgtctgttgggaatggggccgtaacccagcacttgtagccacactggaagctgggtgcttcgtgcagtcagtgaaaacagatcctcaggcagagctgggcccgagctgctgttacagccaagcccagatgtgcattgcaggtattcttttggagtgtggaatattctccctccagaaagaaacttagcgttaaactccaggcatgtggtcataggtagtcacctcctgtccagttcatttgcaccttgaatcatctatcctcgaggcttagattgcctctctaggttcagtgtgagccccacttggtcctcagaaactcatcgctgggatgcctcgtcctcaaagattagaagggggtaggcggtcatttctctctagtgtccctaaccggaaaagctgcccagtgtctgctgtcatctgggccatctccacagtgcacatcctgcagccaacagctcagtaaatcccaaagatcccccaggtccagccacaggccccgtcagcagcaatatccaacttaccaaattctagttcagccaaagcactaagaaaggctcttccagttgatctccagtggcctgggctggcctcagccttcagaaggattttgccatctgcctcctgactgtgtgatcactataggtttttccatcataggctattgggggctgcaacaccaggaagctgggccatttctagcatacagcctagcttgagctgtatgattctctggacacaaatggccgttgctttaacatccgtggactcaaacgcagaagaagagaagaggaacttccattagtaaggttctcccctcaggctgccgtcactttgtttcatcggtgaaacaggctcttttgcctgggaatcagtcactcaagtggtctcaggttctatgaggagtgattatacatggaagcacttattctcagcgtggttctgttcccaacacctgagtcctcctgtcaagcttcccttgcacgactttcacagcgcccaggatgcagtgcgtcccaagtgaacacagctacgtgcatcccatccctagggctagcctgcacaggaagccgcatgttacagcaagagggatgctgtcagtatcctgcctggtgactccgcattcggcattgtggggttggcgctaggcagagggaaaggtacctgtttcctggtgagaagggcagctggtgacactgatgagaacccatctccaggtttctaggaaggacctggacaccagccgtgtgggctggccaagagtcttcatttcagttcgacaactttgacctcctgcactttgaagaaacggaagaattctacaaggcatgttttccactgtgaagctgattctctgcttttggagcccccccccccaattttttttgagcaaggtccactattttcctggactcgggctagacttcctgaggagagtgtggatgtcttacatgctcactcagaggacacagggtcaccatgaaatagcaaagctcgtatgtaggcaggatgccacaccagaccttgtcatatcatgctcaaagaggagagcacaggacactcggtaccccataagctatgccaagctcccagcttcctggtcttggcagcggtgtgacattgttgtgtctgtcttttatctagaaggtttgtggagggcagaaccaagagagtgaggctcaggctataccctggagacagtgcacaggggctcctgtccccagggccgtgggagagctggcgaggaggctgcccctccccttcactgtggcaaacgtttgctaggcaaaccaatgatgcggtgtttcctcatgtttccctcccatctcccttttgcaggctctccgggggtcagggatggttgtggctgtggttgtttttcttcctctcttatttgggtctgaggatggtagtctggagagccctggctttgaccaagggaacctgtggtctctgagcacgtatagacctcacatggaagagggtggtgctttaagggtccactcccacttgggaagttgactagccgtggagttggcattggcatcaccacccgccaaggtcctaccattccttgggcaccttgactctttgaaccaaaggtccttaaaggggcagagcccagccttgtccttaggagtcagaatctgcaggcccgctggaacgggggctcccacaatccaggtgccagaaggctcacctagaaccattctcccagccagccatcgtgggtggcttcccaaacagggctcgagcttgtggcctgacttgggctgggcctggccaaccatgaaagagcaagagccatgaggcagggccttccagatcccaggcatcaggaaaccattttgtataacagcccgaagcagagatattttttaagacgcatgaagtattttcagttgtcttctgatcctatctttttttttttcttttccccataacttcccgttggtggtccattcacatcaggtaaatcttgagacgccttggtgccccattcctccttccctcttactcagtgaccacgtgtgtgcacctccatcctgtctcagtagtaaagacgttctaggcaataccatagacacatctgtgtctcgcttcgagtgcaagaaactcaagtcatcttaaaaaaaaattaaaaaacacaaaaaaaatttacaaaaaagcaaacacacacacaaaaaaatatcttttttaggccagagttttctacaggtattaatgaatatttttcttaatccttataagttttatgtgtttaatatttcttaataccagtagtattaatttatacttttgtagcaacataatatttttataaacagccagtgcttggcttaagtcttcacgggggtttatgcagggctatcttagggaccctgtgtaccatgtactgtatttaaaaaaacaaaaagttacccagtgtcacacttgctgtgttaataacaaagacgtcattggcggtctcctgtattgatggtgtggatgcaacagtccttccgggagccacattgcatgggggttcagttgccagttcttgtgatacataaactcccaaggccaaacttgagggtttatttagggttttctgtgtgtcctttggggtgttttattttactttggttttaggtactgtttctccattttatagccagattggtttcatggtgtttaaacattttactgatgtcaaatggaagaaaggaacagaaaatttttaaaagagatttttacaaagtaataaaatgtaaaaccgagctgtttcaatgttaccgtctttccgtgtctgttcttgtccacaagtggactattcccatggattgtggagaagaggaaggttccactgggttccttaagtcaccaaaagccctggcccaagattcagttcctcccccgacccccaaaccgtttcccagctggttgatgccaaggtaaaatgacatccttccatgactagaggatcagtcgcctaagggcgctcccgagttcatgtcagtgttgtatttatggttttacaataaaacaacctttaggaacctctggtgtgtgatgtttttcttagggttggggttgggccatatcatccacacaacacagatcctgcagtggctagaggatagaagtccggtaccaaggtggcgtgagcctgtcacactctaaagacatgcttgcccattcttcatttgagtcattggttggcacagcacaggcccagctcagtatttggtggatatgggagaaggcaccccaggattctgtgacctactgtgagatgacttgtagagacctgtcatggagaataagggatgggttttagtcggtcctgctggttcaatgcataaggcacacatctaagtgggcctggccccacagtcgtccatgaggcttttgtgcctttactgtagtggctgggtctcccatgcaacctgcatgtgtttacggctgttatatgtatcatttgtttcctgggcagaccagcccaattcctggtagcactggaactctaaacacatgagagttggctcctgccacttattcagagtctgatgtcacagacaagaggacatttttgctttccttccataggcttgaagttgagggagagaagatcccactggaaactgaacgtgtggaggggagggtataggacctcaagggagcccaacacaggaaagctgcccccttagtctccaggtaagtaaagtgcagagcccctccccacctcaggctccatccactcccctcactggtgctaaggaactccactctaagatgagttattagtatcttctgaaaaaaattccgtcgaattatgtgcaggtgacctaactatactggccccttcccagagggcatcagcctagccctgcagacatgcccctgggagcctctacaaggaaatcatgggcatctctgtatgagcagataaagttggcacaggaatttccccacggctgaaactataaggaagtctgtggtgtccataaattttctgaattccttgacctcgagggtcaaatgaggccaggcctctgggcctcaccactggagggctagcctctgtgttatggccatttaagaagatgtttctttttcgttttttcggtttttttgttttgttttgttttgttttgttttgggttttttttttttttttttttttttttggtaactttgatattcccttgtggttcattgttttcagtggccaaagtatgtgctctaaaggctgctgtgagagccaaggaagtttccatgggtcaagctgcatttgtgcagattacattctatacatttagaatgttttccacatacagaaagtgcaatacatattacaatgaataaaatgtgtacacgtgtgtaagaagatgtttcttaagcagccacatatatactgtagcaagtaaatatggagaataaccactaaaatcccccaaggcaagactggatactctgcgcctcctcggggtaagggctcctgggcggagaatgaatcctgagcccttttgggagaagtgttgtggattcctggaagcgagttacagacagggatgattatgttgtcaaggtacacgatttatttattagttaaagctgtagcgagtcccgggaatgcctgtcatgatggaggttgaagatgcctagcctgataggctcagaactgtcacagaagcaaatgccttcaggacagacaattggagacaggaaaaatgagctacagggagaagtatcctcaggggacagctcagggccctcagtttgtcttccccaaaagaactgagtggcctatcggggtagcacatgtctctgattccagaacggataggtagaggcagagcaatcttgggtttgaggccagcctgggctacatagaaagatcttgatccaaagccactaagaattgagcaaatttttatgatgacatttggtttttagtagagaattcagaactgtacaataaacaaacaaaaacccaccacgaacctgatgttccactggtgggagccagccagcatatggaacttgtatttaatatttgccctcttaaatatttatccttcaggacactccaaaatgctccacttcagagtggtccctccaaactcccattggcagctgtccctggcagatggggatggatataatcctgatgatgttcgttagccccagctgggagacctttccacaactttctgcacagctgcctgtctccctggtggcttctaacctgtccacttcagaccagagctaagatcataagcactgccccttcagacaatcttttctgttggaaactagaaaccccaagtcccagattttgaagaaaaaggaagtgtctatgtgtctcgggagactatagactgtgctagactcacatcctgcctacctgccagaacacttcagcaaatggcctccaggcatgagaagcaatccctttgctgaactagccatccactctggaccctgtagtcccttcccagagcactggcctggtttctgctgcaaggaagactttccacttgagagcttatcaggccaggcatcttcaacctccatcattatctgcccagcactggggtactgtgtggatgcagttagtaccagaaaattatagaagattctccagggcatgggcataggccaggcttgtcctcaagctaccctgaccagcccaccttctctctttcccacataacaagaatctagcccagcccagtgctttggactctggtccagggcccagctggttgttgcagatgtaccaggaagaccaggggatagtccaccagggcatatggggggctgctgaggaccccaggagacaggtcaagggggagaaagagcaggggctgcagctctgggtgattttgaatgggtaaagggacaaactgactgctcagaagaaaacactagaaagagctgcatgtgggaaggattgggggtagcctcgggtacttgggcactgcaggacaccactacttatttgtccttgcatctttgtgacccttgtgcagcctcttctagaaacaagtgtcagagtttctgggtttggggtgggggctgatcttagaattgagaatagtgtctagtaaatgctgttgccttttttaaagactcagtttctttttgttgttgttgtttgtttggttggttggttggttggttggttggttggttggttggagttttttggtttttgctttcttttttttggttttgttggttgttgttgttgttgttgttgttgtttgagacaaggcttctctgtgtagccctggctgtcctggagttcactctgtagaccactctggccttgaactcacagagatctgcctgcctcccaagtgttgggattaaaggcatgtaccaccatcatctactgggttttctttcttatgttatgtttataaagcaaaataaccacactccactactgaagagttggggactgttgtgtttgaaatgatgtacagccaggatcttggactgcaggatgctgtcacattgcaaactatgcatcttctctcctgggaaggctggtttactcatgcccttcccctccagtacccttattgtgacaatgagacgccaacacacagaatgctaggaagtgacaacttgttttatttgggtccagatcatctaagctggactgcgctgtgacaaacagtggctaccctctggcttgcagactggcaccttcaactgcgtattagttcctcgtaccctgcagatagagaatgacttagaatgggtccttgggtaagaatgaaatgtcacttgctaaatgacctttgcatcttctctggtccagctaggaccagcgagggcatattcctgggcttggcctatttcccaggtgggaagctgaggcccagagagtggaccaggctgctcacctgggaaagagtccatcatttgactctccagtccctagcgtttactctccaggaccccctcgcctgcctccctggactcccgagggcctcctaccatcaccagggactccacagtactctttgcattccttctcagagtagaatttgttgccgttgcctttgcagcccccgtagtggaattggatgcacttcccttgtgctgcatcaaatgcccagagctttatgaaggctcggcaggggccttggactatggggagattgcaggccgctgtggaggaaagagggacatggagagttagt

SEQ ID NO: 272 - DNA, 3094 bp, Mus musculus
ctccctagctgtgttgaagactaagaagaggatcagagaaataggctcaggcctcagccaaccccggaggagcacctgctgctacctccctctgtgctaggtggacggagccagtgcacctggaaggaaaagcgcggttaacagggaacgcttgaagcgcagtcaaaagagcagcaaggtggagggcccggagccagtgccggctgaggcctcgctgagtgctgagcaggggacgatgacggaggtgaaggtgaaaacagaagtaccagacgactacatacaggaggtcatctggcagggggaggccaaggaggagaaggcaggtggcaaggacagcaccggagatgtgcctgccgagatctgcgtggtgattggtggcgtccgcaaccagcagaccctagatggaaaagctccggaaggcagcccccacggcggatctgttcggagtcggtattcagggacctggatttttgaccaagctttgaaatatgcatctgggtcctatgaatgcgggatctgcggcaagaagtacaagtactacaactgcttccagacgcacgtgcgggcacaccgagacaatttcaggtacacatgtgacatctgtgggaagaaatacaaatactacagctgcttccaggagcaccgagatctccatgctgtggatgtgttcagtgtggaaggggctcccgagaaccgggcagacccctttgaccaaggtgtcgtggctactgatgaggtgaaggaggagcccccagagcctttccagaaaattggaccaagtatgtgggactctggggcccaggactggggggtggaaaccggcaattacacctgtgagttctgtgggaagcaatacaagtactacacgccctaccaggagcacgtggccttacatgcccccatcagtgagttacttcttcagtcggggaatggggaggcctgggagggacagtggttagccactggccaggactctggagccttgccagggaacgtgtcaggaaggctccaagggccctcaaggactgagagcatgaccctctcaggtaccgcccccgggtgggagccaccggaagatccagacacgggttctgagtgttcccatccagaggtcaccccatctccacgcttcgtggcagcgaagacccagtcgaaccagtcggggaaaaaagctccagcctccgtggtccgatgcaccagcctcttacaccgcacgcctccagccacccaaactcagacgttccgagctccaaactcgggatctccggccagcaaggcagcagcagcagaaaacaccttcagtcgtcgagtagaaagcaaagcacagaaccactttgaagagaccaatagcagctcacaaaattccagcgaaccctacacgtgcggcgcctgtgggatccagtttcagttctacagcaacctgctggagcacatgcagtcccacgcagctgacaatgaaaacaacatcacctccaaccagtcccgatctccacctgctgcagtggaagaaaagtggaaacctcaggcccagaggaacagtgccaacaacaccacaaccagtggtttgacgcctaacagtgtaatccctgagaaggagcggcaaaacatcgcagagcggctactgcgagtcatgtgcgctgacctgggtgcgctgagcgtggtcagtgggaaagagttcctcaagttggctcaaaccttggtagacagtggcgcccgctacggggccttctcggtcactgagatcttgggcaattttaacaccttggcactgaagcacctgccacgcatgtacaaccaggtgaaggtgaaggtgacatgtgccctaggcagcaatgcctgcctgggcataggtgtcacatgccactcccagagcgtgggccctgactcctgctacatcctaacggcctaccaggctgagggtaaccacatcaagagctatgtgctgggtgtgaagggggcagacattcgtgacagtggtgacttggtgcatcactgggtgcagaacgtgctatcagagtttgtgatgtcagagatccggaccgtatacgtgacagactgccgggtgagcacgtctgccttctccaaggctggcatgtgccttcgctgctcagcctgtgccttgaactcagtggtgcagagtgtgctgagcaagcggacgctgcaggcccgcagcatgcatgaggtcatcgagctgctcaacgtgtgtgaggacctagcaggctctacgggcctggccaaggagacctttggctctctggaggagacgtcaccgccaccctgctggaactcagtgacggactcgctgctgctggtccacgagcgctatgagcagatctgcgagttctacagccgtgccaagaagatgaacctcattcagagcctcaacaagcacttgctgagcaacctggccgccatcctgacccctgtgaagcaggctgtcatagagctgagcaacgagagccagcccaccctacagctcgtgctccctacctacgtcaggctcgagaagctgttcacagccaaggccaacgacgcgggcaccgtcagcaagctgtgccatctctttctggaagcgctcaaggagaacttcaaggtgcacccggcccacaaggtggccatgatcctggatcctcagcagaagcttcggccggtgccgccctaccagcacgaggagatcattagcaaggtgtgtgaactcatcaatgaggtgaaggagtcctgggccgaggaggccgacttcgaacctgctgccaagaaggctcgctcagccaccggagaacaccccgccgctcaggaagaggaccggctgggcaagaacgaagtctatgattatcttcaggaacccctctttcaggccactcctgatctcttccagtactggtcatgcgtgacccaaaagcacacgaaactggccaagctagccttctggctcctggccgttcctgctgtcggggctcggagcgggtgtgtaaatatgtgtgaacaagcacttctgatcaaaaggaggcgactgcttagtcctgaagatatgaacaagctcatgtttttgaaatctaacatgctttaagactcaactttgagggaaaaaaagaca

SEQ ID NO: 273 - protein, 986 aa, Mus musculus
VDGASAPGRKSAVNRERLKRSQKSSKVEGPEPVPAEASLSAEQGTMTEVKVKTEVPDDYIQEVIWQGEAKEEKAGGKDSTGDVPAEICVVIGGVRNQQTLDGKAPEGSPHGGSVRSRYSGTWIFDQALKYASGSYECGICGKKYKYYNCFQTHVRAHRDNFRYTCDICGKKYKYYSCFQEHRDLHAVDVFSVEGAPENRADPFDQGVVATDEVKEEPPEPFQKIGPSMWDSGAQDWGVETGNYTCEFCGKQYKYYTPYQEHVHAPISELLLQSGNGEAWEGQWLATGQDSGALPGNVSGRLQGPSRTESMTLSGTAPGWEPPEDPDTGSECSHPEVTPSPRFVAAKTQSNQSGKKAPASVVRCTSLLHRTPPATQTQTFRAPNSGSPASKAAAAENTFSRRVESKAQNHFEETNSSSQNSSEPYTCGACGIQFQFYSNLLEHMQSHAADNENNITSNQSRSPPAAVEEKWKPQAQRNSANNTTTSGLTPNSVIPEKERQNIAERLLRVMCADLGALSVVSGKEFLKLAQTLVDSGARYGAFSVTEILGNFNTLALKHLPRMYNQVKVKVTCALGSNACLGIGVTCHSQSVGPDSCYILTAYQAEGNHIKSYVLGVKGADIRDSGDLVHHWVQNVLSEFVMSEIRTVYVTDCRVSTSAFSKAGMCLRCSACALNSVVQSVLSKRTLQARSMHEVIELLNVCEDLAGSTGLAKETFGSLEETSPPPCWNSVTDSLLLVHERYEQICEFYSRAKKMNLIQSLNKHLLSNLAAILTPVKQAVIELSNESQPTLQLVLPTYVRLEKLFTAKANDAGTVSKLCHLFLEALKENFKVHPAHKVAMILDPQQKLRPVPPYQHEEIISKVCELINEVKESWAEEADFEPAAKKARSATGEHPAAQEEDRLGKNEVYDYLQEPLFQATPDLFQYWSCVTQKHTKLAKLAFWLLAVPAVGARSGCVNMCEQALLIKRRRLLSPEDMNKLMFLKSNML

SEQ ID NO: 274 - DNA, 62647 bp, Homo sapiens
tcgctcctgtcatttgcggacactgtggttctgctccatgttctctctctcagctctcccaggctagtgatgaagctatgacctttttcccacgatggcttctctccttgtcactaaaagctggagactctttatgtctgaaggacatgtttgagcacagcagcatttgaaaacacatcagggagagagagaggcaggtggcaagcgcagagcccaggcgcctttctctgtggaagaggtgggacccttcattcctttcctttatttcatgtcggtgtgacttttagcatctaaaatgtgcccagttctgtctgtatgctcaggaaacagcaaaaaacaagggagtatattccctgtgtcttgggacttctggcatttagtcatgtatgtgttcattcattcaacaggtgtttttattattttctcttgagaagagaaaacaaaaattatccaaatggttaaaagcctagactttggagtcagacagacctggtggaattttgattctgtcactaggaagcagggagactgtgaaaagtcactctgtttctccagtccttggttttcttatctagaaaccaaaaaatcccatatcaggcattgcacagaaggatgagatggtgtaggtgtgggcccggagcaccgccccagcatgtcataagcactcagtacaccacagctgcccttggcatcactctctgtgttatttgtgccatttgcatcatgactgtcctcaccagcatcacctccaccctgcatgctggtgtgttttgtctggtcattttctgtttgtgtcattgagcagaccttagctgacacctgccagaggaccaagcacaaggatacaaaaagcagtgggtagagccctggtctctggaaatcttccagaaccatatggaattaattagagggcagatttggagttctaacagggcaggagcctgttagaagcaaagaggagcgtttccagaaccgctggtgggagaatgaaggctcctgaactgttagtgggagcagccaccctgtcgccttagggcctgagtgtatgctgattggtggtcatgatggcgaccctgcaccctcaagagagaatgtcaaggtattaccaggctgctgtatcttggcatttcagaaagtgggaagagtgtgttacattttagaaatttttcatcagttcatcagaaaggataaagatataactttgacactcaagaaataagcttcacttattcagaaaattggcttctgtgaaacatccctaacctatgttataataaaggccagatgaatgagtcattcttcagttctgaatattcagtgaagcaggaaaaccatcgacagttacagtgatgttgatggattgatcacagaaaagtcttgcctggatcagaggctacaggtgcctccagtgccatgctggcattgacctttcctgggcttggtccttggttcacttggtaaacagcctcttgctgaccatcacccatgtgccagccactgctctgagtatcatgaaccaaggagacaaaatcttgtcctctagctcacgttctagttgaggaaacagacagtaaagtggacagagaggtaacagagtacaccgagtgggtaaatactggggaaccataaatgagtttcagccaaggagtgacatgaccttggttgctctgtccagtgtggattccagggcagtgtataggggaaagggagattggctgtgagatgtttacaagacaggagaaagggggggtggcttgaactgaagtggtggtcgtggtatggtaaggaatggttggattctggacatactttgaaggtggatctggctggatttgctggtatattcatagtcgggagtgacagaagaggaagagtcaaagatagttctagagtctgggcagcaggagctggaaggttggaattactgttagctgaagtggagatgatggtggttatttgattgtattgtcttagatggcaggttttagccagaagagtgctgggctaggaagcagaattgttttcctctcttgggagaagagatgtagcagcagggttttggacttgttaaatacgaggtgcctgttaggtatccagatggaggtttcaagcagttgggggtttatgcaggtctggagttcggtggggggccagtccaagctggagatacaatttgggattcaacaccatgtagttaatatttagaactaaagagtctagctgtatagtcccagctacttggaaggctgaggtgggaagaccgcttgagcccaggagttcaagaccagcctgggcaacatagaaagactctctttaaaaaatgaaaattaaaaaagataaataagaaataaaagtacaagtctccatgagatcgcttaggaaatgagtgtggataaaaatacaataggttctagaactgatccttggggcatatcaagttgtaagagctggagtgatgaagaggattcagcacaagagataagaatgtccagaaggccggagatccaccaggggagcacagagcaaagtgagcaaccagctggatggaggagaggcaggccatgttagaggctgctgctagaggcagagtccgacggggactgagaagggaccactggattgaatagagtggcagccactggagaccttgaagagaagctgtggtggagtagtggaggcaacagcccattggacttaacagttattaccaaggagccggcctgccaatatcagcaaatagataagaatcacttgcactcatatagtcagtgagtgggaagtgggtagagttggaggacttggtcagtgggcagagtcctgtctggatgtgtgttaatgcatttaacatcccatgcatgcatgcattcatggagagtgtatttaagctcagctggagagcagttcaccttcattcctaaggagtggagttttattctagggggagttaaccaagtcattatttacacactgtaattagaggcttttttctccacccttaacattgttaaaggtgggtgaggtgtgagagtaaatggcaccctttggaggaagagcaggggtcctcaggctgagtcttgggacgtagatgtacgccttgctccccctctgtgtaaggagacacacatgtcttgctgggtaaagttctggcctgtgtaagggccttagatgtctctgatccctgctcactcattgtgcacattggaaaactgagtcttggggtaggcagccagcccagggaatcaacagcagaaataggactgaaggccagggtgctgagcattgctcacgtctactatgacttggtagaactcttaagcatcatcattattggcagaatgatgtggaaactgtgcccagaaacaaagccgccatactcccaggcacctagcatcagggcggactctcctctgacatgcctgaaatggcatctctttgggcttcagatccactggtaagttacttggttgcattgtcttaggctgcaagctttagtgacaacagtaccagaacaggagccaaaaagttttcagactaagctcatcactaaaaattgtgtgaccttggccatgcctttccttcacctgtgtgcactgagttctttctgtgggccaggcattgtgctagggctggggatatagacatgaataaaacagacccgggccccgttctgtgccttggtttccccatctggccacggagctcttgtcaatgccaagcatgatgaggtgggcatgagctctgtgaagaactgtcaggtgagacccagagagagagagagagacatttgtttgtttctgaaacctccccgggcagagtctgcaggcacattggcctggccagacacagtagcaggattgagcaggaacaaagcagaagaaaaccaaaggtagtggaagatagtaatttacaaacttcactgctttggagctgtttcttcaaatttcatgttacaccatgtattggttgcctatggctgcttttgctcctgttgcttcactacaatagcagtttatacactccttggggtcagaagtctgaaatgaaggtgttggaagagtgagattccctctgaaagccccaggggaaatctgatctttgtcactgcctgcttctggtggccatcggcattcctcgacttgtggccacatcattccagctctacctctcggggcgcattgccttctctcctctgtaacttctcttctgtctgtcttaaatctccctttgtcttatgaggacacttactgcatttaggggctactcagataatccaaggatgagcctaatctcaagatccttcacttaattacatctgcaaagaccctttttccaaataaggtcatatgcacagaatcaggagattaggatgtggacatatcttttagggggctaccgctcaccccaccacagagagaaagaggcctaaatctgtatacatcaggcaaaaagcaaagctgtgtgtattgaagatggggagtcttagagccttgctcaacactaccatccccattccagcctcatgggtgcatctaagagccattgctatggaacccctagaccttcaaggaacatactttgagaatcattgccttagagaaaggccagctgtcttagggaacttcttgggcagggatccccttggtctggcttctctcctggtcagcttgcacaattagtaaccggtgaccacggatagcaggtacttactgaaaaatatccttttaatgtttgactttggattttatgttgaagtgtgacgcgggttaaatataaaattcatagcatatcttgagcaactattttgtagttatctatatataaatctattttacagcgacacaaatagaatagattatggagtgtcagcatgtagatagattccgagtgctttttcactaatatacctaatgattcgtgctgagaatatccaagggctccactgtacatttaaatggatataattaaaataatgagctctattttaaaaaatgatatatgaaaaaaaaattttaaagaagttagaaggagctgcgccactaactcaaagtgatataagtacttatgtgattccattgttattaggacacctaattaaatgcaaagcatttgagaaaagcaacatttgggtttgtaaatctaaagcctagaagtcgggggcgaggggaagagaaggaagttgcccatgcctttgtcgcggcaaggactcgggggcatcacgtttaagggagtggatggttatgtgctgttgtgcccgtgggtgatagagggtggctcactggtccccatcttctgtgaactcagtcaggaatctggctggtcacgcagctgcagctgtatttgccagtgtgaactctgatttgtttggggtgggagatgtgggtacaagaactagggagaggctgccttttcatgggaaaaagacattcccctgtgcctgactctcagctccaggtgttaagggcactccaggtgacctgagactctggtggttcagtggaaagaacaaaggatggggagtctggagatgcgagttctggttttgactctgctacacgtcctgtgcctttggatagggcctctcctgtgatgcattcatgcctggccctgttgcaaatgggtgaccatccattctagaaacccatctcaaggatatattctgctgttccagtgggccccggggagtcttaggaggcatatgtcccagtgcctgcttactagaaggcaggtatccttttggtcattcagcaaataccatatttatggagcacctaatataggcctactggatgctgggtataagaggcgcacaacactcccgagggccccacctactcttaggacaagtgcagtttggtgagccagtgtacaaagcattttcaggtaacagggctgcaaaggaaataaaacaaggcaatgaactagaagctacactggaatttcgggaaggggacgagcgagtcaagatgagttcattaggacacaatgggaggatggctgtcagagtcacctgtgcaaggaagacgtggcattcagagagggagtctgactctgcctcaagcaagccaggaaggcttcccagaggtgaggatgtcatcatgaaccaatgtcatcatcatggcagctgccattcatggaaatgcactctgtgcccacccctgcagctagcaagagtcatggtccttctttaacagacaaggaaacagaggctcagagaagggagtctcttgcccagggctgcagggtgtaggggtgggcagatgagagttccacccagcctgcctggctcctacagctcctcccttcccctaccaggatgccatgatggtggtgaggacttgagagcaggaagggacactgaatcttttcaggtggcatggtcaggtgctcttgaggcctcgggctgagtttcagaacactggctgtgaagaaagccgaggtaagggagttctgggccgggggccccatctgtttcctctccttccatctctttgcctactgagcctcagggccctgaccattagcacccatgaggtcttagctaggaaatgggaatgtcagctgctttctttaccccccggcttgaatgtgaatacacatcgttcactatcagcttcatcagcatgaccacctctgcagcactagacaaagtccttactccctcaccgcctgtatcccattactgaacagtggtagagctggcattcaaaccctggttggtctaactccacagcccatgcgctaaacacctatgccacataaacttgcatcttctgcacatgcccctcccctgcccgccataaaaaagacaaaggtagataacaatgaaacatctccactgggagcttactgttctaggtcctacgtagacattactttgttttgcctcacagcactgtggggtaggtaccgtgtttgtccccattgtttggatgtgaagactgaggcttggaggagtcaagtcacttatgtaggaacctgcaactggcagttttgagatttgaccctaggatgatccaacttccaagtctggtgcttggcccatttcactccagccaggccatcagccagtctgctccagtgcttctcttgacggggagctcaccacctccaggggatccccttttcttgttggccagcagtaggaatcacctccctctctaaagccacagctgtcctcttgtgacgtgctggacctgccagttctagttatgtcttaggcctcacagaacttgagacttctttgccttgtggtgtcctgcagctaggcgggcccgtgctcccctctggggggccagggggactcttgctcatgatattatcccccacaaaggtggcagcagcccggaaagccagggaacctactgtcctcctgctcacccacgagcatcttggttttggctctgttctggatgctgaaggtcaaaggtgggtgatgtggggcagcctcggctgtgggtgaggaggcttccctctgcgagtttgtctcccagtccaggctgcctgcatcaggtccccgtcccacctcgtaccacccacatgactttgggtacgttatttcacctctcagtgccacagttcctagactgtaaagtggagctaataccaagatttcgttcctagagtcattgctaaggatgaaaggaattagtatgttagaacactgccgggcacataggaggctctgtttaagtgtttcttaagtaaattaaggaaatgaattctgaggcgattgaatcatgcagttttacactttcttaccgtggagaagggcaaaagctcagacagtgtctggtggccctgatgggacagacacatgaggaggaggcgcccctgggtgccaaagaagctctaacagtgtgtcattattaacaatggtcgtggtgaccatgtcttgagagcagttccaggccaggcgctgtgctgagtactttccatgtgttcgttgattaaaatctgcatgacaaccctgttacctccattttgcagacggcgaaaccaaggctcagaggttaggtggctggcttgaggcccacagcgaggaagtggttggcgcgatagcccttgctcctgactggttttcccagcatgcccttgcactcgtgttccgtccatctgagtcctggcctcctgtatgagtcatcttgggctgctgttaacagaatgctgtgggatgccatgcctaatgccataggcttaattaaacaacagaaatgtattttctcacagttctggaggctggaggttgtgattaggttgccagcacggttgggttctggtgagggctgcctcctggctgtagagggtcgccctgtcactgtgtcctcacgtgggggagagagcaatctctttcccttcttacaaagccaccaatcccctcatgaaggcccctccagtgtgacctcatttaaccacacttaacctcccaaagaccctttcttcagatccagtcacactgggggttagggcttcaccatctgaattgggggcacatagttcagtccatagcacctccccatggccttcctctgtcctctcctcattagctgggggctcccctctctatctttgctcagtttcccaacctttctccaccttggatgaaagctgaagctgggaaggacagcagatgtgattaaacccatgctcctgtgataaacagggctgttgaaacccaaagaagagaaaagtcttgcccaaggccacacagcaagcccattgtagatggaggactggagcctgggtccctgagtcccagtccagtggccctgctgtgctgcagttggaatgctggcattctctgttttgagtctgggccttgaaattcacagaccatgctctcctctggcacagtggagaggctagcatggccagggcagtgtctctgggcctggaacatgactcgatttcccagtatgtgcaagcctcagcttccccacctcacagacaacagtcatggggatgcttcccttgtcagaaggatgtggggcccttaggatgataacatggacagctgtgttgaaaggaggatgcttcaggagtggatggcagggacctggcttcctgccttggcctgtccccaattttatgtctggcctgagcaagtcacagctctgctttagtccttagtgtccccctcatgagggacgttgagtgacccacgccctgccctcttcagaactgacatcattacctcgaggatgttttccgatgtttaaagagccccctccatgccacagtgttggctccatgacatctcaacctagtgagtctttttgaattggagtttcccgtttgtaaagcaggagcggggaagagcctggacaagatcccaagccttcttgcctaggaacgaagggaacagcactggatatcgcgtacatcaaagcacgaaacccttaccgcccaaagcgtagtttgaggcccagcagccctggccccacctgagagagcttgttagaaatgcagaatctctgagtgaggcatggtggcatggtgcctggagtcccaaccactcgggaggccgaggtgggagggtcgcttgagcccaggagtttgtttgtgttctgcctgcgcaacatagtgagacccatctctaaaaaggaaaagaaatgcagaatctcgggccctaccccagaacagctgagccagaatctgcattttttttcaagatcccccccagctgatctgtatgcacactgaggtctaagtactgatttcagccagctggaggtgcccttttaggtcacttgtaactccagttatgataagtgcaaacaaataagtggcaagtgaggcaactgggcacatctagacctcttgagacctcagcttccccaactgtaaaatgggtggagttggaggctttcttgctcaatggttttcaaactgtgttccttgaagcctcagggttccctggaagagcctcaggggtagccgtgggggttgtgtgggaggctaagggggccgggggccctagaattcactatgcacacagcctggcatgtccctgtggtgccatgggctggtgggctcctgtgttgatctggaggaagaaggtattgaacggagtttcttctttcccagggagcgcttgaagcgcagccagaagagcaccaaggtggagggcccagagccagtgccagccgaggcctcgctgagtgccgagcaaggaacgatgacggaggtgaaggtgaagacagagctgcccgatgactacatccaggaggtgatctggcagggcgaggccaaggaggagaagaaggcggtcagcaaggatgggaccagcgacgtgcctgccgagatctgcgtggtgatcggcggcgtccgcaaccagcagacccttggtgagtgcccagcgtctgtggtcagggtggagaccagggtgggaacatggagtcagagtcctggggaaaagcggcctggcgcctctgcccccttcctggctgagagaacctttgctggcttccctctgcattcagggagagatctcagcttcttagacttgcctttgcttgtgcagtttccggctggagagcgcttctgtttctgctgggcagcagaaccctatccatccatcaataccctgtttaagtcaaatgcctggaaccttccgggggcccagtgaatccctttgtctgtctcagggctcccatacccctggggggtctcccacagcccttactgctcggtgtcctaaatgcctctctgctggagatcccagtgccggtgctgctcagagcagtaccccatcaggattggatcagtgacagatggcacttcccctgcctcttctggcctgggccaggcccagaggagctctgtggaaactcacatcttagcaacaatttctctccctccggtctccagcatgcaccagggatacccctcaggggccccctgcactgctgccaggttcacagactcaaatgcccatgaggcccaacaaatatgtttatttagcataaatagagatgagccaacaggacaggtggtggggaccatgtccagttagagaaggcacgccgcgtgtgtggagggcggctgctgctcagctgctgcactgacggttgctgggtggggatacggctcagcgttgccacatctctggacaaatcacacgccagaaatgaacattttgatgggaattcttttggctttaaatgttgcaaccaattgaccttttgaaatctgccaaacaaaacatgtctgtgggtcagagtccctgtgggcacaagtttgcaacccctggtctgtgacataaagtcctcattcctggcgtggaggccttgcctggtctggctccagatttctgcttccctccactccctactccatgtttccaaggctcagtgtgttcttagaagtgctgctgctgtccaagcctctgctgccttcctggtccagctctggctcacctcctactgacttccaagcacctccatcttcctggcgcacatcctgtatgcggcaccatggcctcgtttctgcaagtttagactcaagtcctggtgccttttcttcccagttgttgagaatcatccttaaactccctttgccagctgttccctgctggttgtggccatctcagccccacctgggtcatggcagcatcctgctaacagccatgcttttgcagcttgcctgccccctgccctggctgccaggaggccttggccaaaacagaacaccgaccatgttgctcccctgcttataccctgggactccctactgtctctagagtcgaggccagagcattaagagcctccataacctgaaccttctagccccatttcttgcttctggtcttcccagacctttcattccagtgtagtctgctcttcctgtactttgtgtatgctgttgcctctcccaggaatgccttcccccatttccacttgcccaaatccaacctatccttcgaggccaactccagtgccacctcctcccagaagacttccttgatctcttctggtgagagtgggctgtttctaccctgctcctcagttggtgcactttctactttctttttagattagaggggccctgtctgtgcctgcctcttccatgaaagtggaaacccctagagattggggctccaggacctgcctgatttatgtctccatgttccctgcttccactctgtaataccaaacaaagtattggtttctgggagtggtaatgttgacactggtgctgcagctgtcaaggtggggccaggttatgctgcagtaacaaaagatcctgaaaggtacaagatatcttagtagctcaaaaccacagcagtttatttcttgttcacactacacgtccattgtgggtcaagagggacctctgctcccctctggtcccagactaaaagctgtcatgtagaatgctgccagccaagtgacagagggaaagcacgctgtggagagacttacgctggcaattaactgctgcagccagagagagaggtgttaattccgctcacagtcattggttggaactagtcacacggccccacccaacctcaaagaggctgggaaatgccgtcctcccatgtgacagaataggggtgaaccaggaatgtttggggaggcgcaggagtgacttaggccagtgtggaatgagagagtgagtcttttcaggggcctgcgctgacgtttctccatcagtattcactccctgaggccagggactgtgttaatcactggtggatttgttagttaatggagaagacctgcacttgctctctttggtatctgtgtgtgttaagactcattagacccagtagctgtttctgcccttcaccaggagatgcccaggaaaggatggttgaatctgaatcctgggatagagccagcagtctggattcagtggggagagctctgggcagctaggccagggaaatgctgggaatcttccttaggccagctgcctgcacagtgagagccccaggacccgtgagcctcatgccagccaccgatgctgattccagctgagctgctgctcagcagcagggtccttggcctcgctgtaccttagtgtcctcctgtgttaaatgaggcatggcccctgtcccggccacctcatgggcgtggccatccaaggcggcagtggaaggaaacagtgttgcctgaggagaatgagctgggatccttggactgggagtgaatccaggctccatgacttaactggtgtgctacctcaggccctgtctgtctcagttcttacaattatgaaatcatcaggctatctgagtattcaatgagataatgtatgtgaagtgctcaacattgtgcttagtaaacaagtagctagtattctcagtactactaatattaacagtataaaatgcctcttcaagaggaagggatagtcattgtttctgctttttcccatctaagaagtaagctattgtgatatattgaaacgatgggatggggaataaagtcggtgcaggataaggtattagaagacagggattccaagtgggcttcagttttctcccctgggaactggactgggaaacctgtctggaccttggtgttccttctagtactgcttccctccaattcagggactttgaggatcttgtaatctgctttgggcagacccctgtgaaaaagatgtagaagccccagtgacaagggacgtgtggagctgccatggtgtagccctacggaagcagggccagagtgctccctgctgtcacggcagctcatcttgcatgctggaagtcaggcttttctgcctagggatgggggttttcttccaagggtcaggctcagaggaagctggcttggcctcatcaccaggaaagaaaggcatttaaaaacaaaatcagtgttagagttgaaccttttggactcctctcatctcaagatggcaagtagattttgtgggttaagtccaagcagttgctactggctgtaaggagttctctgttgaggattctaaagggtggcatgattgattgttgatgtctgccctggatgtagaagtgggcagtggagctatgcatgctgtcaatttggtacccatgacctccttattttatagaggggcagacaaggcctgaggaaaggatgagagttgcccagggtcacccaggaagttggtgacattttctttcgtgttatgaagggcctaccacaacacctacctcctacctgcttctgaaagtgtatgaaggagggaaagctctcccagggacctggctggggtggggtgctggttagagcttgcttttaagtgagcccctgctgcagtgtgcattcgttgtcctggtcaccgggcatgggggagttaacgtgttcctggggcacttggcggggagtgctgggtgctgtggtgcccagggcctcctgagtacttcgctaacccagcctcgctccgggctcagagacgggctctgttgctgagtagaagagtgttcctgttcagtcacccagtgctgcgccatgagggagcctccccgagtccacactggccctttaatagccatcagacaaacaatgttcccagtgacacaaacatcatccaaggcacttcccgtgggggagcccgggtcatggacacacagatggcatttggcagcttctcctgctggagtcaggaggggcatcagtgcccaggaggctggctgccaagttcgcaatggttgctgctgcttccctgctgcccagagaattccctgtgctgagaagggtgtctctcactccgagaaagaaagtcactgccattggagctggtgcagggtttgggggcaagaccaagagcttccttttatagtaagaagagcagagatgatagatactaaacttaataactttgctggataaaagcagaaatgaaagaaaggaagttaacagacgcctgcacccatctgacaggctgcaggaacagctctgtacagcagccccaagaaggaagggcagaccacacttgaggtttcaggggctcctctaggaggaggagcaaacacaaggcactaccattgctcctgccatgccaagggcctcctgaggacttcgctcacccagcctcgctccgggttcatggcagtcccatgttcatggcagacactgcgaattgattactgtacattgtccaatgatgcacctcagaatccttctcaacacagtatgccaagaggtctctgccagtcagctagaattgaaaaattagaagtggaaacctacttgccattcttcttgatgaagataaggcaagttgggtttacaacagtgagagcatccagcccttagactatttcctggctctgagagataaggatgcccgcatcccattatggtggtccaggtgtactgttaagcagtgggtactctttcctatgctgtgaaaccactggtccttaatcctgaggtgtttactaatgagggagtccagggagagcagtaggggcccagagacccgagacttaactgagtttcctcagtagcagtgcaggagaccgtggagggaatgagtgacccagacttgacccctcttcagatgagggacagggaccaactgggttattccccgatagtggagacctgaagagggggataatggaatctaaatattcacaacttacagcattttgcaaggtgcgcatggagcagacacattccagggtgtcctagccaatacggagaagtctccaggaggggatttcaactcagtaaaaggaaggacttcgtgtgatcatgggaactgtttggtaactggacataagcctgtgagggagtgagttccccgtcctgacataggtgatcagggagggtcactggacaaagtgcaggagcgggagtcaaggatgagatagatgggagactggattctgcaaggatgtttctaggcagcaagctttcaggaccgaggtacagaggtgttctcacacacatagggcagcccagagagccaggaaaagaggaggaaggagctccaaccaggaggcagcagccaggctatggcgctggaaggagcagcagaagagcttgacagtcattcagacacagccacgtgggtttcagcctgtgacagacccaggcagcgtaggtgccaggtcctgcttcatcgtgccagctgatagttcgtttcctgtttcaataggttgttggcagggcctcacacaagagcctgccagaaccaacactcagctctttgctgcagccactcggaaaggaggagttctggccaccctcccaggcgcgtcctgtctctgctactgacgcttcctcttggggtctgaagggttagagggtccctgttagaaagggcccttgggctgtaagtcaagagcccagggtttaccctactgtggggacttgaataagccccttaacttctctaagccaccgtgtcttgaatggtcagtaggtagaataaaagtctgcccctctttccagtagaattgttgggggcagagtgacgtaataggtatggaagtgtttttaacgggacaaaaaacgtaaaaccagtaccactgctattagctggaacctcaggacattgatgcctctggggttacctctagagtgacaggaacctaaaaggccaaggttttcaaacatttgtttttgctcaatacctcctaaaagaattttgaaaactgtatattctttttcacatgtttgagttgccatctaacatttttatccaaagtttaaatcattgcaaaggatataatttccaggatattgtgtaaaaaaaaaaaaaaggtggcattttggaaataaaactgtgaaccaattttcaaaatgtatccaagggaatccaaacactaccactatttgatatccaccatcatcacttcaaaaacatatgaacaagcctatctttaacagtcagaaattttacatctttcctttttctccttgagctcatatttccagtccactgcccccacagggttttatcctaatgtaaaatatattttttatgcttgaaagtcttttattgatcactgtttcacactcatcaccataacaagatgtacataaattgaaattgaaatttctaaaaaaaaaaaaaatttcctgggatcataaagctctacattctccaacattttttttttccagattgagttgttattagcatacaattcatcaaaaacaaatttaggtaaatagtaaatgtaaaagtaaaaaattattgaaaatgcatctcttaatgaaatggatagggcttcatttctttctcaattggctcatgtatctctgaattaatatttcttattgctagaaggagacaagattcgacattaatttaattcctatcttttggtttttgtaggtctaagtgcttagaaagctcagtcacatatgtaagtagctggcagtggatagagttttgttttagcagtgtcactcaattctttgaattccttccaagttgtatgccagaaatcacacaggggtctatcatcagatgatatttttaatggtctcttcgctgacaactccattatatcctcctctaattttgttgagagcagagagttggaagtcacccgattcaaaaaaggagttgttcctggtcattagatccactcactttctgagcccgacaccagtattgtagggtcacctctttgcttggagccccagggttttcatctcttggggcaggcaccgtggtaggattaggggtgggtgaaaggatcgtcttttgtttgtaacgtggcacaagggtgaaggtgagagtgggaagaaccagcgagtggggcctcccacctgccagattctctggcacattgattttaggaaagaacacatttagaagctgatgattctcttaaggctgcgtggacctacttaccccttgggcagccaccacacacccccaggagatttgtgcttcactcagaagaccctgctccagaggacatttggtttgaggccaagccccagagcctcaggaaacccacttgtccatgacttccctgttcagatcccctgtcattcggcaagccctggacccagctcctgttgcatgtttgaacagagagggctggacacactcctgaacatttgttctctgaacagtggctcctgagacgctctgagctaaatatgggactgtccattgtaaggaaccagccttctgtccctacccttgcgtttttcttctctcattcaccagctttggatttctatcttgtcacattttgtgtattgtgaaaggtgcccgagcttctctagacctggctgggtgcaaagggttgctaccccacattctttctcagaagcctgcatcctctcctaggcatcttcccagcgtccccctctgtgacttcaggaactagaccccctgtcctcgcctggtctgtctgatgctctgggagggagctaagccaggtgtttagggaaagtgctcagtgggagctgtgaactcggattagttgggatggcgactgttgcatcacttgtgatagcaggaatgggaagaggaaaagtccgctcctgcctcctgtgtgctggcaagccctgccagccatccctgggagcagtcccagggctctcaatagggcactctggggagtcctgtggcagcaccagacatagtggggggctctgctgccctgtagcatttaaggaaagtgccatgactgaaaggaacacacagcttgcctgacatccagcaggtgacctggggtggtggcagtagcatggctctggatccccaaggcctactttgagcccagttccttgccagccactagccaagctgatgctcatccttgcgacggatgttgagttgccagcctcatgaggacttctgggaagatggtggacggaaatgagacctggtaaaggttctctctctctctttcttttttttttcttcttcttcctcttctttcttcttcttcttttttcttctttctttcttttttttgagatagggtcttactctgttgcccaggctggagtgcagtggcataatcacagctcactgcagcctcgacctccagggctcaagtgttcctctcacctcagcctcccaagtagctgggactacaggtgtgctccaccatgcccagctaatttttgtgttttctgtagagatgggggtcttgctgtgttgcccaggctggtcttgaactcatgaactcaagtgatctgcctgccttggcctcccaaaatgctgagattcaccgcgcacagcccacaagcaccatttcttcctggtgctttccaagaagctagttgtgtggcttgggagcaaatcagatctgaccgacctctggtgctattcgttgcccctctggtcctcactttcctcatctgaaaaatggggataataatcacctttacctgctggaattgtgaggatgaactgagctggtgtgagaaacccctgagccaggaccccgagcccactaactggctgcatgaactgggcgaaatgctgcacacagctgccctagcctctgcttcctcacccatgcagtggggcagaggtcagtctgcatggaaacattgcagatgaagtgagcccagacaggtggtgatggtgatagccatggttcatagaggaaaaaagtggctgggatgaacagaagagggagcgtgctgggcagggagccaggcgtcggggctgaggactgcctgagctgagtccccaagaaggccctccttgcaccactgcatcagtctgggtctgtggtggccacaggccagggggatgcatggacactgcacccgtggggcacatgtccttggagggtgattttgctggagggtttttgggtagaaattgtgtgttctaaccatatgttgaatcagaatatagagaaaacacaaaactgaattcagggagctgttgacccatggctgctgtattctgccatgtgccagcctccctggggaacatgtggatgccccttggccagcacaaggtttttaacgaagaggtaggcagtgtgatcttgtccacgcttctcaaagtgcagccaacttcgccccttccctaaccttccaggcattctccaactttaagggctctttctgatttcttacgtaattcagatggaaaagcgcccgaaggcagcccccacggtggatctgtgcgaagccggtattcagggacctggatttttgaccaagcattgagatatgcatctggtacgtgatggccaaggggtagtgcctgatccggggccagtatgggtgggggcacagctggacacagccatcagttacagacctgagtaagcaggcccctgttagcatctcagggtcaagaggggccaccttcttcatcccctgtcctggctacatgtgagcaaatctgactgggaccctggaagtactggactactggagggacgatagagcatgtggaaatctggacgcctagaatgtccagagcattttggcagcacttcctatgggccgcaactctgaaacaggccaaggggacaaaagggttccaagccaaatgtgtttgggagaccctgggttaaacagtagctgacctctctccctgcaggacttcgcagggcctgcggctgcccctgtgcagtggcctccccaggacaggccacgccacgaggtctccctcatgcactcttggccatggtcctctttttgctggggtgcattcaggaagttgggttccaaagaataaacttcggaaaatgctgctagtaacagcagctgacctgtatcgtgtgcctgctgtggaccaggccctgtgctaaggagccaccacgttatccctcacaacccgttcccctgaggggtgtacagtgttacagggaggaaacctgaggtgtgggtggttccatgacttgtccagggctccctctgctgggatgtggtgagccagggtttgcacccaggtttgctggcatcactgcactgagggctgcccctctagtgaactctccccatgccccacctctcacctccctggccccatcacaaaggggaacctgaagcccagagtcgggctgagcgaggcgcaggtgggggccctgggctttaggctgtgcgaggggcaggcggggccctgggttttaggctgatcgaggggcaggcggggccctgggttttaggctgagctaggggcaggcggggccctgggttttaggctgagcgaggggcaggtggggccctgggctttaggctgagcgaggcgcaggcggggccctgggttttacgctgcatgaggggcaggctcagggtccctcctaccagcacacagtgctcagtccagagactccgtgtgccagacaggctgcctcactctgcactgggggtcaggagccagccgaggagaggctgaggagccatcatgccccccatgactccttctgtggggtgacacctgcaggcaaggctgcatgtgcccacagctctcccacagcttggggtgaactccatactgcctgccaatcaggccttgacttggctgtaaacagtatctactccactgacttgggccccccactgcagttgggccagggtcctgcctctgtgcccccaggccctgcacttgctgccctaacgccatcatcgtgcgttgtccctgtgccagctggcctgtctgcttcctattagatggaggacagggagcacaccttgctcattgctggggcctcagtgcccggcacattgcaggcactcgtaaattcttcactggttgaaggggaattggcagaaactgctgaagagtgggtggaggcagcaggaagagagttggaggcattattactcagtgacagatgagtacaacagcaagacaccatggatttatggagccctcgctgtgtgccaatcacagggctaaatacaaagaaatatgcaatctcatctttgtcctccacgtgattgtatttttccctgtgtgacaagggtaatacacatacaaaccactaaataacagactcctaaatcccacgctggtgttaggatgacagcggcccttggagtgacccacagtagtaccagtggcaccggctcctgttcctcagtacctgtggtgtgccagccgactcacatgatgaacctcgttgatacagacctcagtcatgaattgtaggaatcagagtccggttttgcaggtggggaaacagaggctcggacaagtgaaaggttgtgtccgagatcaaaaaaaggatgtgtccgagatcaaacagataagacaaacttgtccagcccacggcccgtgaccgcatgtggaccaggatggctttgaatgcggcccaacacaaagtcataaattttcttaaaacattgtaagtctttttgtgattttttttttagctcattagccatcgttagtgtattttatgtgtggcccaagacaattcttcttccagtgtgacccaggaaaaccaaaaggttggacccccctgagctaagggatagcagagctgaactaggcttcagactccatatccagtgctcttccagcttcacttcatgcctcaggtacacactcaggaaacgggcctctgcttccaggcaagacaaagggagtaggagttaatgatcttcacctgcacggaggggctggtcttgtgctgggaacactcttcatgcaaactcagtcttcacaccaacacacttgagtcatccgcatttttcccaggaggaaattgaggcccagccagtaaatgacagagttaagactcttatcccaggtctgcctctcccatccccagatgctgggcaccagaattccctggggaccttggaataggcaggtctccaccccagccactctagatcgctaagcctggagtgggccggggcctctgcatttgtccacgctccctggctattctgttaggaagagcaaggcctgggcccaggtggcatcaggccttcatgagggctgatttagatggggagcaggcagggtttctgcccctggggtccctgccaggctggatctgaggggctcttcttggcttcctaccatgggcctttgctctgacctctacatgggcaggctcatcttttaacctctctgcagtgctcactaggagcttggccatttcagtctccctgctcctgggagaagggcctggcaaggggctgggggggccaggcatttacaccatgtcggtctctgtgtgtctgagggaacaagacaactcctcagcaggtgtggggggcggtcctctccttgctgagcctgtctagagtagggctgggcacttcctacagggagtatatggccacccctacgaggtaggtgcatgtggtcccattctgcagatcagcagactgaggcttcatgcatctaaggaaattaccaaggtcatgctgctggtaagtgacagaacagggacagggacccaggtgtgtctgattcagtctgtctgtcttaatctctgtcccattccggcaaggaaaaggggttgctagaaattattgtaatgcattgaagtaatgatttccttatgtggatgcaatttattcctttcagagcacttttaacattcatttcctttttcccctcaaggtgtagggctgagaattagctgaagaagttaccttctccatcttacagatttggaaactgaggcccagagatgggggggtgccttgcccaaggtcacccagagagtggagggcaaacctggatctagacccaggcctcgtgacttctagctcggtgctgcctccttgccagggaccatctctgcccctgggacagagagttagccacacttgtaggcatcgcctgtgggtcctgggaccttgtggtcacagaggttgggtgaccagtcctttcctcttctgttttccagggtcttacgaatgcggaatctgtggcaagaagtacaagtattacaactgcttccagacccacgtgcgggcgcaccgaggtgagaggagtgtccctggggcagagcccaggggccgcacctcccactgtctgcctgtttcccacttgggcccctcgtgggtgaccccagaggccctgacagctccagcctttcccattctcctcctactttcatcagtaggacagggtgccaggcaggagaagggaggcctcctgatgcgggacagctcaggtgtgggagggggactctgcaggacacaccagacctgcgcccaagggcaccccctgctccccactggcctcacgcctcccaggacatctcatcactgctcagtgtcagtggcccccacagggcacttgctggggtcagtgtgtgtgttcctcatgacaagcttgggagttgcagacaggagggatggcgtctgttcctcccggagcctggcagacagggaggagaggctggcatcaggggcccggtgcgggactgtgagctcttcccctgtggcttccatgttctcttttgcacttggcactggccctgtcattggcccggtagccccacccccatccctctctctctctctttgcagacaccgaagccacctcaggggagggagcctcccaaagcagtgagtactttttcctcctcgtgggctgctgaggggcgagggcttggggtgggatgaagaggagctgcttgtcccctcccccagaactgctccaggtggcctctgagagacacagtgctggggtccaagcttgggggccagaccatccttacaaaaccgcaatgcggtacctcagagcagcccttcccaaagcgtgctccatggcaggctcattctgggaaggttagtgggtgttctgtccatgacgacttctctggccaagtaactttgggagaccttgagtttcactaaggggagcaggtttcttgtggacatttccagcccttcattgacagacacagctgtgcatctcccatgggtgccctggatatgcgggtccttgtgttcttttgactctgactcatgactctggggctccgtagttgacttttgggaaatgctgctttggagagttttctcctgagcccccacagccaggggcactaattgcttattggtgatttgccctgaggtgccatatcccagcacctggggcggcacagggccttgacatctgcgacagcactgctgctcacaggccctgcttgccatccctccagttctaggccccaagcgcctggtaagtgagcagccaagctggtgtagactaggatggaatctccccacccaataatctgaagcttcagaagtcacagttccacgtgtaggtatgtcgccaacagaaacgggtgcatatctgctgcaagatgcaaactagaatgtccttagcacaccattcctaacaaactagaagcccccaaatgcccagagctcattgaatggagaagtaagtctagtgacacaaaagactactgtaaagtagtgagaacgaacaatttatagctacacacagcaacatggatgactcacaaacaatggtgagcaaaagaggccaggcgtaaacagagttcagcctctaagattctgcatagagaaagggcaaaagcagctaaaactaattattgccggtagaagtcagaagagcggttcccctggggaaggggcttcagggttctgtttcttgagctgggtgctggttacctgggtggtttcagtttgtggaagttgaacaagctgtgcacttaggatttgtacactgttctacaccaggggttagcaacatttttctgtagagggccagatggtaagtattttagactttatagcccagacgtctccgtcgcaagtattcagccctgcccttgtagtgggaacatgccaggaacagagataatatgtaaatgaattccttaccaaaacagatggtgggcaggatttggcccacagactgttgcttgccaatccccgttctatgggtttgttacaccacaccatcacaaaaaaagattcttaacataataaataaacattaccaccccctgcccaacaaaaccccaaaccagagcagtttgaagagatggcgatggctgaaaaaggattgtaactggcctgggtcccagtagcatttcttctaagacactttctcatccactccgtttggattcttatgccaaaggagaggccggcatgttccagagagaaatctgaggcccaggtcagctagacacctgccacaggaccccagctgggaggaggtgggagctgggccctccccctccagccccgcctttcctgccccagccccagcctcagcctggtccttggctcccatctccttcaatagttccattcttttccggctcccatggactggctgcggtcagccacacatttaaagaacttccctatttatctttccttcctcagctattctgggcccctggcctctccagcagcccctcaatgatctgttgtgttccgtctggcttccgttgtccgcgggcttgctggttgctgacggctctgtagcgggggtatttttagtccttccgtcacttttcccttcctccctgtggagtttcctccctgcggccattgcgcgctattttattctcagtcctgcagccctgccctgacccagactggcagcacctgcttagaacgcctggcctccacttacagaagcctggccatggagtcatggagccaaaagggcccaactgagaagactgagtccagcccacccattttgcagatgaggacagggagtcatacaggttgtgagtagtggaggcgggcctagaaatgaaatgaggtctcacacattctattaacagttctaggacttttcatttatttattaggaaaatagtacagtcatacatagaagcagacagacatattcactcatccatctgtccactaaggaataaaagattagcccctcatgctactgtcacattgatatttgtgacagtattaggttacatttggcaagtatttattggatgtcccttgtgttcctttattctttattataactataggaaatgaagaacctctcattcccattttacagatgaggaaaccgaggtgcagaggttaggcagcatgtctgaggtctgccgcacttatacctggtagagttgggtttgattaggcagcatgaatccagagcctgcctccctgaacggattcacagtggcatctaagagacaccgagctctcgtgtctgaaaatgcagcggttctgaaaacgtgctttcactgacaaaaaaatgattctgctctcctttttggggataaccctcttggcctaatcatttcctgactgaggaagacctgggaacgggctccccatccatgtcaaagagatgtcacggtgtcagagcagggtgggggtattctcagcagcagaaacctgggggctcacgttttattggaggtaatagatgtggccctgaagtgaggggtcaggcccagctggccagggaggctgggtagagacaagcaagtgggcaggtggtggcagatggcgggtagcagtggtcagcttaggagaggaatgtcaaggcagagcccagtctggaaccagaccccaggtggccttgacttctctgtctctgttcctgggcaggtgtcctgcacagaaggcagggttgcaaaagagacactggggaccatggtctggacgggacctgatggggaagttgtctaagttgattgctggctacatgaaaggattaaagcctgggccaggcacagaatcctagaaccaccatcctgggagaggccccaggaatcagctcatctacatccctttcccagctccccaaattatgggggaaaacaaggaagcaggaccagcctctcctgccccacaccctgccacctctttcttggatgattctggtatccagcatcctcagaatgtctccaaggaacctgtggctccttgctcagggaccagtttgtgtctggggctctggcacctgctaaggcattttcagagaatacgaagaggtgaagctggtggtgggagggagaggtggctaatgccatttgtgtccctaagttcagaaggtggggccagaaaccttcccacggaattacctggcagcgtaaccttgtggtagaggattgcatcagatcctgtatttgggttctgagggacaggagggggaccaggagagaggtaccccaacccagtactgatttgcagcttattcagacagagaagggccacatgccctgactcagccttagcttggagttagtgaatgtttgaatcctagctctcccttcccctccccacatcgggcagccttgagcatatcaccaagcctccctgtgcctggggtgatgggattgataggccctccctacatcagcccaaggaacacacacatgaggttcgtgccagtgcaaacgttagagtgtgccattgtggagggggtaatgtcctgtgtccagcctcagcctcagatgttgggtagacccaggggatcatccaaactccaacctcatgttagttacctattgctgtgtaacagatgtccctaaaacttaatgactggaagcaacaagcattgattatccctcagtttctagggtcaagaatttggatatggctttgctgggtcctttggcgctgggtctttccctggctgcaggcatggacttggccagggctgtggtctcatctcaaggctcaactggggaaagaactgcttttaaactcactcatgtggttgctagcaggtttaacaaccctgctagggttctgtccttcccacactcttagactgaaggcctcactggctgttcaccagaggccaccctcagctcctggtcacctgtgtctctcatggggcagctcacaacccagcagccagcaggtgtgacctggacagagaaggtatgcttgagacagaagtcccagtcttttgtaagctaccctcagaagtgatattctgtcacttttactgcattctgttcattagaagtcagttaccaggtctagtccagactcacagggaaggggtgatgtagggcatgagcatcaagaggcaaggagccctgggtgctgtccccaaggctgctcatcaccggccctcccggctgtgcccttggggcaaatcccttctgatcctcagtttcctcatgtgtaaaatgagagactgcttcctccctctgctagccagactgggctagtttcatctttggtttctgagatgatctggccagaaaaaccccaccccacaagactgaagccctggtaaccaggtgtgtgttttcatcccatgcagacaatttcaggtacacatgtgatatctgcgggaagaagtacaaatactacagctgtttccaagagcaccgagacctgcacgcagtggatggtgagtcaggcccctcactccctggagtcatgccaagaggcgcccttccttggagacaccagcccccagccctccccgcctccctcctccctcttacccagaaaaaggccaggcagtagctggaaccatgaggggaatgaccagccctggaggattctgggggcgggaacgtcaccatcatactccacatacacttctatttaggttaacccaagtgaaattgccatttttataggtcaaaatcagtagaatattggaatttcgtatcgagtcattttgtagtttcatattgagcatttgcatgttctgattaaattaaaccggttttaaaaaacgaatgatggccttttagcatcttagattatacaattagaaattagaataatacatttagccaacacatatttgagtctcaaaaatcctagaaagagggtcttagaccttggaagggccttaggggttccccgtctagccccacaccttcagcccatcttgagctgtgacaaccaggcccaccacctgttaccactggcccatctcttttctcacctcgtctttctctctcctcccaatctcttcctcttttctcctgccctggccccttgaacccatgatggcaatcagaaacagatccaggcaaactgtctgcctgcaccatggatgggtgcccatcctagtgaggacgagggattgaggcccaggctgtgtcctggttgggatgtatcctcgtgttgtcctggttttggggggcttccacagtggccacggcagccctcctgggccccaaggcaaacccatggggataggggctgggagcagtggcagaggcagctctgggcagggactaacagggctcctgtttgtttctttccttctgcggctgccgcctcctgcccgggcgcagtgtttagtgtggaaggggcccctgagaaccgggcaggtaagtccttggtgtctgcttgtcacctcccctgtccccggctgggctcctgagacctgggggaccagggtgctaagggccgtgtgttctcccacagaccccttcgaccaaggtgtcgtggccacggacgaggtgaaggaggagcccccggagccattccagaaaatcgggccaagtatgcgggattccctctggggccaagggctgggtgggggctggccaagggaggcagggctcagtctcactgctagggcaggggtagcagtgggtggcatcacttaactgcagcaatggtgcccaacctgtcagttgggccagtcagtgttaggactggagctttcgaggagcagcagggcagcacagggtcaaggtcaggacagtgaaggcagccaggctggggctgagtcctggcgctactgcttacaggcttggtgtcctcatggtctgttagccatcctgaacctcagcctccccacctgtggagtgaggatgacatttccccacaggtttgttgggggattaaatgagatcctggatgtgaaccacttgttagcacagtgcctggtacatagtaggtgctcggaaaataacacgtcgtagtcacctgaaggggcctatcagtgaatgagctgtccagggcagccacaggcagactctctgtctctgtcccaggacaccccttgagggcaggagccacacacgtctggcctgtttttgataaacttgtattgagtgttgtgggcacacagctgagaacaggacacatgtggtcctgcccttgggtaattcagatggggcttgggggtggggacagcagatcattgaacagatagttccaacatagcttgcagggagctgtgggaggcctgagggaatgctggaagctttcagatggggacgagggtaggggatgagccccagcatcccatgccaaggctggagagccctgctggtcccgaaaatcgatgatggcttcaggtcttacagagccttgaatgccagcaggcagcatcctcaggagaatgagccagagagtttttactaagtggagaagggacttgatccaatttgcattttaggaagccccattttgctgctgggaggaagatagattgggaggggctgggtggccagcctagggcaggtgccgtgggaccacaagtgagtgagacttgtcctttccagctgttcaggaattgccatacctgctatttatctctctgttttctgtacctcacttactacccagcaagaagagacctttatggtctctgcttccttccaataaggatctaaggcagcttgtaaaaatatacacaaaaacagaacaagcagatgaggatatctgagtgaaggaaaatcagaggagctgaaacactaagttggatacgttcctcagggcagagctcgatcccagctcttggaaggggttgggtgggttccctccccctcccccaaatgctttttcttcctcatcccttgtctgtggtcatgggatgattctttgctttcttcttaactcttctgaaagcattcaggaaactgaagatgagataatgtctataaagtggtcagcacagtgctgtcacatgcatagtaaacactcgataagcaggagcataaaaatcatcttaaagatgaagaatatggccgggcacggtggctcacacctgtaatcccagcactttgggaggccaagatgggcggatcacctgaggtcaggagttcaagaccagcctggccaatatggcgaaaccccgtcactactaaaattagccaggtgtggtgacgcacacctatagccccagctacttgggatgctgaggcaggagaatcacttgaacccgggaggtggaggttgcattgagctgagattgtgccactgcactccagcctgggtgacaagagtgagactctgtctcaaaaaaaaaaaaaaaagatgaagaatatgatgaaaccctcagtgctcaaatacgagaagttagacggtacaggggaaacacagatgtgaatcaggcatatttgcagcattcaaagaattcaggctgggcgtggtggctctcgcctgtaatcctagcactttgggaggccgagacgggtggatcacaaggtcaggagattgagaccatcctggccaacatggtgaaaccccatctccactaaaatacaaaaattagccgggcgtggtggcatgtgcctgtagtcccagctacttgggaggctgaggcaggagaatcgcttgaacccaggaggtagagcttgcagtgagccgagattgcaccactgcactccagcctggtgacagagcaagactccatctcaaaaaataattccaaagaattcatagtttggtgactatgacagacattcataggcagatataggacaggaacagaggatctgtgacctccccgttgagtatctatctaggatctggcagtggtcccagtgtactgctgctcttccaaccgtgtcattttccttaggaagatgggctttgaaatcagacaggcttaggtttgaatgctgttgtcaccagcttactagctccctaccccttgtgagtatcccataagttgcggacaagcacatctctgaattttccagtgctgttggagcacacacacacaaaatgtctcaccaagcacctggctcatatccaaggtgtagggagacctgttactgagaaagagtcaagggcaagagttttagagccaaccgaaataggactcccagctcgacacttaatagctgcatgatgtcctaccagttttctaatctgtctaatccatagtttctctacctctaaatgggctgatgacaataaaactcacctttcaggattgtcatggggcttagatgagattatatttgtaaaagaattagcatagtccttacacatgcatgcaaagcattaaataagtggtacctttaattacccaggaagatgcagaacaagatgaagtgtgttctctgtatctgtaactaagtctgacagacagccaacgccaggacctgggaggaattaatcaaattattaggagtgtagaattgcattgagaatatcagactgggtctggctgccagcgtgctcccagctggactgaatggagctgagattgctggtgtggtgtgagaccatcccttgctgccactcaggagctgccttgtgagacaaaaacgttgcttcttcggctcctgctacgtataagcaggccaatgccacagaacgcgaaaaacgattagccagtagaggcacacgtgttctgaagggactgattgcccaagtaaagctctgtagtcagaggaagaagaaacaccctggcaggagtgagtgctgggaagtacacctttcacatcagcatcagctgagcacattagagaattaggtacttaggttggaagaagcccaggcaatgacagagcggagaatcctgctagaaaagagagagttggtccaagaagccttgtgggttaactcgctcttcatctgcatatccaagaattacttccatgataatgggcagagggagaatcaaggaaaactcatttgtgtggtctgttgaaacagagtaagtctggagtcatgtatgggttacttgatttttatgcctgaataaggaagagtcacttgaatagttaaaaaaaaaaaaaagagagaactatgtaaattccacataacaagaaaaagagaatttaagagactcagagaagagaacacctctgaaaatgatctaccacaaaatctagaagaccattctgtttgacaacctccatctcatgtaagaaaatatgaccttacacatccacttaggctgccacaacaaaatattacagacggggtggtctgaacaatttatctcttacagttctggaagctggaaagcctgagatcagggtgccagcatggcgggtttctgttgagggctctcctcctggcttgcagatggtcaccatatgtctggacatgatggtgaaagagagagagagcaagctttctggcctctcttctaataagggcactaatcccatggtggggaccctacccttatgacctcatctaaccctgcttacctcccaaaggccccatctccacatgctatcacattaggagttagagtttcaacatatgaatttgaggatggggacacagttcagtccatagcatgacccctgtgaaaagggagccagaagttgtatggtgaaaaagcaacagaataagaaagcaaagagagaggagtgagacgaggaaggatttcagggaagcagaaaacgtaagaacagaattaaaacctacattctatgtagtaaagagccgagtttatctgcaaaattggaattagtgatgtgaaggatgaacttgaacagatgaagataatgagaggaaaatatgataaatggggagaacagggagccggtttcagataattgatgttatagtaccagtggccagaaacagtgctcctaagatctaatagaagaaaaatttgcttagctaaaggaagacctgtatatgcagatttaatatctgcataatcatcatgtatcagatagattcgatataaagagacctgtacctacatagatctcagtgactttttaaaactataggaaaaaaaaaaacctatataagcattcaggcataaaaaagtaggttacctatacatgaattcaaggtggacttgcctcagacttctctgcaatactaaatcttagaagataatggataagtgttgaagggaaaaagttgtaatctaagaattttatatctagacaaattgtggtttgtgtgtaaagagaaaagcaaggacttaaaaacgtattttttttctgtgtacccatcttcacaaaattatttgaagatatactctgatgaactaagttgtagagtacatgtaaagactcaattgtgagaaattcatagtataagaggaactgtgagtagtaaaacaagataaactagaagttagtttaaaatgttccaaatctgattataaaattgcagaaggcagattattctaaaatattaaaaatgagggttttatttattttttattttttattttttgagacagagtctcactctgtcgcccaggctggagtgcagtggcgcaatctcggctcactgcaagctccgcctcctgggttcacaccattctcctgcctcagcctcccaagtagctgggactacaggcgcccgccaccacgcctggctaatttttttatatttttagtagagacggggtttcaccgtgttagccaggatggtcttgatctcctgaccttgtgatccacctgcctcggcctcccaaagtgctgggattacaggcgtgagccaccacacccagccagggttttatttttttaaaaggaaggaggaattggggagggcttacagtaaagtaggttaagccttcctattcatagtgtggctccagaccagcagagcagcattcctggaagcttattagaaatgtatattcttaggccctactccagacctacaggatgagaatttctccagcaagctatgttgtaacagtctttccagatgattctttgacatgctaaagtttgagaaacactggtttaaactatctttctccatggtgatagacagaaaaatgctatttcccacttgactattaacaattagagaaatatatcttatatactgtctaattgtctaaaacaatagagaaaattggaaaataatggaatatcagagaataatggaaaaatatagagttcatatatcaaacaagtgggaattaaggcagcaatcagaaaaggtggagcatgaacaagacttgtaaaaccaaatcaattatagcaataaaagcaaatggcataatctcctttattagaaggcaaagcttgtgaggttgatttaaaataatccagttattaatggtgtattagagacaaggttaattccttatctttactctgcacttgagcttctctttcctacttccagaactagattaaattccctatcatgggtttttatagcactgcatatgtctccttgagagcacttactgtggatggagttttaaatttgtctgagtgtttctttgattttttgatctccttttgttagactgtaaactccttgaaggcaagaactttgcctgtttttgcttagcattttgtgccagcacttagcacagtacctgtttaatgaatgacagtacgagaaaatatagggacatgtcttcaggtacatgtaaacaaatagatcagggtctgacaaattatcaaattatttatgccagacaaactaataaaacggaataattaaatgttacagcaagctttcccacacatcagaattttctggagggcttgttaaaacatggattgcaggacacaacacctagaattttttttttcagtaggtcttaggtgagtcctaagaatttggatttctaacaggttcccaggtgatactgatgttgctggtccagggaccgcactttgagaagcactgtgttggaaaatagttttatgttactaaatatagttcacagtgaagattttgatcccatgagcctttaggtatcaaacaacattgtttccaaatatacaaaataaatttagaaatacagtgaagtggaaagatttatcacaatatttagtctttgacagagcaagtagacaaacaaggttgtatagaatttaaataatatatttaatacagttgatgtaataactgaatcctaccgagagcaagtaacttaccatttccaatgtttatgaatcagttacaaaaattatttaactactaaaaattctatagcaggagagaaaaaccataaacagactaataaaccaattaagaacaaattaattttaacacatataacaaaatgttgatatccttaatctacaaagagtttagccatttcataaacgtcaatatgcctgtagaaatgctggctgtaaacacaaaaggaaagtcacaaaagaaaaacaatagttaattaaacatggaaaataatcaatttccttagaaatcaaagaaatggaaagtaaaatcagtgtaatatagttcttctcatcagataggcagaatgtaagaagatgataatacttaatgctggctgtagtatgcataaacagtcattttcatacctttctggttgggatgatggtgctatgattatcaaaggccttaaaaatacataccctttccctctcttgaatttttccccaggaaataatgtgcaaagattatatggaatagcctttattttgtgataatgtgtaaaattaatgggtgaatgtgcaaaaatttctataaaaacatgagtcacagcatttttcttaatagggaaaaaattttgaaacaatctcaatgtcccttggtgtaggggactggctcagcaaattccaaagtccagtgggaaccatgcagccaatagatgcagtagagatcaatatttattgattgggcaagatgtccacaaagtaatgtcggttgaatacaccagattacaaagaggatattgatcaggactggctaattcagggctcacaggagccagacaggtgttatcagtgagagaagcgcaccccagatgagacagaatgaagagtgggggccagggcaccctcccccaagggggtagatgctgctctttgtttgggggttacagatgattgaaatttctctttagtttttattctgtatttgtatttatcagtattttataattttcccccagtgaacaatattacatcagacatttttaagaagaaagaagttaggcagtgccaaaagagaggtaaagataaagtcgggtgggacttgagaggaagaagtgacccctgctgctagtgggtggggggtgcttgggggcagggaaggtcctggagatgaggggaccccgggtgtggccactgcagagggcagggcttgcaaaggggctgacgaagaggttggtgttggaggtcagcacacttcttgagcaccggggctggggtggagcgatgtgccaggtactgttctaagcacttgccatctaaatttaatcctcacagcaatcctacaaggtggtcctattatgacctccgttttatagataggaaaactgaggcacagagaggttaagagacttgcccgaggttacccagctcgaaatgtctgagctgggatttgaataggggtcttctaactccagagtcagaattgattctagttgatggtcccagaatggggaggagttttttggggggtgggagcacgctgatgcttcttggtggaggccagttgcacattcttacaccttcgtttccttcctggacagaaactggcaattacacctgtgaattctgcggcaaacagtacaagtactacactccctaccaggagcatgtggccttacacgcccccatcagtgagtacctcctcccggtagggatgggggttgggggacccgggacagggtgggccagccgttggccaggcctctggaatttggccaggaaatggtgaaagcaaggtgagctcagttctgggtcagtctttaggtattatgtctgacccagggccacctgtctacagtggccggcatagctgagaagtccccctcttaagccagagcagagtccgagccctcccttagtggactcagagtcctgtgcccacatgattggggtgaggagggtggacatcacttgtccaagtcctgctgtggccctcttctaggtaccgctacatcacaaggtttatgaatctccacccccaaagccagttccgcatgatgcagcttcagtctgaacagatgcatgaaggagcccgggctaggggcgtggttaactggacaggaaagctccctcttggtccttgatggtgggaagctaaggaggtggcaggaaccctgagctgggagtcaagccctggctgttaatcccagctgagtcccaggcctgcttgtgacctggggcaggctgcgtcctgaccctggaccaccatctcccactctgactgggaaaggaaagggctctaagggcccttcccacagtgacatcctcaccttccatcctcctggtgcccgtgagcctaccttactgatttcccagctccttttctggatatttgaggggtctccatcctcagatccccgagtatatgagctagggggctcatcagcctccctctctttcatgtgcaggtgcagaaaccaaagtctgacaggggtggggcttgtgcagtctcagggcagtagggctggatgtttagcagcgtttttggaagtgttgctggttttgtttctcacagcagagctgtggggatccctctccccattctgtggatgggaagactttggtccaaacagagagggagggtttacagaaggtcactgggggctgaagccccttatagtctgggaaggcccaggtccctcctagagccctgctgttgggataccaagggtattggatagggagggagaagtattcagagcctggagggtggtgtaggtagcttccccaggaattcctcccctctgggcagagtggcaggggctgaggggtcttcccgtgggtgagaactccagtcctgaggtcgagcactgggctgagattctcatccctgcttgcccctcactgctctgtgaccttgtgcctgttgctttccttctccgggctcttttcccatctgtgaaagctgtttaaggtcttttcagcccaggatctggattatagacatctctgacatgaggtacctgctatggccccactagaagaatccattccacttcccagcctgggctatataggtcattcagtacccgccatagagccagatcttgtgtggagagagaggatgcaggattccactgggtaggcaccgactgtccagttgacccacttgtggtgctgatgcccaggcagcagggctgtggtcgggcttgaacaccatggcctgtgcccctctggagatccagctttccataagcaggtacagggcagccatgtttgttctccagtgaagcagcaactgccctgctccctggtgcccaggctggatgctacccagaatgcactttcagtgaggtgttagctacaaggccagactataaccttgagttcagcctttggagactatcttcagtgcttcctgggacaagttgagtaaggccatggagttagtaagatggggagcttggctttgaattccggcaggcaggctccaggcccacactcaaccatgaagctatcctacatcccatgtcagatggtaaagcagaaaggggtgtgtctcttccaccctaagtttttccctgacagcctggtgcatctctcctgaagggctgtctacttttctttctgtgttcctcactttcttttgctttctattatgaactctctttctttcttcctgtatctgcttgttgaattaatctctctgttacctactgaagtctggggactcagggatcatctgtgtttaaaatacagcatgagagatttagcctagattcaagagagaattatttatccaaggctgtccaagagatagctcctgcagtggcctctggtgttagagatttgtgtgccaatggacttcttgtggaggcaggggctggacttgagggcttcatcaggtggtatccatggctgggacttgagactctgggtctggtgagtgtccataaggacatagactgactgtggaagaatttcttagaattagtgtcatagaatctatattcttttatgtctgacttcttttgctcagcagaatgtttttaagattcatattttatcatattctcatatgtatcagttcattcttttttacttctgagcaatgttctattgtatgaaaataccgtttgttagccatttacctgttaatttgggttgtttccagctttaggctattataaataaagctgctatgaaaatgcttatatgaggattttgtgggcatatgtgttcatttctttggataaataccaaggagtagaatgactgggtcatggggaatagtatgtttaactttttaataagtgacaaaccattttccaaaatgaccatagcatctttcactcctgccagctgtgcctgtgagttccacttgctccatgttcttgccaacattcgatggtattggtctgtttaattcagctattctagtgaggggatagtggagtctcactgtggtgttaatttgtattttcctgataactaatgacgttgaacatctttatatttacttattggccacttacatattttactttggaaattgtctctttaggtcttctgcccatttatttggttgggctgtttgtcttttttattattaagttgtaggagttctttctatattccagtaggcctgggttctttgccagatacatgtactgtggatttttctcctagtctctggcatgccagttgattttcatacagcatcatttgatgaacagatgtctttcattttgatgaagtccagtttatcatttttttctattgttagtgctttttgggttctacctcaaggatatccttgcctacctcaaaatggtaaagataccctgttttattatcttttagaagccttataattttagctttttcatttatgtctgtgatatatttcaacttaacttttcaaatgatgtgaggtatgagttgagactcattttattccatacagatacctggttgttacaacaccatgtgttgaaaagattatctttccctattgcattgcactggtacttttgtggaaagttatttgaatgtgtaagtatttttctcttccgttggcctgtttgtttatctttatgcctattccacatgattttacttatagctctctagtaagtctcaaatcagctgctcttagtttttcagcattgttattttttaagactatttggctattctagaaactttattcttccatattcatgttagagtcttctctaatttctaccaaaaaaatgcaacttggagtttgtttgggattctattgaatctgtagatcaatttggggagaatcatcattacaataatattgggtctcccaatccatgaacatggtatatttccccaagtatttagggcttgtttagtttctctcaggagcagtttgtacttttcagagaagtcttgcacatatttcattccatatctccaagtattttatggtttgtgacactaccatgacttttaaatttaattttccaattgtctgttgctattgcctataaaaaaatcaatctttgtgtattgaatttgtgtattgcaaatttgctaaatttacttattagttctaatagatttttttagatttctttggattttcttttgcatattgatgtcatccacaaataaagacagctttatttctttccttccaatctgtattctttttattttttttcttcctcactattctggttaggtccctccagtacaatgttgaatagaagaaattagtgaatattttttgccatgttcccaatcatagagttcagttttttattgttaagcattgtgttagctaaagtaggtttttatagatgcccattatcagttgaataagttacctcttatttatagtttattaaaagtttttcttataaattgatgttgcatgtttttttcctccatcttttgaggtgattctgtggattcttatattctcttttgttagtactggtgaattacatagacttaaaaaaaattcaccattcctatactttattaaaacacgttaagaatatcagaaagtcaaactgtaaaatgaactgaagaaagttacaacctggggatgattattctttgccagataaaatgacttccttctttgaagcttctgttttttcttaatagggtatatttaagttgtataacttgattatttcatatgtatacattgtggaataaccccacaatcaagttcttgcttaggcatctaaattacttaacgatccaaggttagtttatagagtaatttgtttttaagaacgtgttttcctctcacttctatctaaaattcttcaggattttacttccttttgatatcactcccaaaactgtctcctcaagggcagggaaatacagtcctaggattagcagaatgcctatatttaatcagtggtgtgttaatgaaggtcataattaagaaaatgaatatttctggtgaagtttttaaatattgattgaagtatattgtcatataataaagtgcctgttatttaaagtgtacagtttgataagttttgacctatgcatgcacccatgaaacggtcaccacaatctaattaacatacccatcacccccaacagttttctcatgcccttttgtaatttgcttaccacttccccatcccgaggcaaacactaatctgcttcctattactgtaaattagtttgcgtttcctagaattttacatatatggaatcttacagtatgtaagtatatatttttgaagggagaggtctggcttctttcactctgcataattattttgagattcatctatgcttacatgtatcagtagttcattctcttttaactgatgatgagtagtattccatttccagatatacatgccacaattactttgttcatttatgggtggatatttagagtatttctggctagagttctggagctaatacaaataaagcagttatgaacatttgtgtacaagcctttgtaaggaaaaatgcttttatttctcttgggtaattacctaagaatggaatgactggatcatatggtagatggttgtttaacttttaacaacagccatgttgttttccaaagtagttgtgccattttacattccaaccagcagtacaattttcttttcttgtaatgttctcgtctcgttgggtatcagagtattgcaggcctcatagaattgggaagagtactccctcctcttcaattttctgaagagtttatatagaattggtattattttatgtaagtattctatacaattcaacagttaagcttttgagcctgaagttttctttgtaggaaggattatttagaaatatattccatttccaaatatttgggaattatccagattttttgttgctattgacttctaacttaattccattgtggtcagagaacatattctgtattttccagtcttcaaaattcattgagataagttttatgacctaccttatggtctcttctgctgcggtttcatgtccacttgaccaaaaaaaaaaaaaaaaaaaaaaggcatctcgtattgtcagttaggccaagttggttgataatgctgttcaaatctctatactctttcccactttcttttttaattagtttgtcttaccaagttctgagagagaagcatcaaaattctcaactctaatggtggatttgtctatttccccttttaggtttgtcagtcttcaatttatgtaattcgaacctttgttattaggtacacacagttagcatcattatgccttgatgaattgaccctttataaagtagtgcaatgccattctatatctctggtaatgcctgttgtcccgaaatttcctttgtctgttactgtaagccatgacagctttcttaggattagtatttgcatagtatatctcttttcatcattttattttaatctacctttatctttgtatttgaagtatgtatatatagttggttcttatgcctttctttatccagtctggtaatccctgccttttaattgaaatgtttaattcatttacatttaatatactatattaatatggttagatttaagtttactatcttgcattttttctatttgtcccatttgttcttgttcatctttttcttattttcgtgccttctttagtattaatcaagtattttttaaaaatgcctcttagctttctagccataactctttttctttagtggtttctctatgatttataatatacatgtttaatatgttacagtccaccacgaatttatatcataacacattacatataatataaaagctttacaatggcatacttcccatttactgccctcctgttctttgtgctatttttatcatacatttatgcctatgtgtgttataaacccaacaattactcttttagctttaaacagtaatttgttaaagtaactgagaaattagaaaatgccttttatatttacttattttccattttgtttgcttttctttccttcgtatacatctgaattccatcaattatcattttctttaattcttgaagaacttcctttaacatttcttatattgtaggtctattggtgaaagattctctaagctgaagatgtttttatttcacatatttttttgaaggattttttttctggatatagaattctaggctgataaatttttttatgtttaaaaatgtcattcctttgtcttctggcttaagttgtttctgatgaaaagtcagagatcattctgattgttattcatctatatttagtgtatattttttctctggatgcttttaagtatttcttgggttaatagtttttagcaatttcattatttgtgtttatcctgtttgagattcattgagcttcttggatcatgagtgtacatttttcatcaaatttggaaaattctcagccagtatttcttcaaatatttttctttcctaatctctcttttctctcttgttgagactttaattacatagatatttgataatcaataatgtttacagataactgaagctctgttcattttttcagccttgttttccttctgtgcttcggtttgaatagattctattgccctgtcttcaagttcactgatcttctcttctgtggtgtctaatctgctttattagaaaaatccattaagtgaactttttatttcagctatcatatttttcatctaagtttcatttggtttctttttataatttttatttctcttcattatttttcatctttccttgtcatttctgtatgtttctgttaattggtttttctcttgattactggtcacattttcctgtgttgcctggaaaataattgtttcttccgtgctgcatcctgggaatgctgtgttgttgacttgattttgtcttcctttgaaaagagttttgttctggcaggtagttaattacttccaaatcaactcaatacttcaaaagctggtttttaagctgtgttaggacaggtctagaatagttcttattctggggttagaacagctcttctaaggcatggcctttctggccgtttcttagctgaatgcctgaagtattgagcaaggtctcgcctctctggctagggggaactccaaaatatctcctactcttgtgtgacttttgaatcttcactcactacacagcccccccacccccatcccccattagctgtttttttgctaggctttgcggagactcatctgcacaaatatagtttggtattcagccagatttcaagggggcccatatgcacatttctggagttctttttgttgcagaattctctcttctttgttaatttgccgtgcaaattctagccacctcaaaagccctgaactcagatcactgtctcctttgttcactgagatgtttgggctccacctctctctgccctggtccagaggggctccccaagcagagagctagagtgaccatggggctcacatcatgttttctctcctgaatcacagttctgcaccacctttgtccagctttatagttgaatatggcaggaagctagtcttgtatcagttactccgtcatggccagaagtgtgagttccccagttctctttctaagatgaagattcacgaggaggggttcccaggttgactcctcttgcatcccatctcccattcatctccacctccagcccttgagcacgtgattccatttgcctccaatgcagtttcatcctcctctacctcgtggaagtttcggggaaaccccctggcctctccactcccttgattgtgtggttgcttttcttgaatccttgcattctctaaatttctttgctccatgcattctctaaatttttttggtccagttaaattttcagctttctggaaaggagaccacagtgctctgttattttttagatatctcttgtgtgtagatactgcatgtgtgtttcctacaggggaagtcagccagtctgtctgagactctttcatgctttctcaggaagagctcaggtaggaattccagcatgacagtgttccctgtgaggtcaacagagggagcacactgttaagtagaatgagtcaggagcctgggacattgatcctggcccagcccaacccaccctgtgacccagaattgatagccatacctctctgagcttgagtagccccatctgccttatacctttgggaccactgggaggataacatgtcagatagcttcatggtaccattatgtgccctcattgggatcccatctttgatgtgctcttcttcagcagttctgactttaaatttcctggccgctcacgcattgatacatggattccacaatgtctcttgagcactgtgtttcagggaacgtgccaaacactctgtgcatggcgggcaaggctggcagagttcctgctctcttggagcatacacgctaatggggagagagccattgttcaaaggtcatactgtgtatcattactgatggtgatcagtccttgaaagggaaggcaagaggggactgacaaataaatggtcccagatggggagttttgggggaggcagactccctaaggaagagatttttaagtatagtgtgtaggaccaacagtcaaaagtttgagggaagaatgttcgaggcagagggaatagcatgcacaaaggctatgagcttgaaagagaaaggatattgtaggatatgagaaggcaaggagctcaatggcctgtgaggaagctggagaggggagcggtcccaagcggggtggtcagagcacacaggtgatgccctcaggcctatgataccatgtgctttatgcatgttcctgagctccctgccacagggaaagagggggctgtgtgcctcagaatgccaggatctttacagcaggaattgtagactctgtaacgggctgatccaacggggctcctagagtcattctgcaaggatggagcctgaagcctcagagggaaagcagcttgatcaggctgttgctcagaaactctgttcctgtgtgggtcactgccatggagagcagaggagtgcacggccttgtgccaaaggcctccttgcacagccggcagacttgagccctgtctcatctcagcactaactttgtgtgttgccatcaacaaacttattatgtctgtggccagaataagcctttgggccttgggtttttttaatctctgaaaaataccagtaatagatacttacatttgaagagcagtttatcattcaggatgcttctgagactttcttggattcccataaagtccccgtgagacttgctatgtggagagggtcatcccagtgttggtggagtcgaggggggaaaacaaaggccgagagaggggaggtatagtctccaagattgtggaggccgagggttacagagctgggcttcagaggtggatttgcctcactccagactcaaggctggttccattacagtgaataaccagctgtggtccccaaactctgcctcacacaggaagccagcagtgatattagaaatggactctgggtgcctattgcaacattgaatgtgtcggttcattctgtggcttaaaaaaaaaaattggaaattatgagacaagcaatcacctggtgggactcaggggcctctgaggccctcggctcagaaagagagacagagagcaggagagtaggtatacaagtgtcctttgccacccaagacttctcagttcctgattcaggaagggagagtcccaagagtggcagctcaggtcacaagggacacaagtgttttccgcagactgaggccttgggatttgtttctggggctggggcggacagatgagggcttgtttaagtggggcatgactaaagaactccctgctcccagcacgtggccaccactgtaggcgaggagtgggtgaccctccacgggggagaatgggcagccccagtcctcacagctcaccccatgcaccagtgtggtaaatgaaggaccatagagtggctttttctttttgccactcagttcctctgtgaccttggacaaggccctgcatcctgcttctttgggctgagcttcgccttctgtgccaggaatgagcagaggtggcgggccagggggccctttcatttaggctctgcatacagtgcccaggacggacgctgtcttaggagcagggagataatggggcctgcctccacctgcctgggccaggggagcaacagccaggtccttcgctaggcaggtcagggctgtggccaggcactgagtcaagacagtaccctctggtgttactaattctcgggggttctgtgagcctctggtcggtaccaaagggcccccgcttcctcttgctgcctagcccccttcctgccctcagggagagttgtggattttgcatgatctctgagtctcattcatgagaatgaggccaggttgaagtgtggaagtgtggccaggttcaggggctggccaccactgctaagggttcaggggagggtgaaggaggccaactgatgctctcccaagaccaccagaggtggaaactgctggagagccagcccccggttctcagtgactccagcttctacggacttttcaggtgagggaggcagggggcctgggtaatggtgatgcagggttccccagacagcatccaggaactgctacacttatttcaattaaagcgtcaggtgtcccatgagagcaacagttcccagtcagtgcccacaaggcaccacagagccccttgccctaaaaccttggagggactatcaggcccctctgcctcccccccagccccggcatgtccctgcctgtctacttcctattgtaacttccaagccagccttcctttaaaggaaaaggagcttagaaaccaacattctagaagatgcacttgggcctgggttaaccaattcagatgccctaagagccagtcagtccagagactgggctggtcaagggttatgggtgacctacacagtgggctggttggtggcctccagataactaagcgtgagctgacagaaggttccagactcctggactttctctggctctgagttaagtgagaatccttgttctctgtggcacaagaagaggttggacagagacagtcccaaccctggaatgtggggctggtggcccgagaggccactcactctgccggctgggagggccctcggggactgagagcgtgaccctctcaggtactgcccccgggtgggagccaccggatgatccagacacgggctctgagtgttcacatccagaggtctccccatctccacgcttcgtggcagcgaagacccagacgaaccagtcggggaaaaaagctccggcctccgtggtccgatgtgccaccctcttacaccgcacccctccagccacccaaacccagacgttccgcactccaaattcgggatctccggcgagcaaggcaaccgcaggtaccaatggcctatgtgacccccacactttctcccccactgcccttctcaccacctgccacagctgtgcctggggttgttgttgccttgcaagagcaagagtggcagtcccgtagtgatctgggacaaatctgagtcccagctctgcctctggctggctctgtgaccatgacaagccacctcacatttctgagccaagtcttctcaccttaaatcagagggttgtacaaggaggtttgcaaacttttttttttaagtagtagaatattttttcccaaatcatggcctgaggggcctgttttgacattcttcacaaggtttaaaaaattttttagttaattgccagcttctgaacatcaaattttatgtaaaacttttgatttctacctgacattgaaaagtcaaacctggcagtcctggacccactttcctacaggacaacgattggctgcctccttgagtagagtgtgtgctctccacttttccacatcctcaccacgccttactgcctccccaacacaatggccatgtggcaggtgtcatttctcattgtgatcacactgttgtctgtcttacatccaacccagttcatctgtttctgttgcctgcctggaccctgttggcatgagtttgcatctcccacctttcagaaaacttaatttaaaaaaaaaagtcatttcaacaaggatctgctctgaacaaagcaggataagccggatggttgacctagatctctggtctcttgccctccccctctgtagcactacccgtgaaactcctccatgagatacaggcccagcaggaaatcagtggatgccaccatttcctcagttcacactgcaaaggactctggctccagaggggtaaacagacaataaaaagttccgagaagttatttcctccagaaaaactggccagacacactgtgtgctgaggaccagcagtcaggaattcttagattcacgtttggatggaaccagccctgggccacctgccgggacttgtgggttgtagggcagagtgatgatgtggtgcctctgggaccgcgggcccttcagttgtcctcaggagaccaaagccatttcttaaataaatagatgatcaaggtgagaactcaggtaaaggatccacttggttcattcggtgactgacaacccagccgagtgattaagccgtgctttcctttactcctcagttcaggaggctaattttgggcaagggcgtgattcttcgaagatatgtttattgtgcttagatctcccaaaaggagagtagtcagtcagccttgaaggtttgaaggtcatggtttttcaggtaccgtgttgagaaaagccagtagccgttgtgtttttcaacagtagcataaattagttagaagcaaattggtcatcacggtctcattggtgatagatatcggctccactaaatcatggaatcgtggctttcaaatcttgctttctctcttgcactttgtggctgggagtttttatgcctgcggtttctgcagagggcggcccacagggtgtggtacgtggccggtctccagcttcagtgtctctgagtaggcattcagcaagctatgggacaggcctcaggctgccttcatgtgccttggaagacttgtgggtaggggtcacctctggattcaccagctgagcaggtcagagggcatccggttgggagcaggagcctgcatgggagataagatagtatgtggttgaggaagaaactgtcagtcacctcctggtcctggaataagtggcccttcatgtgtgtatgggcacgtccctgtatgggatttcacctctggtgctgcatgttgatttttcagccagaggtacttgtggcaaggaaagctattcaaaatgtgcattatcagctgagcagtgtaagagtttgcagcctcaattgtggtaagtttaccagcatgctggtcagaagtcctccatagatgagtaccagtcacccaacgtacacaaggatgaagatggagtaggcagtcacttctccacacaaggcctttttcaaaaggaagcacctccccctaaagtgaagtctgattctgccgtcttggagggttaggagtacatccaaccccagtaacttgacaatctcactctttcctctgttttttcacctgtgaaatgggaatgacagtgcagccctcacagggcttttgggagaattagagggaacttggatgtaaagtatctggtccagtgcctggtacataggaggtgctcagcgaatgagagccccccacccccacccctttccctagaccgagaacagaggggccttctgtgccaatttgtagatgctccctgggactctcagcccaggcatttcacaggcacattttgaagggagggttgtccttgtaatgttagctgcagcctctgcaggaaggagcctgtgtcaggagacgttgttacagtgggatgacaggggtcggggggaggtgggaattgggcagggtctgcaggcactgcctctggcttcctttcccattgtccccatgaccatccgcaaccctggcacccacaaactaagcacttgctcttccggagcagggtggaccaggtgagagtggcatttcccaaagtgcattctcaagatcaccaattttgtgagatatttcagaatctaatgttttaaaaatggggttctgtgggaacccctcttatgtttggggaaggccaggttaagtaaatctaaatgggtctgtttgcgggcagactttgcggagcctttgatatctttgggcaaattgtttctccttaacaaatgcactgggtcagctgcacatcccaaattgactggttgcctgaggtctttatctctgggatcgtccggcatccccctcatgcctagagcaccttggaaaagctgggctgtcttccagctcggatcatctgtttcaataccttctgcaggtgggggtgggggataaaaattcatggttttccacctggttggaccctatctctgcattgcagggtttccagagagcacttggaagagggtgggcccctcaggtagatggcagcctgtaagcagagacaccccagtagtcactcagggggaacccatcccttccgctgggggaacaactgaccagactttgcctgggtttggcctctgggggtgtggggctacccctgctctccctgtcacgccatctgttgcaggataccctccctgtcaccagggaccacctagctgatggagctggaatcaccagaaaacatgctgtcatcatctatgcacttcggtggggcccgtggcagcagaatctgacagggagtggtgggcggtagatccaatgatttgctgtcacggttgtggctctccaggagccaaagatgggagactcaggcccatttgccatctgctctcctgctggatttcatctttgtgtttttgggcatgtcactcccccggcccccgtgcctgggcctcctgggccctgccaggagggtctcttggggccctgccaagggactaggccactcagagggtcctggggagatctggcttgaggtcctggagccctcacgagagctagttggcccagcagagtccttggccttcacccagcctacccctcccttgagacctagtgctgaccaatcaccattgttttctttctctctcctgtcccccacccagcagaaagcgctttcagtcggagagtagaaggcaaagcacaaaaccactttgaagagacgaacagcagttcgcagaactccagcggtgagtgtgccccttgacagccatcctgtgcggtagctgccagcttcgcccgctcccccctggcagccgcggcagcatcctgtgggctggggtctttgtggtgcattatggatcttgttgggaggaggctgggagcagggaattagagggagaccacagaggcaggaggggccttttcttccagggacattcctctgagccttgggcatcagtggacaatgcctcctctctgtctcccccatggagagagcaacacccctccccatagcctgcggcatcaactcagctgaccccagatgattgggcctgagagagccactgctatgtttttagggtagatgtctcagccagtttctttacaggagaagcaaaggaagtgcagttgagagagctctaagaggccgggcgccgtggctcacacctgtaatcccagcactttgggaggccaaggtgggtgggtcacttgaggtcaggagttcgagaccaacctggccaacatggtgaaatcccatctctactaaaaatacagtagctgtagtcccagttactcaggaggctgaggcaggagaatcacttgaacccaggaggcagaggttggaatgagccaagattgcaccactgcactccagcctgggtgacagagcgagactctgtctcaaaaagagagagagagagagagagagagagagagagagctgtgagagccagaggctccaagttctggtctcattttggccctggagccactggaacgaagattcccttccagcccctacctgctcaagtgggtttaaactgaggctctaggtggtctctggcgccccctgacgcctgcctcttccaggaccgcggcagagccctagaatgtccagagcagcagccaaggggcctctcccaccagacccggggtcagcctggggggtgcctggctggtcaccagcagcctctgtccgagcagggcacagcaagctgttctgtaccctgagaggcagggcaggaggggagaggaattctcacattgtggttacattaggggaaggcacccactcactttcttgcatggttgaaatttaattcactacatattaggtgtcagcctgtgccaggcactgggctgggcactgcctgggtgtggacaggtgacgaacacatcacaactgtcggggaccctctgagacagccaggagcgcagacttgagtgtggaggcatctgcctagtaacaggagctccacttcgggctgttactcacatatgaaccccagctccaccacttactagctggtgacttaggctagtctctgaattcctcctctgctgtaaagtggcttgatgaacacacacagccccgtggtggttgtgaacattcagtgagtccctggcacagattacatactcaggtgttagggttttttggtggtgatagttggtcatttttattttttaagtaaaccaagtgatttgatgactgctttgcggaagggaatgaggttttgaacaacgtaatccacccaacctctccaagaggtgggcctgaaagggatggagtgacttgcccaaggccacacaggaataagtagtagcgccgggctggaaccgaggtctccagatgtgccctgtgctcccagccaagccatgctgcacccccatgcgtcccctgcccccagagctaatattcacaatcgggaacgatagcgcaagcactgctgctgctgctgctgctgttggcagccaccattgattgagcgcttactgtgtgcctggcatgtgttcagagctttatatgtcttatctgtcttcctcctttccacagccccatgggggtcaatgttattgttatccccactttttggagtgggaaactgaggctcaggagaggtggattgctgccctaggtcccccagattataagtggtggagccaggattccccatctagaccatctggccccgctgtgctgcctgctgcgtttgaggcttgccaacctctggcagtgccaggaagtgagggagagatgccagccagcaggagccctccaaagcacagccgctcttggtggctgctctggtgtttggtaccaaacatccccaccctggtgccagaacctagaagtagctgccagctccctgtcctgaagtgagctgccatgcaaggatgtcttctcaccagtactcatgtgtcctcactctttcagagtgtagggtgtcccggagggatggcagtgacttgtcttgccctgcctggtggccccagcacccacagtaaaccttgatcctctgaaaggcatggcctctgtgtcaagcctccctgcaaccccaccccagattgtgagccttcctctcggatgctccccactcctctgaaagccccatctggctcactggttattaagaataaaaattatgactatcagcacagaacagcagaactagaagagatggctaaactgtttctcttttgcagaaactgcaagtcccctgatttccaaccctttccctctcctacagagtaagtgatggtcccgttggggggctggagagggcaaggcagggcagggaaggaactcagccagccacgtgctcctggagcctccaggctgtgtgagatgggccttgggctgccctcccgggcagacccggcagctggtggaggcaggccgaggtccagccctgggcgggtggagcagtttggacggggtggggcagagccctgaccagcagcagccttggctctgctgccccagccctggcaggagctcaggccttcccattcacggtcgtcgggcagcctcaggacacctcttccgagccccatcgcagccgtctttttcttcttttccttgctcttcttcccacccctctttctttttcctcttccttctgtccttctccctcttccttctctcctcctccctcttctctgccaggcactgacgtgagtgctaagagtagagagctgagtgatccaggcccctgcaccccttgtgcctgttcctacgcgtgccctccctcactcctccctccctctcctccctttccgcatcagatccccacttcctcctgcttctctgtggctttttccacttcttacccttttccttcttgttttccttatgtctgttaccttggtttttgttcattcatacattcattcatttgttcacttggcaaatagtgacctcatgtggttccagagagagagctggggctgtgacaccctgagactcagtctctgccccaagagggccgttggtctgttgatgttgatgttgtcctccctacccccatctcaagtgcgccgaacagtggctggcacgcagtaagcactcaataaatagctgctcaattgagctaatggtctctctctgcatggcttcctctctccatcattccttcacccagcttctccctcatgggtctagtgacgggggaggcaggcaggctgggcccggagccctgagcacagagacccggtgtgtgtttgggttcccacttgcaaagctgcctgcagcccagcagaaggtgtctgcgtcggttccacccctcacgtggctgccgcatttctccctccagaaccctacacctgcggcgcctgtgggatccagttccagttctacaacaacctgttggagcacatgcagtcccatgcaggtaagtaggatacggcttctctccccctctccttcctcagttcctgcaaattgaagagatggttagggcctgacctgaggcccctggagaaggccgctctttcctggaaaatggtcacaggacatggaacctgcttgcagggagccccagtcagtcagttattaacacaggctggtctgtgctctgcaggtgggggcggtggggaggcagcacaggctctgtgggaacacggagaggtgggacagagttgaagagacttcctggaggtggtggcctcttggctggtcctaaaggccaagtaggagctagcctggaagcgaaatgtgcaggtggaaatggaacatggtttgagatcaaggtgagcagagacagaaggtggggatggagagacatgcagcccaaggcaagctgggctaaggcccacctcagagcagagtctcattcactaacaccctatgtcccagaatgcagttgcgcccaaacctgaggacacatcagaattaccaggagggcttgcttgagcacagatttctaggctccattgtgaatttctgattctgtaggtctgcagaggtggggactaggatttgcatttctggtaagtcttaagacagtgctgatgctactggttcagggaccgccctttgagaaccactgctctagagctacaggtgcagtcatctgctctctaggcagcctttttattacatttcaccacggcataacacaagtctcagggagacagtatgtgctggaataagtaaataattccaaattctcagtggttaaacatacagaccatttacttctcacccacattatagcccaatgcacatgatctagttgggtggcttccacatggtgattcagggatcaaggctcttttttctattggctccgtcctcctctagatcttcagcatcctctctctttgtggatggggagagagactatggggcaagcacacttctttaccatttcagaccacaagtgacacctgtaaatgctcaaattccagtgtggagaattagccacatgaccagcctgaacccatgggtggaagcgtgtccagagccactgtcccgggacagttggccactctgcaaagggaaacgtgagtctggggaggcagttagctgtccctccacccctttccccagaggaattctctagaggcattagaaataatgggtgagacgtgcctgacataatggtgctcagtaattggtagctgctgttatttcacctgttattgttattgtacaaatctttcacatcatctcccaggtctggcctgactggcatagagtattacaggactagaatctcttttaggctaagtactgttctgttagcgtagtctctatcattcattcatccatccagcatatattaattgggtatctgctgtatattaggcatgaaatcagatgatctttttggggagcctattatttatttctaatgaacttaaaatcaggacagagctctggagtggcagccaaggcacttgcctcggagacctgctctaactggtgtgtctgggtgctgtgtgacctcctgcaggaagctgtgtctccatctctaaagcaagggcctgaaaatccccttccccacaccacgcttcccgccccctgctttcctttgctgtcagctgtgcctcaccagggaaggccttgaatgccagctcaaggtgtttagaccccatggggaagcaggatcctcgggctagggacagcagttggcaggctgcttgggaaccactgcctgaacatatcgcttggtcctgagactcccacagcacagccttctgcactcctcctctgaatcctcggcactctgcctgcgccctgccagcttctggaagctgagctgtgattagggaagagcctgggtgccagtgctttcccatccctggaggccattaaaatgcaaatcaggtctgagccttgaggtggccccacctctcccaagcatcttgacttgttttcggagtggagccgtgggctgctttgttctggttcagcgcagccagagaatgcctggccggccatccagcgcaaagccaggctgaatcccagccacactgaatcgggattaaaggcttggctccatagagagaaattaagcatcatgagctgcgcagttcacagcgccgacgataaggaggatcagccttgaataacaccaatctcattatggggctgctgaatggcacagggtaattcccgctaataaacttcctttctgtgctgtaggaaaacctggcgtgccttggtgacgttggagaagcatgctttggcagtaataataccaaagatagctacaattttgtgagtgctttctatgcgtcacttgtggcactgagagctttacgcaggttatttcatcagatcttcctgattaggtagttgacgttttcatccccattatgcagatgatgaaaccgaggctcagagaacataatcactggcccaaagttgcacagctcctaaaaaaagtatccaatagcatttgagcttttacgtggcgccaggccttgttctaagacttttacatatattcacttatttaattctcggaacaaccctcagagttaagtgcccataacagttccacttcatagctaacgaaacggaggcacaaactggttaagtaacttgtccaaggctatgcagtcactgtggcaggctatagataggattccagttctcgcagtgaactccagagcccatgctctcaacatccaccctgtgcagcctcaggtagaccctgatggaaggttagcagagatggaagccctctcagaggtcatctctttcagcctccgcgttaaagtacagccaggaggaccgcagctaagagggattgggagactttccagacagcaagcaagctggcagctcatgggtttaggattttggaggtgaccacacctggtttctttctttctttcttgtttgtttttttttttttttttttcctttgagacagagtctcgatctgtcgcccaggctggagtgcagtggcacaatctcagctgtatacctgcaacttccaccttctgggctcaagcgattcttgtgcctcagcctccctagtagctgggattacaggcatacaccaccatgctcagctaagttttgtacttttagtagagacagggtttcaccacgttggccaggctggccttgaactcctggcctcaagtgatccgcccacctcagccccgcaaagtgctgggattacaggcgtgagccaccatgcctagcaccacacctggtttctaacccctttgagccactttacctccctggacctcagtttttctgtctgtgaagtgggtttattggtattctcagcagggctgggttgagggttccagagatgacggatgtagagtatcaagggccatggcacattctaagacccaacaacagcagatgcctctttttccatccctgtcagaaatacctgctttctcctgcctgcagtggtctctctctgggaagcaacctttattccagcttcgcatccagccctttacaaatgtacatgtgggggaggggggaggacacacaggatagccacaccgaggaaaccttattttcatctcaagctataaatcaagcctttcacagagcttttaactcatttgtattgggagtggtacctgtggcatatggagaagaaaaagtcttaaatcaaccaatattatacattgttatttaatacaagttgaagaatctcaattctaagtcctatggaagggcagagaataagaatcattcctgcagcttaccctgccctagcactttggatggaagagagaaaactgagacccagagagttgaagtagccaattcagtgtcacaccatcgcagaactgggttcatatccagggttttcacatctctgtactgtagtagagaaagtaagaaaggctacttgttttctttcttttttttttttttattgtactttaagttctagggtacacgtgcacaacatgcaggtttgttacatatgtatacatgtgccaggttggtgtgctgcacccattaactcgtcatttacattaggtatatctcctaatgctatcctccccccaccccacaaccggccccggtgtgtgatgttccccttcctgtgtccaagtgttctcattgttcaattcccacctatgagtgagaacatgcggtgtttggttttttgtctttgtgatagtttgctgagaatgatggtttccagcttcatccatgtccctacaaaggacatgaactcatccttttttatggctgcatagtattccatggtgtatatgtgccacattttcttaatccagtctatcattgatggacatttgggttggttccaagtctttgctattgtgaatagtgccgcaataaacatacgtgtgcatgtgtctttatagcagcatgatttataatcctttgggtatatacccagtaatgggatggctgggtcaaatggtgtttctagttctag

SEQ ID NO: 275 - DNA, 1070 bp, Homo sapiens
atgtccctgtggtgccatgggctggtgggctcctgtgttgatctggaggaagaaggtattgaacggagtttcttctttcccagggagcgcttgaagcgcagccagaagagcaccaaggtggagggcccagagccagtgccagccgaggcctcgctgagtgccgagcaaggaacgatgacggaggtgaaggtgaagacagagctgcccgatgactacatccaggaggtgatctggcagggcgaggccaaggaggagaagaaggcggtcagcaaggatgggaccagcgacgtgcctgccgagatctgcgtggtgatcggcggcgtccgcaaccagcagacccttgggtcttacgaatgcggaatctgtggcaagaagtacaagtattacaactgcttccagacccacgtgcgggcgcaccgagacaatttcaggtacacatgtgatatctgcgggaagaagtacaaatactacagctgtttccaagagcaccgagacctgcacgcagtggatgtgtttagtgtggaaggggcccctgagaaccgggcagaccccttcgaccaaggtgtcgtggccacggacgaggtgaaggaggagcccccggagccattccagaaaatcgggccaagtatgcgggattccctctggggccaagggctggaaactggcaattacacctgtgaattctgcggcaaacagtacaagtactacactccctaccaggagcatgtggccttacacgcccccatcagtactgcccccgggtgggagccaccggatgatccagacacgggctctgagtgttcacatccagaggtctccccatctccacgcttcgtggcagcgaagacccagacgaaccagtcggggaaaaaagctccggcctccgtggtccgatgtgccaccctcttacaccgcacccctccagccacccaaacccagacgttccgcactccaaattcgggatctccggcgagcaaggcaaccgcagccagaggtacttgtggcaaggaaagctattcaaaatgtgcattatcagctgagcagtgtaagagtttgcagcctcaattgtg

SEQ ID NO: 276 - protein, 353 aa, Homo sapiens
  VARIANT (1)...(353): Xaa = Any Amino Acid
MSLWCHGLVGSCVDLEEEGIERSFFFPRERLKRSQKSTKVEGPEPVPAEASLSAEQGTMTEVKVKTELPDDYIQEVIWQGEAKEEKKAVSKDGTSDVPAEICVVIGGVRNQQTLGSYECGICGKKYKYYNCFQTHVRAHRDNFRYTCDICGKKYKYYSCFQEHRDLHAVDVFSVEGAPENRADPFDQGVVATDEVKEEPPEPFQKIGPSMRDSLWGQGLETGNYTCEFCGKQYKYYTPYQEHVHAPISTAPGWEPPDDPDTGSECSHPEVSPSPRFVAAKTQTNQSGKKAPASVVRCATLLHRTPPATQTQTFRTPNSGSPASKATARTCGKESYSKCALSAEQCKSLQPQLX

SEQ ID NO: 277 - DNA, 25179 bp, Mus musculus
  misc_feature (1)...(25179): n = A,T,C or G
tgggtacactcaagtgtatgtgtatccatttgcacacacacagtcaactacacagacgtacatatgtgaggtgagggagagaaacaacactcttttttgtttgttagtcccgtatttcctgactgtttggcacaaaaggaatgtaatgtgctcccctgaagagctgggggtaggagttgtcttcgttttagttgaagcataaccataatggtcagagtacagaaaggggtttttatattggggccacacaggccataagccagggaagaggacagaacagaaaaggcttttaaaccggaagccagagaagtcttacccaaagaaccaactagaaattgtcataattcagcttgtccggagaaaaccatgtcaagtgtcagagagtataggaagggaaagtccccaaaggaagtcactggctaacttcacaacctagaactccagaaaccccaagtccaggtactgatcagaactctaactcagtgactactggggagtcccagggccctcacagaagtgaggaacctgaagactggtgctgatgacatctgataccacagaagtcagtgggcagaggcgagacttaaatctgtaactcaggctttgttccgaatctgcagtctgagagggcagtacattagtaccttaaaaacgtcctgtctcttatctcaaggcaacagagtcaacagagagaaggtgggtggggccccagaggcagctgatcaggtctagagtttgctcttgccctggctatgtggctggcaacatttctgagacttgggatgtctgtgcctgttttgctcttgtccctccagctctcctctcattctgtggatgtttgagctttggaacttcttgaaatatcaagcacactcccagagtttccactgtctcaggggcatcaggacttggggtggttaactcagagcagaaaatccattaacagtgagtgtgttaagatgcagagaacaagtgtgtctttaaactacagaaaaggaaagtgctcttatgtattccaccctgtctcttgtcattacagatattctctaaataagctaactttgtgttataagtgccttgctgggtgtggtagtgcttgcctttaatcccagcactggggaggcagaggcaggtgggtctctgtaaatttcaagtcagtttgatctacatagcaagttttaggccagccaaagttacatagtgagaccatgtctcaaaaatacaaaaaaaagctgggcggtggtgtctcatgcctttaatcccagcacttgggaggcagaggcaggcagatttcgaggccagcttggtctacaaagtgagttccaggacagccagggctatacagagaaagactgtctcaaaaaaacaaaaaaaaaccaaaaaaaaaaaaaaaaaaccaaacaaaaaaaaaaaacaaaaaaacaaaaaaacaaaaaacaaaaaacaaaaaaagtcatttgagccaaatgtgggcatgcacagcctgtacccggaaggtggaaggtgaaggcttgaagatcnnnnnnnnnnnnnnnnnnnnnnnnnnnnnnnnnnnnnnnnnnnnnnnnnnnnnnnnnnnnnnnnnnnnnnnnnnnnnnnnnnnnnnnnnnnnnnnnnnnnnnnnnnnnnnnnnnnnnnnnnnnnnnnnnnnnnnnnnnnnnnnnnnnnnnnnnnnnnnnnnnnnnnnnnnnnnnnnnnnnnnnnnnnnnnnnnnnnnnnnnnnnnnnnnnnnnnnnnnnnnnnnnnnnnnnnnnnnnnnnnnnnnnnnnnnnnnnnnnnnnnnnnnnnnnnnnnnnnnnnnnnnnnnnnnnnnnnnnnnnnnnnnnnntagaccagcctggcctcgaactcagaaatccccctgcctctgcctcccgagtgctgggattaaaggcgtgtgccaccatgcccagctccaatcatctttaaaaattgaaaataagacaattttcaatggcaataaccatctcagggaaagatgtagggagataagtagatctcctagtataaggtgggagacatatctcaatgtaaagtccctggaagatagcttcatggtccataggatgggctataataaggagaaactgggaatgcccctgatgaagggctgagtgaaaagcatggtatgaactgtgtgtggtgttgaaggccataatcccagcactcaggtggctcaagcaggaagactgagcactcatggccttccatagtgagaacccatctttgcaaaaaaaaaaaaaagtatggtgtattcatataataaaatagtatgaaaatatgaaaatatagtacatatgtatactgtaatagaaacaaatatagtatccataacatatggttacataaaaactactttgcagagaaatatatgcaagaggattagatttttgttaacatgtatccatgttatggatacacatgtcttatggctgtgagttttataattagagaaagtggtgtaaagatgtggcttagtggtagagctagcacacatggggccctgagtctgactaccaacaccccaaagaaaaaaatgtcaaagaccaacagtggtttttgaaaacaaaacagggctggagagatggctcagcggttaagagcgctgactgctcctctgaaggtcacaagttcaaatcccagcaaccacattgtcttagtcagggtctctattcctgcacaaacaacatgaccaagaagcaagctggggaggaaagggtttattcggcttacacttccatgctgctgttcattaccaaaggaagtcaggactggaactcaggcaggtcagaaagcaggagccgatgcagaggccatggagggatgttctttactggcttgcctctcctggcttgctcagcctgctctcttatagaaccaagattaccagcccagagatggtcccacccacaaggggcccttcccccttgatcactaattgagaaaatgccttacagttgtatctcatggaggcatttcctcaactgaagctcctttctctgtggtaactccagctgtgtcaagttgacacaaaactagccagtacacacatgatggctcacaaccatctgtactgagatctgatgccctcttctggggtgtctgaagacggctacagtgtacttacttatagaaataaataaatctttaaaaaagaaaacaaaacaaataagaaatccatggtggtgcacgcctttaatctcaacacttgggaggcagagacaagtggatctctgtgagtttgagggcagcctagtctacagaataagtcccagaacagggctatatattagaaaaacctaatcttaaaaataataataataaaaaaaattctacctgtgctcctctgtaggtactgcatcacagtccaaaggcaaaagttcacactctctcccttggttcacaggtcctcagctggctcctccttactccctcccagtagaattagttgctgtcctagtatcgagacctatttacagatctataaactacagtcccagagctcctctggggaaaatttcccctgtgcctcgcaggtagcagcacccagtaaggaactgttgaataactgaatggttgctgtgggcactgacatcagatgaacaagttgggacagattatggaaatatttgatacagactaagaagaaaaaagccaaagctgtggaaacctttgtcctggtctagaggacccctctcataaccctcagccgcctcttcacactgtaacgtttggaatgttatgtctctgaaataatgttacataaggcacatcaccagggcgggtctttctcgtgctgggctcacaacaccagagccgaaccagctcagacaagagtggtaggagaaggggaggacccaagcttctaacaaaaaatttcaccccagccccctcaggtatgaagcaggtgattcactgcttccaacagagagtatccaaaatgaccttcgaagccagagcctgcttggtcaaaaggcaaactagactttggaaaggcaaacattcatgttgaactaagttcttggtaactaggtcctaacatgtatgcttctggaaaggaggggctgggctagctttctattctacaaactcacaattcattatacttctggagaccagaagtccagcccaagacacatggagtcaaaaccaaggtgtcttgtgagcagcagtgctctctggagactctaggggcatctgttcccgactttcccccattcctcaggcttgccacatctcttgtttcatggcttctttctttgtctttacaaggccaattgcatccccctgattgggcttctgtggcagtgtttccctactgactagtgtcacaaaatagttccctgattaaaaaacaatttagatttatttagtttaggtctatgaatgttttgcctgcatgtatgtgtgcataccaggtgtgtgtctggtgctggctgagatcagatcttcccactttaaaagatacagattcccaagatataagatacaatttgttaaacgcatgaaactcaagaagaacgaagaccaaagtgtggacactgagccccttcttagaactgggaacaaaacacccatggaaagagttacagagataaagtttggagctgtgacgaaaggatggaccatctaaagactgccatatccagggatccatcccataatcagnnnnnnnnnnnnnnnnnnnnnnnnnnnnnnnnnnnnnnnnnnnnnnnnnnnnnnnnnnnnnnnnnnnnnnnnnnnnnnnnnnnnnnnnnnnnnnnnnnnnnnnnnnnnnnnnnnnnnnnnnnnnnnnnnnnnnnnacacacacacacacacacacacacacacacacacacacacacacacacaaaagatacagatttaagctgatcaatggtggtgctacatgcttttaatcccagaagttgaggggtagggggcaggggcaggtgggcaggtggatctttgagtttgaggccagcttggtctacagagagttctaagacagccaagactacacagaaagacagcttgtctcaaaaaaaaaaaatccagattgaaaaagtgattcaaataagaaaaagtccctcaaagatgtagtcgcctcttgggttttagttaattccagatgtcaagttaacacccaaggtagccaccacacctggtttcattcttcagctgacatttgtcacacctctctcccttatacctggctgcttggcacagaaagctatctgctgagtagctggcaactggttggagctagcccagctgttttggacaccttagaattgttttgagagcattcacaggaaggactccaatgagaacagcgccaaagatgaaacttctgttttggaaggctttgctccagttgtggctatttcagataatgtacgccaggcagaagccagccagagaatagaaaccttagtaagctttaagcaatactgtagcttttctcaatccagagcagagggaaggaatttaggtaactcagtaagaaggcagcaattggtgcaatgagaccggtgagcacacttatgtccctgtgtgaggcctctgattggtggaactgaaagctagttgtgctatggttggtataaatgcttcatttgcaaatcacaaccctcttatacatacaatcaggtggtnnnnnnnnnnnnnnnnnnnnnnnnnnnnnnnnnnnnnnnnnnnnnnnnnnnnnnnnnnnnnnnnnnnnnnnnnnnnnnnnnnnnnnnnnnnnnnnnnnnnnnnnnnnnnnnnnnnnnnnnnnnnnnnnnnnnnnnnnnnnnnnnnnnnnnnnnnnnnnnnnnnnnnnnnnnnnnnnnnnnnnnnnnnnnnnnnnnnnnnnnnnnnnnnnnnnnnnnnnnnnnnnnnnnnnnnnnnnnnnnnnnnnactttcttgtgttgctccctggtgttagtggccttaatagaagacttcttctgaatggtcttttcttacctttttgatgaggtctttttgtgggcagagcaggttgagctggtaacattgtcttaattagattactactgctgagataaagactatggggggaagaaagggttcatttcattgtatactcccaggtaacagtgtatcatcaggaactcaaagcagaaactgaagcagaagtcatggaggattgtagctttcctactttgcttctcatggctagcccagcttgctttcttatataacaacctgccttgggtgacacactgactccctggcctgagctgaacccaaccaaatctgtcatcagccaagaaaaagatcttcgcacttgcctgtaggcaatctgttgtagcattttctcagttgaagttcctcttcccaaataactctagcttgtgtcaagatgacatgaaagcaacccagacagctatggagtgaagacagtggtaatggtgatgtggccgtagggaggaggtactaaagagtcccagagagcagcaggcagaaatgacaaagtagaaggaaacatggagaaggagaaaactgagttgctaagatgaggggctgggagccctggtcactggaaaagagttctaggcaagccttaatgattgaggctcctcacatcaaagacttaagaaccctagcatgctttctgggggctgctgggggctgctgctgttgcaaaccaagggtttctttagatgctaaatacaacagcctttgacaatcaaaactcagagcattaagctttcaacctcagcctcatacttctagagccataagacataagtctttagctctcagagcttggaagtgcatgtctctttgacattcagtgacctgggattaccaaccctggaaatgctattccttgcctttgcctgagcagaggcaagctccgaccactttacagataacagaacaacatggaaactatttaactttattaaatggaaataagcaaattcgatgagcatatatgagactatcccaattttgcagaacttcttccccctacgtatgtaccattccagtttttcaattttcttatctataaacaaaaatacctaactaatataccatagatgtattaaagtacatagtgaataataatatatgagcacatacatctattaaagtgccattgaactctaaataactaatagtgttcaccccaacaattccttctatttctgatgctccttccttccgtgccctggaaaccactcacctgctttccgccactacagatgaatgtatcttttgtaagttctatgtaaacagagtcatacagagcatattcttttgtgtgacttctgcagcaatcgttattagatccatgttcttgtaccactagttgatttcttgtttgctcttgaccgtattccgcagacaggtctccctcacaatgagtgcagccattcacctgtttggattatttctagcttacagcgtttaaaaacaaagctgctgtgagcatccatgtacaagacattgtataaaatatgcatttgttttctcttcagggaacactgagcacagagaatagatctaatggtctattgtgtttaattaaaaatacttttttagacttacttattttgctttatttgtatgaacatgttggctacttgtatgtacagaccccatgtacacacctgtggatcttctgaagctggggttacagatggtttgagctactatatgaatgctagaaattgaaccccaatcttctgcaagagcaacaagtgctgttaaccactggtccatctcactagccgtaaacattttgctttaaataaaactattatatcgtttttcaaaatttttatatcatttacattggtaccaggagagcataaaattctagttcttctgaaagaatttttaccagtatttactattttgaagtgttgacagcaaaaaacctttttagtcaatcatataggcaaaaaaagaaaaaagaaaaaaaaaaagaaaaagaaaagaagccactgtttaccagttaattattcccttgagagacaatagtattaaattgtcatatttgtagattgccaaagttggtccccttagacacacagggcttttgtcttttctttttaaatttatttatttgttgactgtgtatgcctgagtgcatgtgtgtgtgtgtgtgtacctgtgtgtaagtgtgtgtgtgaagttgtcaaaggtcaacttggcagacgttggttctctcctttcactatgtgggttcaggggactgaattctggctgtcaggcttggcgtcagtctcaccagcactcttgccagttaaacaataaatagttttcctttcgttttcattacccacataagtcataaatggaagtccaagaaaacacagaaatctccacatccagaaagctgaaagtacttcttcgcctctggctcttatttgagacaaggccttatgggactgtccagactggcctggaccttctggtctgaagcaatccttctctcagcttccccagtgccaggcactggaatgtgtgcctcctctcagtttccccacggtgacttatttcttactggttttaaagttggttttataagtgaccagaatagactctatctttaatgaacttaaattaagtgttattttctgtgacatagtaaatcagaaacaaaacaaaacaaaacagccatataatgttctattttcttaaagcatttcctagtacagttcaacacagtgtttagtataatttaatattaacatttcaggtctttaatgtattaaatgagtttttctttttaattagatgaagtatcttaactcacacctttatacataaaaattattcttatatttcagttacaaaaagggatagcaaaataacataaatgattatgattcttaaacattactggatcaaaatactatatgctgggtagacactgtaggattgggtctctgtttattatctcattaatgtccgtggagactattttatttttttctagtttagacacagcctccacactagagattgttaaaggtttttaaaaatatgttcaagaaatccagaagttatgttgttctccttggggaagccaaggccaaagccacttcaactgcaagcatggccatttctccatgtcctgatgccccatgccctcttcctacccttcctcactcgagctgcttgcggtggtgtctccctgtgctcacagcctgcctctgtcctggcttttggccaggggtttaacttctctactgggtccaccgctgatgtaatatacattctgagtaaaactatggcagcctttgtcttccgagccgataagcagaaaccccaagggaatgcatctcaaggtttatctcctcatccagaaaaaataatttattcggggattcacttcacttggtcacttagtttaccaatggccctgttctaagaaagtactactaagagaatggacaggaaacccagctaagccattgtccttccccaaaacccatggacagaacaaagaaaattacctaaatttttcaagggtacccaattaagttctccatccaaagctctaaaaggagaaacctgctagaagcaaggtcagaaatcctctcagttgcctttaggacaggagggtctttttacacacggaatcctgaaactgcctttgtatttctgggctgagattataaactaagggttgagttctgccagttaatgctcttaattgtcctggctttagttttcaagaatgcaaacttcaggtcctaagtccttttctgagtgggatattgtcagcaattgaataaatgaaggcggtcccaggctgaacgaccagatacaccaaactcaagagcacaccctagatagtagggcaccaagggtccagcccaggctgtttgaaatatcacgggactttataagaacatgaaactgaaaatgggaaagtccctttgtaacctagttcagcatcaacagctaggagactggtgacgacctccggatctgagtccggattggctgtgagttcaggaactatataagagcgcgcgccctggctggctctcatttcagtggctgctactcggcgcttcagtcgcggtcgcttcagtcgtcagcatggctcgctcggtgaccctggtctttctggtgcttgtctcactgaccggcctgtatgctatccagagtgagtgcctctttcccctctcttggcattaaatttttagttctccttagttctccttcccgacgggattggccagggctgcgtctctcgggaaaggagtgggcgtcccgctgcttacagctttgaggctacagggtggatgcgcctgtttgcgagtgtgctgacggtcagcgctgaagatggggaaggcttctctttttctcctctgctggcgggagcccctagactccctgagcgcaaaaggagggtggggctgcctggaaagtgcagggtggagggctatgggcacgcggaagctgagccccgaccacgggaagtcagaccgccgctgcgcagcttcatttgcactcgcagagaggctcgatccaaccgaagtcgagagaaaatgggcttgggtcccagactctgcgatgtttccaaagctttctgatcattaactttgtatctagtaataaccttaaaggtcgccgggcagtggtggctcacgcctttcatgccagcacttgggaggcagaggtaggcggatttctgaattcgaggccagcctggtctacagagtgagttccaggacagccagggttacacaaagaaaccctgtctcgaaaaaataaataaaggtctctgggtatgaggcttattgcaatgctgaggaccttgtgagcttcttaagtttgaaagtacgtctacaatgtaaatgttatggttccccgtgtattaagacagggaactagaggaggcatcgagatttaaagtaacttattcacacgatagactaatggcagtcggagctggaattgaggccgatcaatgcccaggcctttggactgtaaccgccatttgtttctagaagtgtctaggccttcctgggtcatggtctgtgaagcagtctgagatgccttggacccttggtacctcacacagcgcttcctttttggcacactgcctggttctttccgcgatagagcctctgctttcagttttgagacaactaagactttgccttaagtcaaggtggttatgaactctggagtgaggattatttcagtgtggtgaccaagactcgtgaggataactagtaactaccaaagtcgtggaggtagaaatatggcagagaccagatttaaacctgacccaacactggacttaattgtggaagggatggttcttgtccagagaattccaggcatgatgaacctgtggcatttagcatgttcttgtttccaaaacctcaaatgcaaggaaaaatgtggtttatgctaatttaaatttatggggacaaaaagaattcaaagctttattgagaccttcattctagctggccacagttttcaggttttcctctccctactgccttccatgggtgaataagaggctgctcttcagagaccgtgcacactgaatagatgtgtatctgggagtatattatggctgggcatagttgtgcacatctttaatctcagtatttaggagactgaggcaggtggatctctgaatttgagaccaacctgatctacaaagtgcatccaggacagaaaaacgctgtcttgaaaaaccaaagaaagaaagaaagaaagaaaagaaagtgttttataagccaagtgtgttgagtcatgctgtgacctcagagctggggaggctgagacaggcgttcaaggccagcctggaagacagtcagactgtatctcaaattaaataataagcatataagtaaatgaaggggaaaacacaaaaagagccagtgaaatggctcagcaggtacaggcgcttaccactaagcctgagtgtatctcagatcccacttggtggacggagagaactgacttttaaatccacacatgagctacgtttcgtgcatgtgcacacacacacacacacacacacacacacacatatatatactctctcagtaaaacaataatttttttaagaaagtagatatatacattagtgataccttggtatcagatctgcatattctacacagtagtactccttgtcatgttggttgagaagcagaaacagagttcaaagatggcagtggtatggctcagcagctaaaagtacctgccatgcaacctgaccacctgagttcatagaacccacgacagaaggaggagaaaactgtctcctgaaagccatccaatgtcttcacaagtacacctttgggaacttgactgtgtgtatgtgtgtgtgcacatacaaataacaatggaaagagtttacattattttctttccgtgtccctatagcgtgcagtagctattcccaacatgttgagcgacttcagctatctgaaagccccatatccccttgcacacactgcttacttccagcagagtgcattctcaattgtcatggtcctcacatctccctctggtcctttacccatcccaactcagttgcttaaagctttcctagcttctgtggtattttaaattttgtttgttttctagttcatgaaaccagaggtttggtttcagaatgcaaaccctgggctggaacagagaaaccctgggttgactcgcataggaacctcattagggaggagccaatgctaacacctgccacctgaagggtaattgctcagctctcagcactggatcagacatatgtgttgggaagtctagggaggagcaataagcaaaaacgaaaggggatgaaaataagaaagaaaagtgagaggggctgacacagcgcacaagcactgcgggctttgatgtggatactgtgaagggtgtgcagaatgggatgtgacgtttggaaagttggtgggatttattaagggaagggaggggcacagttcttgagagcttccaataataaaagctccttaaaaatccactgacagaagacactgctaaaagccaggtagggaaaacagaaggtactcgtaggattttgaggaaaagatactacgttttcaaaatgtgggtagactttgggggaagcagatcacttatccagagtagaaatggaacagggagaaatagaggaacaaatgtaagatggtgcacggtgcagactgagctctgttttcatctgtcttcccctgtggccctcagaaacccctcaaattcaagtatactcacgccacccaccggagaatgggaagccgaacatactgaactgctacgtaacacagttccacccgcctcacattgaaatccaaatgctgaagaacgggaaaaaaattcctaaagtagagatgtcagatatgtccttcagcaaggactggtctttctatatcctggctcacactgaattcacccccactgagactgatacatacgcctgcagagttaagcatgccagtatggccgagcccaagaccgtctactggggtaagcctcaagttcttccttactttctggacgctccatctgtgtggacttaaaactgctttgctattttaaaaacctgcatactgagattgttagagaatacccccaaaagactgatctgtggtgccagcagagacttacacagcaggccaggaaccagcagttccctacccactgtcccagactgcttccctctttcctgagcttcctccagctttcctggcagcctggtgcatactaagtgtcaaagggcatgccaggtaggacaggccttggtctgtaacccctgccttcaggtacctacaattctggactgttccagggccttggcaagaagctagtagacaggagtggatctctggaaagttctcaacaagtactcaaggctagcaacagcaacctagtctatctgccttactgcttacaacccctggatgtctgttaatatgtcgtagtataaaagtaaagttttgtctccattttcttttttcatagatcgagacatgtgatcaagcatcatgatggtaggtttcttgactttaaataatgggcctttgggggtggggtggagctggcggtagagcacatgcctagcgtgcataaggccttgagtcctggtcccagcactgcaggaagagaattgtttgattcactatcctaggagctgtttatagacagctcaaacatgataagcatcactgtatgaaagacattaattagggtggcttgatcagctacagaaggatcctttggggtcacattcttttatcctgtggactggcaggaaggaggaacgtagccatgtcactggccctctaaagggagaacagcacctttgtgcatgcagcaaggcaggtaggcaggtaggcaggtaggcaggcgggtggtcagttacacagcctgcatgggtttgccgaccttctgttttaaccctgccagttctgctgagaaggcctgggacgatgagcttgctgtctttgtacagcagtggccttgctcctcacccagaggagccgagtgacagagctctgcgggtacatcttagccctttcagtctctagttggtaggcactagatttaccttctggaggcttccggacactcagggaaagaaatggacagggttgtaacttcatgtaaggcaccgtcactgatgtgtcagaaggaagttgaggagcgtgagagggaacgtgggtgtctctgtcaggtggagtctagtggtagaaaatccagcttttcggtgaaatccagggcccttgaggccaaaagctcactcaaatcttgtattatatttatttctaggaaaggggaattgatgaagggggtggggatgggtgatctgcccagacaagcagttaccaaatggtggagccagaactcacctcctttaagaaggtgattgtcctacaaactcatttgatggtgaggtctggaatgtaaataatgtaatgttcggctaaccttctccttctctccctcccttccccttttcttttcagctctgaagattcatttgaacctgcttaattacaaatccagtttctaatatgctatacaatttatgcacgcagaaagaaatagcaatgtacacatcaccttctttatatcttactttaaatgttttatgcatgttttcaaaaattggaaatatcctagatagctgagcaataaatcttcaataagtattttgatcagaataataaatataattttaagaacaatagttgatcatatgccaaaccctctgtacttctcattacttggatgcagttactcatctttggtctatcacaacataagtgacatactttccttttggtaaagcaaagaggcctaattgaagtctgtcactgtgcccaatgcttagcaattctcacccccaaccctgtggctacttctgcttttgttacttttactaaaaataaaaaactaaaaaaaaaaaaaaaaaaaattgctgccagacattgccagtgttacatgaagtggtttctaggtagcctaaatgcctgcaagcacgtgcgtatttttcatcatctaaagaggcagtgggtatcttagaaggttcttgcagaagcaggctcctcaactaagggtcgagaggaaagtgactaggaaaggcctccaaagcagagcagtaggaggtggtgatgaaggtcagggaataataggaagaaactgagaggggagtgaggatctcagacgtgctggtcccacagggagctctagagcagagatcacatcttacagtttgtcttggtgatgtgcacagcttgttgctggctccacaggactgtatgctaggatgaaagcccagatactttggggtgcaggttatggttatggggtgcaagttatggttattggtggcaaattatgcaaaagctagggactggttcttattgctggatgtaggtagagcatgggtgactactgtgtttcctgttaaattctgctgggtctacagcacacagtctgaaacccccactctgagttcagagttttggctaatgttaaagagggaatgctaatcaatttggaactaagtttgaatcctaatcttacaaaagttactataacatccatgacttgagctcttaattttgagagtttaattgtgtccccaaagctccttttgtggctggagatctagtccctgggggtggtgataatgagaagtggtgagggctctaagaaggagtgtggtgggaggtcctgtcaagggacaaggagccttctgagttctgagagggctgttagaaaggcagcaagcaaccgggcggtggtggcacacgcctttaatcccagcacttgggaggcagaggcaggtggatttctgagttcgaggccagcctggtctacaaagtgagttccaggacagccagggctatacaaagaaaccctgtctcaaaaaaaccaaaaaaaaaaaaaaggaaggcagcaagcctggcctcgcctcttctgcccttcctgaggcacgtcttctgttgctgtcggtgggaaagaggaacctttggttatcattaacattttgaaatttccaaactcttaagtaaatctcttcttactaagtagcttgtatcaggtattttgttataacaattactgattaatagtaaccataagccagaagtgggacaatcaatcttgcatcacaaagctttatttatttatttatatttcacacaactgttattattgtaaatttagattcatttaattttgtgtatgatacatgtacatatgtacactacatgcatgcttactgcctatgaagttcagaagaggtcatctggaggaagtcacatcccctggaactagagagttatggatgactgtgagccaccatgtgggtgctgggaactcaaccggggtcctctggaagagcagccactacttttaactgctaagccttccagttatttttttgtgtgtatacatttgtgtgtgaggagggagcatgcatgtatatatgcttgtgtaagggtatgcatgcagggggtgcatgtatgttcatgtgtgtgtgcatgtgtatgtgggttgtgcatgtgttgtatggggggatatgtgtgtgtgtgtgtgtgtgtgtgagagagagagagtgcatgaatgtatgtatggatcagaggatgggttgctgctggatatcttctccagttgctatcactctctaccttatattttgaggcagagttacagtgaatggcaagcttggagatttagccggccatccagccccagggatcttctagttaccacctttccagtgctagggtgagaggcacatagcaccatactcaacttttctgggagtgatgagggctgaacccaggtccttcagctccaagactgaggcacctcctaggcccccagtacatgatatttatggaatgtagatgatttatcccagcaacctcctgggataaagttccttagggtcctaggtgtattgtttgatcttcagtctcttcttctgtgaaggtttcatcctgtttggctagtgaagtttcagtaggactgaaagtggctgtgttactactgggcttaaggtgcatagggaaacttcatgggaagttcctccataacctggagaaaaggcagagacgttcatcgcacagagacatcacaagaacaagactgcactggaagcctgggaactcagtagaaggaaagaagactagaattgcacctccaaagactgcttcctgcagcagccaagagctcaagatgaacctgggtgagggacctgggagaatgaaccccaccctccaccttggaaaggacctcagggtagcttgcagagtgacagatgtggggaagtggatcctttccacctgtcccagtggacctcagggtaggctgcagagtgacagatgtggagaagtggacctcagggtaggctgcagagttacagatgtggagaagtggacctcagggtaggctgcagagtgacagatgtggagaagtggacctcagggtaggctgcagagttacagatgtggggaagtagacccttcccacccgtcctagtggaactttgttaggacccatggtggcaagaaggatcatatttccaatttcctgtccccaagtcctgtgtctactggtgaaaccttgagcaggaaacttgggttgtgtgtgtgtcttctttagcaccacactgccagactgctttgagccctaacaatggctctgactctattgtagtattgttggctcggtgatgcttttcccaactacaccctttgtgttgctctgcacttattcagctctattagcctagcctagcaagtggccaaccaactttcaagaaataaatcaacaggattataaatcctgattcgtgtgtatctgtaaggattgcaacctctgaccttcagtttctggacactacaagtaatgtcaccatcagagcaaccagaaagtatcctattaattttaactttcaaagcctcactaggagactgactagacagtaggattgctgatctaatttctgtgggaaggcagatgtagagaaccaccacccttcctctttgttgtaaggggctttgggtaaagaggaaactgagagggggtggggaagtcccttttgcccacagcctggggatgtggcaaccttcctgagtgggcagatcatatacaggaaaacctgtttgggaggtagtggcaacaggaatggggccaaacaacaggagtggaattccaggtggaatttgtaccttatcgaccactctgtaacctggggtgtccctgtgacagctttcttcatgtttctcaacatctatgcagccttgcaaggccctcctgccccaccagtgtagccagctcagcacatgctcaagtgcatgcttctagttctacccactagatagaccctggcagagaaggacacaatacctaggcctcacatgggctgctggagcctgggcggagaccagatgatggtgggctctactttttgggaccgttgagcatcactggtgggcctctctttgcctggctggagtaggaaattgtgcagtagccatggcctgtgatcgtgagatgcagagtggagtggagagagcctgccagtattgcctggaccaatgagctgagccgatgcttgtgatggagtgctaggtagagcatccatacctgggcttcactaatttccttcttaggcctccaactgtctatcagattccatggtttaatcccagactccgattgtaacactgtattgtgcagtacacctgccactgtgtttgagatataatctacaaccacagttagtacatttaaacgtcctccccactaaaatcctgttccaatcagcaggctttccacattcctcctaaatcctctagtcctagaaaaccattatatttcagtcttttgaatttttctagtcttgatattctctttattttactaagctgtgtttatttacttgtgtggggcacaggtgcatgggcagtaacaggacatcttgctgcagccaacgctcttctgccatcatgcagcatctggggatggaacccagatggtcaaacttcatctcactctctagaacaaaattttagataaaaattcttcaaaacccctggtagagaactctgggttcatgaaacagcaaatacactacatagtttttcttagaaaactcagggggctggagggatggctcagctgtcaagagcacagactgcttttctgaaagtcctgagttcaaattccaacaaccacatggtggctcacaaccatctgtaatgagatctgacaccctcttctggtgtgtctaaaggcagctacagtgtacttacatataataataaataaatctttaaaaaaaaaagaaactcagacacatagagagctttctaacaattttatgttctgtatacaagtgtttgcctgcatgtgcttatgtgtaccacatgcgtgcggtgccctcagaggccaaagaaggcataggatcccctggacctagagttagagcaggttgtgagctgccatgtgagaacccaggttctcagaaagagcaaccagtaaatccccttagctgccaaactatctttccaggccctaaagattgtttttaaagacagggttttgtgtagcccagactggctttgcactctttcttcttccacctctgcctcctgagttgtaggactacaggtatgcatgtcagtcccttctccttccactgtgtgggacccagggatccaacccaggtcatgaggcttaatagcaatgctttacccactaagccatcctgcctgttttatgttggtaatacaaataaacaaaaggctatctgactgttttgctagggtttaaacaagctgtagtcctcttcatgtaagtgtttttgggttcacggtcttcccactgccaccaggacatgaaatagaggagaggcacagtttaaaatccgtaactaaaatttttgaatatgtgttttccaaaccccccaaatacacctaatactattatcaatcttaaatctttagcttcacattacatttatttttctagtgtctgtgtgaacgtgaacacgcacttggaggccagaggatgatataggatattgttcctcaccattcctcaccatttttgctattattttcacattatttatttatttgcttttttttttttcgtggatgcacatgccacagcatgtatgtgtaggacagaggacagcttgagagagtcaattctctccttccaccatgtgggtgggtcctgggaatcaaactcaccttgtcttgatgttccaacacttgggagacagagagaggaaagaaggtgagccgagcccaactgggttacataaatgagactatctccgaaaacaaagccaaggaatctcactgagcagtgctggccttgctggagtgcagtgagtgtggaggtggagagcaaactgaaaccagaatcagagttcaaatattgcataaagcctgagctctaaattcttatgtaaatcagctggggactgaccaacagctgtgagatgcagggggctttacactggctttaaactttggtgcaaatctcttactgaagccaaaaccatagtaaatacaagaacgcatttatattctggcagtcccagggatgaattccagacaagcctgagagttcctgcgtctaaagaaaaatgctaactcttggcacggcctgggatgtgtaacagagagctctgggagagtcacgtgtctggctttacctgtgagcatcttcagcttggaggagttgacttaactcacaagagtccagtaagtcacacattacctggttatcctgagggtccagtttgcatgggaaggcacttgagagtcacatggatgataaccctcaaactacagaagacattcctcgggaatgcactggagagcgacagccttcctcccctcctagttttcagtagatgaacagttcttgtggcttacatccctttcttttgcggcatgtaaaagccatgatccccagatctggctccacctgtctcaacgaccctgcccagggaagacagagaggctgaggctggcagtgcggtgttaccacgctcctgcctttcctgccaggagactgctttttgtgaatgaaccactctcttctctctctctctctctctttgccctaacaagccagaatagcagctgttgttcagtggtccactggagagaagctggggcaggccggtgattagggagcttgtctacaaggcactccgctcaacctcttagcaccaaacacagaaacaaaacatgcatgcagggcatttattcccagcacttgggaggcagaggtaggtgaaatctctgtgagtttgaagccagcttagtctacatagtgagttctaggacagccagaatgtaggctatgtagagaaactctgtcttgaaaaccaaaatccaaaacaaatacaaaataacaacaaaacccacccaaaccaatcaaccaaacaacaaacacaaacaacgacaacaaccctgaaatctaagaaaacaagcagacagaaggagggtgtgcagatcattcacagggcccctcgaactctctcactaagccagcgtttactacagagtgatagcatggaaggcctgggggctaagaagacagttctttctcacaagaagcttgcggtttcttgggaaagagatctgaagacaaatcggtttaatgaaaggaagaatgtagtatacccagagcagtgatagaaacatctgccaggtgctgctgctgcacacagcctgctctgacttctcagcaactctcttggcaggaggggcagcctgtgcaaagccagagaagcaaggcatttgtgggcagtctctaactctggcatgctgttgtccatgctaaggctggatagcaggcagacattaaccactcaaggcaatatactgagttagaattactgtaagcaaaacatcaaacccgcgggctcccagacttgagcatggtctagggacgagcgtctaagctaaaagtgcttacttagacttttagagaaagctgtgtgaacagcatctttccctgctgccttagggtccagctccagaccctgctacttgatcaggtctgcttcaggagatgccaagaagacagggagagccaaacggctacccctgaaaggctcggtgtctggaggtgacgggtccagctaggataaagagaagccgctccagtcaggggtacagctgatgctgctgtttgttctctcttccctcgagcagcctcattcccaagtgagatctgaaaaccttaaaattacattaccagggctggagagatggctcagccattaagagtatttacggtgcttacagaggaccagagtttggctcccagtactcacatcaggtagttcacaactacttgtaactccagctccagggaatttgatccacctctctggcctctgtgggcacctccatacatgacacacactcgagcacaaacatactcacacataacacaagattaaacatttaaaaattagattaccaactgaagtttaaaagaatcccatcccaaataaaataataaaaggggttggcaggtcattccaatccaatcagagtttgtctatctcagacgcgaatatcatcaaagcaactgacaaactgtcacggaacctgctggatctctagctttggccttgtctgtcttcttcagctcctgaactctcttctccctcctcctctcatgggctctgagtccattcctagcatactaacaggcccagaactcttggtcttcagccatcctgggctcactgagcaaagccaagttgcctgactctgccccctggtggcctgatgaccaagtttcatggaggtaagttattctctaaccactcagcgggttttctacacacagggtaggaaacagggtattgattgtggatcaagaagggaaatcaaagaaatatttaacatgtagcctttaccttctaaactctaggcctttggataaacagaaattagagatgtgggtaagaaagtaaggaggtccaccataactttttgataattaagacaaacattatacaaaagttaacctctttatcaatataactactatctttagatgaagaattattagttataacattttttcatactataggtcttggtatgttatatttacaacagaggtgcagttaaacatttttagaaatcacatttgtgtattttgtgtagatgtgtgggcgtgcataccagagcacatgtgtggaagtcagaggaaaatctgcaggattaggttcactctttccaccatgtggatctcagggactgagtttgggtcgtcgggcttgggagcaagcatcttttcctgctgagccatctcaccagcccagttaaacgtcttaaattaacaccttaaaactaaagtaaaggaagttagtattctaaactttagtgttgacagacaaaagaaaatatcgatttactttaaggaagccgggtttccacggaaacccatcaaggaatctcagtacatggatccggatgccgagtgggtcagaacccagaggtacagatttaggatttacttctgtgaggctgaacacgaagtcaggaaattactcacttgttaaaagagagcagagctagaagaaagccagagaagatactaagaatagaaagggggatggaaattactcatggggaaagaaccagggtagtagtgcactcggggccaaaggagagggtttcaggtttcaggagggtggagaccacgagtattcttaaagagcagagattcagacaagctacttccaacacattccttaagcccctaccacagccaagtaatgtgctggccataagagctcaggaagagacagaggacagtggcatagttaatgtaatgcaacagctttcctcgttggttttttctgtaattgtttgttttgttttaagtcagggttttgctgtgtagccctggctgtcccggaattccatctgtagaccaggctggccttgaactcacagagatctgcctgcctctgcctcctgagtgcttggattaaaggtgtgcgccaccaccactaggctataaatgttttttagagtgtgggtgtgtgtgagagtgtccaaggaggtcagaagactttgatccattggagctggaattacagagatttatgagttctgggatccgaattctagtcctctaaggacttaaatgctcttaacaatggagcagtctttctagccctttcctttgtaattcttatctctattaatgaactgattctacctgccacctctccatttcttttgctttttgtttaaaatgtatatgccagatcctgcctttgtctgtccttccttcttccttttcttcctttcctttccttccttccttccttccttccttccttccttccttccttccttccaacagggtctctctcagctcttgctgtcttggaattcgatatgtagactcagactggcctcaaattcaccatgtttctttaattacttctgggccatgttttttgtattctacaatgtatctcacggtgtttttcagcagttctttctattctttgttttcagattcatgagagagtctggtttgcatagtcatcttttgcattaggcgacagttggggttgctggacagcctatgaaatggtttaaattaatttaaaaagtcaagtatgcaaagaataacatatagaattgtttataactattctgtatat

SEQ ID NO: 278 - DNA, 647 bp, Mus musculus
atttcagtggctgctactcggcgcttcagtcgcggtcgcttcagtcgtcagcatggctcgctcggtgaccctggtctttctggtgcttgtctcactgaccggcctgtatgctatccagaaaacccctcaaattcaagtatactcacgccacccaccggagaatgggaagccgaacatactgaactgctacgtaacacagttccacccgcctcacattgaaatccaaatgctgaagaacgggaaaaaaattcctaaagtagagatgtcagatatgtccttcagcaaggactggtctttctatatcctggctcacactgaattcacccccactgagactgatacatacgcctgcagagttaagcatgccagtatggccgagcccaagaccgtctactgggatcgagacatgtgatcaagcatcatgatgctctgaagattcatttgaacctgcttaattacaaatccagtttctaatatgctatacaatttatgcacgcagaaagaaatagcaatgtacacatcaccttctttatatcttactttaaatgttttatgcatgttttcaaaaattggaaatatcctagatagctgagcaataaatcttcaataagtattttgatcagaataataaatataattttaagaac

SEQ ID NO: 279 - protein, 134 aa, Mus musculus
FQWLLLGASVAVASVVSMARSVTLVFLVLVSLTGAIQKTPQIQVYSRHPPENGKPNILNCYVTQFHPPHIEIQMLKNGKKIPKVEMSDMSFSKDWSFYILAHTEFTPTETDTYACRVKHASMAEPKTVYWDRDM

SEQ ID NO: 280 - DNA, 26632 bp, Homo sapiens
atctctactaaaaatatgaaaattagctgggtgtggtggtacatgcctgttctttcagctactcaggaagctgaggcatgagaattgcttgaacccagggggtggaggttgcagtgagctgagattattgcaccactgccctccagcctgggtgacagagtgagaccctgtctcaaaaaaaaaaaaaaaaaaaaaagagaaatacctgagtctgggaaatttacaaagaaaagagttttaattggcttatggttctgtaggctgtacaaacatagtgctggcatctgctcagctactggggagacctcagggagcttttactcatcgcagaagggtgccaggcacttcacatggtaagatttggagcaagaggtggtggggggaggtgtcacattttaccaacaaccagatctctcaagaatgcactcactattgtgaggacagcaccaagccatgagggatctgcccccatgatccaaacacctatcaccaggccccacctccaatactagggattacaattcaacatgagatttgggtagggacaaatattgaaactatatcagttggtattagttcttcttcatatgtttagtaacatttagcagtgaagacatagagtcctgggctttcatttgttacttgttattggtctgttctggttttggatttcttcaaggttcgatcttggcaggttgtatgtgtctaggaatgtatccatttcttctaggttttccaatttattggcatgtagttgctcatagtagcctctaatgatcgtttgaatttctttgatattggttgtaatgtttcctttttcatctctgattttatttatatgagtcttctctcctttttttcttagcgagtctggctaaggaattgttgatttttgtctttaaaaaaacaacttttctttttgttgatcttttctattgtttccttcatttcaatttcatttatttttgctctcatctttattatttctttccttctaataattttgggtttggcttgctcttgcttttctagttctttgaaatgcatcattatgttgtttatttgaagtttttctgtttttcttttttaatgtaggtgcttatggctataaactttcttcttattactgccttctctgtatcccataggttttggtatattgtgtttccattatcatttgtttccagaatttaaaaaatttccttcttaatttctttgttgacccacagtcacttaggagcatattttaatttccatatatttgtatggtttcaaacattcctcttgttattgatttctagtttttttccattgtggtcagagaagatatttgatataattccaattttttaagacttattttgtggtctaacatatggtctatccttgagaatgatccatgtgctgaggagaagaatgggtattctgtagccattggataaaatgttctgtaaatatctattagatctggccaggcacggtggctcacgcctgtaactccagcactttgggaggccaaggcaggtggatcacaaggtcaggagatcaagaccatcctgactaacgtggagaaaccccatctgtactaaaaatacaaaaaaattagctgggcatggtggtgagcacccgtagtcccagctactcaggaggctgaggcaggagaatggtgtgaacctgggaggtggagcttgcagtaagctgagatcacaccactgcactccagcctgggcaacagagcaagactgcatctcaaaaaagaaaaaatctattagagccatttgatctatagtgcagattaagtctgatgtttctttgttgattttcagtctggatgatctgtccaatgctgaaagtggggtgttgaagtctccagctattattgtattggggtctatctctctctttagctctaataatatttactttatatagctgggtgctccagttggaatgcatatatttttacaattgttatatactctggccgaattaacctcttttcattatataatgaccttctttgtctctttttatagtttttgtcttgaaatctattttgtctgatgtaagcatagctattcatgatcctttttggtttccattggaatggaatatatttttctatccctttgttttagtctatgtgtgtctttatgggtgaagtgtgctccttgtaggcaacaaatcaccgggtcttgctttttttttttttttttttttttttttttaaatccattcagccactctatgtcttttgaatggagagtttagtccatttagattcaatgttattattgataagtaaggacttactcttgccattttgttatttgttttctagttgttttgtggtcctctgttccttccttcttttgttcctgtcttcctttctgtgaaggtgattttctctggtagtatttaaaaatttcttgctttttattttttgtgtatctgttgtatgttgttttggggactttttttgagatggggatctcgctttgtcacccaggctggagtgcagtggtgcgatcttggctcactgcaacctctgcctttcaggctcaagtgatctgcccatctcagcctcccaagtagttgggaccacaggtgagtgccactatgtctggctaattttttttttttttttttggtagagacaagcacttttgtagagacagcactttcaccaccgtgttttccaggctggtttcaaactcctgagctcaagccaaaggcctgctttggcctcccaaagtgctaggattacaagtgggagccaccactcctggcccctgttgtatgcttttttatttcaggttaccataaggcttgtatttaatattttataacccattatttattttattatttttggcatattcacaacataacccattattttaaaccaatgaaaacttaccactgattacataaataaagaagcaaagaaaaaattaataaaaactctacattttaactttgtcctcctgctttttaattctttgttgtttgtgtttgtgtcatattgtactgtctatgtcttgaaaagttgttatagttattagttttgactggttcagcttttggtctttccactcaagatatgagtagtttacataccatgattacagtgttacaatattctgttttttttctgtgtacttccaattaccagtgagttttacaccttcaaattatttttcattgctcattaatgtccttttctttctgattaaagaactcccttcagcatttcttgtaggacaggtctggtgttgatgaaatccctcaacttttgtttgtctaggaaagtctttatttctccttcatattttcaaggatatttatttctccttcatatttcaaggatatttccactggaaagtctgctgccagacatatcagagctccatggtatgttatttgtttattttctgttgctgcttttaggatcctttctgtattcttgaccttgggagtttgtttattaaatgttttgaggtcatcttctttgggttgaatttgtttggtgttctataaccttcatatacttgaatattgatatctttccctaggtttgggaaggtctttgttactatcactttgaataaactttctaccccatctctctctctacctcctctttaaggccaataactcttttttttttctttttgagacagagtctcactttgttgtccaggctggagtgcagtgctgtgatcttggttcactacagcctccacttcccaggttcaagcaattctcctgcctcagcctccagagtagccgggattaaaggcgcctgctgccacgtccagctaatttttgtattttagttgagacggggtttcacgatgttggcgaggctgctctcgaactcctgacctcatgatctgcccaccttggcctcccaaagtgctgggattacaggagtgagccactgcacctggctgcagccagtaactcttaaatttgccgttttgaggctattttctagatcttgtaggcatgcttcattcttttttattcttttttcttttgtctcttctgattatattttcaaattgcctgtcttcaagctcactaattctttcttccacttgatcagttctactgataagagagtctgatgcacccttatgtatgtcagtatcatttttcaactccataatttttgcttgattctttttagttattttaatctctttgttaaagttatatgataggattctgaattccttctctgtgttagctttaatttctttgagtttcctcaaaacattgtttttttttttttttttttttagacagagtcttgctcagttgcccaggctggagtacagtggtatgatcttggctcactgaatctccgcctcccaagtttaagcaattctcctgcctcagcctcctgagtagctgggattacaagcatatgccaccacgcccagctatttttgtatttttagtagagatagggtttcaccatgttggccaagctggtcttgaactcctgagctcaagtgatctacccaccttggcctcccagaatgttgggattacaggtgtgagccaccgtgcctgaccaaaacagctattttgaattctgtttcaaaggtcacatatctctgtttctctgggattggcctctggtgccttattcatttgatgaggtcatgttttcctggctggtcctgatgcttgtggatgttcatcagtgtctgagttaaatatttattatagtctttgcagtctgggctgtttgtatctgtccttcttgggaaggctttccaggaattcaaaggaacttgggtgttgtgatctaagtttttggtcactgcagctgtatctgcattagagggcacaccaagcacagaaatgctgtggctctttcacagtctgttgtatcttttttgatttgaggttaccatgaggtttgcagataatattttatcactcattattttaaactgctgacaacttaacactgattactcatagaggcactgccatggtggtcttggataagatctggaagaattctctggattaccaggcagagactcttattgtcttcccttattttcccccaggcaaagtctgtctttctgtgatcagctgcctggagttgggggagaagtgacacaaacacccctgtgaccaccactgggactgtgcagggtcagacgtgaagccagcatagtactgggtcttgcccaaggcctatggtaaccaccgcctggctactacctatgttcactcaaggccctatggctctaaaatcagcaggtggcaaagccagccaagcttatgtccctctctttagggtggcaagtttcccccagcctggggtgaatccagagatgccttccaggaactggggcctagtcagaaaccttaggaatctacctggtactctattgcactgaggctgaactggcacccaagccacaagacaaagtccttcccacttttccctcccctttccacaagctgaggagtctcttgccatggccacttccaccccaggcctgtggtgggtactgtctggctactgctgatgtatactcaaggcccaagggctctgcagtaagcttgtggtgaacgctgcccagcctgggactcacccttcagggaagcaggctcccctctggcccagagcaggtccaggaatgctatctaagagccaaagcctggaatcagggaccttaagaggccacttggtattctaaccccacagtggccaagtcccctttactctttccacttcttttctcaagcagaaggaatttctccccatagccaccacagctgtaatgtgctgggtcacaccttaagcctgcacgtctctgagtctcacccaaagcccatgatgagtactacctggctacttctgattattcagggccaaagggctctttagtcagctggtgaggaatcctgccaggactggtccttcccttcaaggcagcaggttcccttctggcccagggtgtggctagaaatgtcagcttggagctatggcctggaatgtgggcctcaggactttgcctggtgccctatcctactgcagctgagctggtatccaatgcaagacaaactcatctttgttcttccctctcctcttctcaagcagaggaaagaagtctctctctgagctttgagctgccctgcctggggttgggagaggggtggtgcaagcaatcccttggccatcccagctagtgtctcactaggttgtgtgccccccacattcactggctctgagcccagcacagcaccaggacttacccaggaattgccatccttgtggcctagactgcctttcaagtttatgtagaacctcagagcacttcagcccatggtggggaggcttactggaactcaggttcccactgctgggatgggtgatttgcctctagctagggctggtctaaatgatccctccatgggacctgggtgagttcttcccagtgttgctttgtgctatgactgggcagcactgagttccaatgcaaagtctgaaaatcactgcactcttcctctcccagaagcacacattctctctccatgccaggtggccgctgccggcgaatgggggagagatagcatttagcaattcaagactgtcttaccctcttcagttactctttcagtgatacgaagttaaaaccaggtactgtgatcactcacctgatttttggttcttatgaaggtgcttttttttgtgtggatcattattcaatttggtgttcctgcagggagcaggattagtggaggcgtctattcagccatcttgctccacctcccctagctatgtccttttaaatatttataatcgacatacaatatattacacttaaagtatacaataagttctaaaatataactgaaatcatcatcgaactctagataattaacatatccatcaaccctaaagtttcctcatgtttagatgatctcctttccctctagaaaccactcatctactttctgtcatatagattatagtttgccttttctggagttttatataaacagaatcatatagtatatgttcttttctgtctgacttcttttatttaccatgattatttcatccatgttacatgtatcaacagtttattccttgtttgttgatgatagtatttcattgtatggatatatactccaatgggtttattcatttacctgttgatgtatgttggatcgtttctagttttcagctatcacaaataaaactgctataaacattaaacattaatgtccaagtctttgtatagacatatgctttcattttctcttgggcaaataccttgggtggagtggctggatattatggccagtgtatgtttaactttataaagagctgtcgaagtgttttcctttttcttttttctttttgagatgaagtcttgctctgttgcccaggctggagtgcagtggtgcaatctcggctcattgcaacctctgcctcccaggttcaagcaattctcctgcctcagcctcctgagtagttggggttacagatgcctgccaccatgcctagctaatttttgtatttttagtagagacagggtttcaccatgttggccaggctggtctcaaactcctgatctcaagtgatctgcccgccttgacctcccaaagtgctcagattacaggtgtgagccaccacatccagccccaaattgtttataccattttatattcctaccaggattgtatgagagttccagttcttctaaattcttgccaacatttactactttgaataaatgttcattgtaaaaaaattttaagagggttatataggggaaaaaaaggccgctattaatctgttaattgcactactgggagataaagctattaaactgtcatatttgtggctgggcgtggtaacacatgcttgtgatcctagcactttaggaggctggggaaggaggatcacttgagaccaggagttcgagaccagcctgggcaacacagcaagactctgtctccacaaaaatattaaaaattaaaaaaaaaagaaattgtcatgtttgtagacttcccaaatttgccatcctaggcaaacagtgctcttgtttttaaacaaatagttgtatacataattttccccctcactattcaaaacatgtcataaatggtaagtccaagaaaaatacaggtattcccccccaaagaaaactgtaaaatcgacttttttctatctgtactgttttttattggtttttaaattggttttccaagtgagtaaatcagaatctatctgtaatggattttaaatttagtgtttctctgtgatgtagtaaacaagaaactagaggcaaaaatagccctgtcccttgctaaacttctaaggcacttttctagtacaactcaacactaacatttcaggcctttagtgccttatatgagtttttaaaagggggaaaagggagggagcaagagtgtcttaactcatacatttaggcataacaattattctcatattttagttattgagagggctggtagaaaaactaggtaaataatattaataattatagcgcttattaaacactacagaacacttactatgtaccaggcattgtgggaggctctctcttgtgcattatctcatttcattaggtccatggagagtattgcattttcttagtttaggcatggcctccacaataaagattatcaaaagcctaaaaatatgtaaaagaaacctagaagttatttgttgtgctccttggggaagctaggcaaatcctttcaactgaaaaccatggtgacttccaagatctctgcccctccccatcgccatggtccacttcctcttctcactgttcctcttagaaaagatctgtggactccaccaccacgaaatggcggcaccttatttatggtcactttagagggtaggttttcttaatgggtctgcctgtcatgtttaacgtccttggctgggtccaaggcagatgcagtccaaactctcactaaaattgccgagccctttgtcttccagtgtctaaaatattaatgtcaatggaatcaggccagagtttgaattctagtctcttagcctttgtttcccctgtccataaaatgaatgggggtaattctttcctcctacagtttatttatatattcactaattcattcattcatccatccattcgttcattcggtttactgagtacctactatgtgccagcccctgttctagggtggaaactaagagaatgatgtacctagagggcgctggaagctctaaagccctagcagttactgcttttactattagtggtcgtttttttctcccccccgccccccgacaaatcaacagaacaaagaaaattacctaaacagcaaggacatagggaggaacttcttggcacagaactttccaaacactttttcctgaagggatacaagaagcaagaaaggtactctttcactaggaccttctctgagctgtcctcaggatgcttttgggactatttttcttacccagagaatggagaaaccctgcagggaattcccaagctgtagttataaacagaagttctccttctgctaggtagcattcaaagatcttaatcttctgggtttccgttttctcgaatgaaaaatgcaggtccgagcagttaactggcgggggcaccattagcaagtcacttagcatctctggggccagtctgcaaagcgagggggcagccttaatgtgcctccagcctgaagtcctagaatgagcgcccggtgtcccaagctggggcgcgcaccccagatcggagggcgccgatgtacagacagcaaactcacccagtctagtgcatgccttcttaaacatcacgagactctaagaaaaggaaactgaaaacgggaaagtccctctctctaacctggcactgcgtcgctggcttggagacaggtgacggtccctgcgggccttgtcctgattggctgggcacgcgtttaatataagtggaggcgtcgcgctggcgggcattcctgaagctgacagcattcgggccgagatgtctcgctccgtggccttagctgtgctcgcgctactctctctttctggcctggaggctatccagcgtgagtctctcctaccctcccgctctggtccttcctctcccgctctgcaccctctgtggccctcgctgtgctctctcgctccgtgacttcccttctccaagttctccttggtggcccgccgtggggctagtccagggctggatctcggggaagcggcggggtggcctgggagtggggaagggggtgcgcacccgggacgcgcgctacttgcccctttcggcggggagcaggggagacctttggcctacggcgacgggagggtcgggacaaagtttagggcgtcgataagcgtcagagcgccgaggttgggggagggtttctcttccgctctttcgcggggcctctggctcccccagcgcagctggagtgggggacgggtaggctcgtcccaaaggcgcggcgctgaggtttgtgaacgcgtggaggggcgcttggggtctgggggaggcgtcgcccgggtaagcctgtctgctgcggctctgcttcccttagactggagagctgtggacttcgtctaggcgcccgctaagttcgcatgtcctagcacctctgggtctatgtggggccacaccgtggggaggaaacagcacgcgacgtttgtagaatgcttggctgtgatacaaagcggtttcgaataattaacttatttgttcccatcacatgtcacttttaaaaaattataagaactacccgttattgacatctttctgtgtgccaaggactttatgtgctttgcgtcatttaattttgaaaacagttatcttccgccatagataactactatggttatcttctgcctctcacagatgaagaaactaaggcaccgagattttaagaaacttaattacacaggggataaatggcagcaatcgagattgaagtcaagcctaaccagggcttttgcgggagcgcatgccttttggctgtaattcgtgcatttttttttaagaaaaacgcctgccttctgcgtgagattctccagagcaaactgggcggcatgggccctgtggtcttttcgtacagagggcttcctctttggctctttgcctggttgtttccaagatgtactgtgcctcttactttcggttttgaaaacatgagggggttgggcgtggtagcttacgcctgtaatcccagcacttagggaggccgaggcgggaggatggcttgaggtccgtagttgagaccagcctggccaacatggtgaagcctggtctctacaaaaaataataacaaaaattagccgggtgtggtggctcgtgcctgtggtcccagctgctccggtggctgaggcgggaggatctcttgagcttaggcttttgagctatcatggcgccagtgcactccagcgtgggcaacagagcgagaccctgtctctcaaaaaagaaaaaaaaaaaaaaagaaagagaaaagaaaagaaagaaagaagtgaaggtttgtcagtcaggggagttgtaaaaccattaataaagataatccaagatggttaccaagactgttgaggacgccagagatcttgagcactttctaagtacctggcaatacactaagcgcgctcaccttttcctctggcaaaacatgatcgaaagcagaatgttttgatcatgagaaaattgcatttaatttgaatacaatttatttacaacataaaggataatgtatatatcaccaccattactggtatttgctggttatgttagatgtcattttaaaaaataacaatctgatatttaaaaaaaaatcttattttgaaaatttccaaagtaatacatgccatgcatagaccatttctggaagataccacaagaaacatgtaatgatgattgcctctgaaggtctattttcctcctctgacctgtgtgtgggttttgtttttgttttactgtgggcataaattaatttttcagttaagttttggaagcttaaataactctccaaaagtcataaagccagtaactggttgagcccaaattcaaacccagcctgtctgatacttgtcctcttcttagaaaagattacagtgatgctctcacaaaatcttgccgccttccctcaaacagagagttccaggcaggatgaatctgtgctctgatccctgaggcatttaatatgttcttattattagaagctcagatgcaaagagctctcttagcttttaatgttatgaaaaaaatcaggtcttcattagattccccaatccacctcttgatggggctagtagcctttccttaatgatagggtgtttctagagagatatatctggtcaaggtggcctggtactcctccttctccccacagcctcccagacaaggaggagtagctgccttttagtgatcatgtaccctgaatataagtgtatttaaaagaattttatacacatatatttagtgtcaatctgtatatttagtagcactaacacttctcttcattttcaatgaaaaatatagagtttataatattttcttcccacttccccatggatggtctagtcatgcctctcattttggaaagtactgtttctgaaacattaggcaatatattcccaacctggctagtttacagcaatcacctgtggatgctaattaaaacgcaaatcccactgtcacatgcattactccatttgatcataatggaaagtatgttctgtcccatttgccatagtcctcacctatccctgttgtattttatcgggtccaactcaaccatttaaggtatttgccagctcttgtatgcatttaggttttgtttctttgttttttagctcatgaaattaggtacaaagtcagagaggggtctggcatataaaacctcagcagaaataaagaggttttgttgtttggtaagaacataccttgggttggttgggcacggtggctcgtgcctgtaatcccaacactttgggaggccaaggcaggctgatcacttgaagttgggagttcaagaccagcctggccaacatggtgaaatcccgtctctactgaaaatacaaaaattaaccaggcatggtggtgtgtgcctgtagtcccaggaatcacttgaacccaggaggcggaggttgcagtgagctgagatctcaccactgcacactgcactccagcctgggcaatggaatgagattccatcccaaaaaataaaaaaataaaaaaataaagaacataccttgggttgatccacttaggaacctcagataataacatctgccacgtatagagcaattgctatgtcccaggcactctactagacacttcatacagtttagaaaatcagatgggtgtagatcaaggcaggagcaggaaccaaaaagaaaggcataaacataagaaaaaaaatggaaggggtggaaacagagtacaataacatgagtaatttgatgggggctattatgaactgagaaatgaactttgaaaagtatcttggggccaaatcatgtagactcttgagtgatgtgttaaggaatgctatgagtgctgagagggcatcagaagtccttgagagcctccagagaaaggctcttaaaaatgcagcgcaatctccagtgacagaagatactgctagaaatctgctagaaaaaaaacaaaaaaggcatgtatagaggaattatgagggaaagataccaagtcacggtttattcttcaaaatggaggtggcttgttgggaaggtggaagctcatttggccagagtggaaatggaattgggagaaatcgatgaccaaatgtaaacacttggtgcctgatatagcttgacaccaagttagccccaagtgaaataccctggcaatattaatgtgtcttttcccgatattcctcaggtactccaaagattcaggtttactcacgtcatccagcagagaatggaaagtcaaatttcctgaattgctatgtgtctgggtttcatccatccgacattgaagttgacttactgaagaatggagagagaattgaaaaagtggagcattcagacttgtctttcagcaaggactggtctttctatctcttgtactacactgaattcacccccactgaaaaagatgagtatgcctgccgtgtgaaccatgtgactttgtcacagcccaagatagttaagtggggtaagtcttacattcttttgtaagctgctgaaagttgtgtatgagtagtcatatcataaagctgctttgatataaaaaaggtctatggccatactaccctgaatgagtcccatcccatctgatataaacaatctgcatattgggattgtcagggaatgttcttaaagatcagattagtggcacctgctgagatactgatgcacagcatggtttctgaaccagtagtttccctgcagttgagcagggagcagcagcagcacttgcacaaatacatatacactcttaacacttcttacctactggcttcctctagcttttgtggcagcttcaggtatatttagcactgaacgaacatctcaagaaggtataggcctttgtttgtaagtcctgctgtcctagcatcctataatcctggacttctccagtactttctggctggattggtatctgaggctagtaggaagggcttgttcctgctgggtagctctaaacaatgtattcatgggtaggaacagcagcctattctgccagccttatttctaaccattttagacatttgttagtacatggtattttaaaagtaaaacttaatgtcttccttttttttctccactgtctttttcatagatcgagacatgtaagcagcatcatggaggtaagtttttgaccttgagaaaatgtttttgtttcactgtcctgaggactatttatagacagctctaacatgataaccctcactatgtggagaacattgacagagtaacattttagcagggaaagaagaatcctacagggtcatgttcccttctcctgtggagtggcatgaagaaggtgtatggccccaggtatggccatattactgaccctctacagagagggcaaaggaactgccagtatggtattgcaggataaaggcaggtggttacccacattacctgcaaggctttgatctttcttctgccatttccacattggacatctctgctgaggagagaaaatgaaccactcttttcctttgtataatgttgttttattcttcagacagaagagaggagttatacagctctgcagacatcccattcctgtatggggactgtgtttgcctcttagaggttcccaggccactagaggagataaagggaaacagattgttataacttgatataatgatactataatagatgtaactacaaggagctccagaagcaagagagagggaggaacttggacttctctgcatctttagttggagtccaaaggcttttcaatgaaattctactgcccagggtacattgatgctgaaaccccattcaaatctcctgttatattctagaacagggaattgatttgggagagcatcaggaaggtggatgatctgcccagtcacactgttagtaaattgtagagccaggacctgaactctaatatagtcatgtgttacttaatgacggggacatgttctgagaaatgcttacacaaacctaggtgttgtagcctactacacgcataggctacatggtatagcctattgctcctagactacaaacctgtacagcctgttactgtactgaatactgtgggcagttgtaacacaatggtaagtatttgtgtatctaaacatagaagttgcagtaaaaatatgctattttaatcttatgagaccactgtcatatatacagtccatcattgaccaaaacatcatatcagcattttttcttctaagattttgggagcaccaaagggatacactaacaggatatactctttataatgggtttggagaactgtctgcagctacttcttttaaaaaggtgatctacacagtagaaattagacaagtttggtaatgagatctgcaatccaaataaaataaattcattgctaacctttttcttttcttttcaggtttgaagatgccgcatttggattggatgaattccaaattctgcttgcttgctttttaatattgatatgcttatacacttacactttatgcacaaaatgtagggttataataatgttaacatggacatgatcttctttataattctactttgagtgctgtctccatgtttgatgtatctgagcaggttgctccacaggtagctctaggagggctggcaacttagaggtggggagcagagaattctcttatccaacatcaacatcttggtcagatttgaactcttcaatctcttgcactcaaagcttgttaagatagttaagcgtgcataagttaacttccaatttacatactctgcttagaatttgggggaaaatttagaaatataattgacaggattattggaaatttgttataatgaatgaaacattttgtcatataagattcatatttacttcttatacatttgataaagtaaggcatggttgtggttaatctggtttatttttgttccacaagttaaataaatcataaaacttgatgtgttatctcttatatctcactcccactattacccctttattttcaaacagggaaacagtcttcaagttccacttggtaaaaaatgtgaaccccttgtatatagagtttggctcacagtgtaaagggcctcagtgattcacattttccagattaggaatctgatgctcaaagaagttaaatggcatagttggggtgacacagctgtctagtgggaggccagccttctatattttagccagcgttctttcctgcgggccaggtcatgaggagtatgcagactctaagagggagcaaaagtatctgaaggatttaatattttagcaaggaatagatatacagtcatcccttggtctccctgggggattggtttcaggaccccttcttggacaccaaatctatggatatttaagtcccttctataaaatggtatagtatttgcatataacctatccacatcctcctgtatactttaaatcatttctagattacttgtaatacctaatacaatgtaaatgctatgcaaatagttgttattgtttaaggaataatgacaagaaaaaaaagtctgtacatgctcagtaaagacacaaccatccctttttttccccagtgtttttgatccatggtttgctgaatccacagatgtggagcccctggatacggaaggccagctgtactttgaatgacaaataacagatttaaaattttcaaggcatagttttatacctgatggccagctttgtttatttgaccaagaatctgagttagctagttctaggtactgacaggataaataaaacacaacactgctcccgatcttctcagtttagcagagggacagatatgcactcaaataattaaaatatatcctgataagaatatagcataggtacgcgcgaagaacttggcaatcgaaattttgttgttcaggctgggcgaggtgtctcatgtctgtaatcccagcactttgggaggccatggtaggatgatcgcttgagcccaggagtccgagaccagcctgggcaacataacaagaccctgtctcaattcaaagaattgaattaaaaaaaacaaaaaataatttttttaaaaaagaaatgttgttgttcaaggaacaacaacaaaaatctagggaggtgttagagaagccatttgcctgagctgagagtaagttgctagtggttctcttgattggtaggtggggcctgggtttccaggcatggtagccaggaaggacagccacatggcaggtttgggtaattccaaacagtggaggaagggtgtctgggggaagacttgtaggaactcagctgaaaaaattgggggatgatactctgaaagaaaaacaaagttttaaaatttctactcttacacttaacacataatgcttctgtgaccggatatttaggggttttccccccacactctgttaggagaaaaattttagacagattaaatttaacagagtttaactgagcaaaaatgattctcgaaccaggcagctgccggagccagaataggttcaaaatgactctgggggtgccacatggttggatgacatttagggacagaaaaaggaaagtgatgtgcagaaaatggaagtcaggggcagaagcagccagattggttgcagttcagcatttgcctcatttaaacagggtttgaagagttggccacctgtgattggctgagactctgtggtataagagtaagttacagtctgtttacacatccagttaggttacagttcactatgcagagagaaatctttagcctgaacttacacagggaggcagttttatttatttatttaattttttttttttgagacaaggtctcactctgtcacccgggctggagttcagtggtatgatcatggcttattgcagcctcgacttcctggcctcaagcaatccttccgcctcaggctctagagtagctgggactacaggcacatgtcagcatgcctggctaattttgttttttaatttttagtagagatgaactcctggccttgcacaattctttcgcctcagcctccgaaaatgctgggattacaggtgtgagccactgtgcccagctaaggcaactttaggctaaacctttttttgagacagagtttctctcttgttgtctaggctggagtgcagttgcaccatcttggctcactgcaacctccacctccagggttcaagtgattctcgttcctcagcctcccgagtaactgggattacaggcatgcgccaccacgcctggctaattttgtgtttttagtagagatggtgtttcaccatgttgtccaggctggtctcaaactcctggcctcaagtgatcctctggcctcagcttcccagagtactgagattacaggcatgagccactgtgccctgcctaggctaaacttaatttaacaacaccaaacaatctccagcagacaccaactgggtatcccataattcaattcgattttgattggatctacctggagatggtgtcagatcccgctggttgagggttcagtcccacaagactgccctccacttcagatgccaatcacacattgtaggttgttacctctacttctgactgaccagctggaaaccagaactcccatgactgcctccttgactttggttaatttgctaggacagttcatatttaccaatctattataaaagattaaaggctacagacgaataactagatgaaaagatgaatagggctatatgtagggggttgtggtggtgacagtccatgccctctccaggtgtatgccaccctcccagcacctccacacattcagcaaacaggaagctcatcgttcaagagtttttatagagcttgatctccagctccccttcaccttcccagaggtggatgggtgggggtggaagttccaacacactaatcttctcatcacttggtctttctggtgactagcaccatcctgaggctatctaggggcccaaacctatgagtataacctcattagcatatactcaagggttaccaaagaggcttattattaataataaaagacactcctatcactcaaaattcaaaggattttaggaacttctgacaggaactggggacaaagaccaaatgtgtttcatattataccacacttacctaggccattcattaactcttcacctggctgcaaactaaaattacatgtagagtttgtaagaacaaaacaaacacacacacagacacacacacacacacacacacacacacacacacacacaaaacaacaaggcaggcacggtggctcacgcctgtaagcccaacactttggaaagtcaaggtgagcagattacgaggagttcaagaccagcctggctaacatggtgaaaccctgtctctactaagaatacaaaaattagccaggcatggtggcacgtgcctgtaatcccagctactcaggaggctgaggcaagagaatcgcttgaacctcggaggcagaggttgcagtgagccgagatcatgccattgcactccagcctgagtgacagagtgagactccatctcaaaaacaccaccaccaccaccaccaccaacaacaaacaacaacaacaacaacaacaacaacaactcaccagcttcccagactcccatccaggccaattaaaccataatctctcggtatggagcccaggtatagtgttattttttaaaaaacctctagatagttttaatgtacatccaagattgacagacccattgagttcagtcataaagaactctctctccattccatatcattcaacagagctattttgtgaggggctgctctgctggctgatattacaaggtaatactatgtcaaagtcaaatgaaatatagagttgaatctctgaaattaaaatgttttatttgggaggaaagaattgcaactcagggcatacacacagaccagctggtctttggcatgtctgaagtacaaaaaggttttataaaatgggaaaatgttacttatcgctctgagaaaatttcactggtgctagtaagttttgaggagctggcaagttttgattggcaaatgatgacaataaacagaactagtctcagagttgtagcaggtcatttcagtagccattagttaaacctggtttcagatgatagcaggcagtttcagcttccaggcttgcagaaaatcgcatttttggaacaatgttttgtgccctgagtgcttctccctggcttcttgactctgttttagttgagtaagacaaaaatgacccagtttgatgaccaactttcacagttcctttggagcatgccttagtttctctttttagaagagagcaagcaaagaggaggaatacaggaagcttaattaaccttattaaatataattgtgcaatgcaaattaaactgaaaagtcccaacatcagtaatagagaagtagatcctacatactgacatggaagcatacccatactatattgctgaaacaaaaattagtttctacaaaatatgtgtaagaagccactttaaaaaaacaaactaggtggggcatggtggctcacacctgtaatcccagcatttttggaggccaaggtgggaggactgcgtgagctaagaagtttgagacaagcctgggcaacatagtgagacccagtctctctctctatttatgtatttatttatgtatgtacatatttattgatttatttatttgagacggagtcttgccctgtcacccaggctggagtgcaatgtcgtgatctcagctcactgcaacctccacctcccaggttcaaacgattctcctgcctcagcctcctgagtagctggaattacaggcacccgccaccatacccagctaattattttttgtatttttagtagagacgggatttcatcatgttggtcaggctggtctcaaactcctgacctcatgatccacccgcctcggcctcccaaagtgctgggattacaggtgtgagccaccgcgcccggccgagacccagtctctttaaaaaaaaatggctaacatggtgaaaccccatctctactaaaaatacaaaaattagctgggtgtggtggtacatacctgtaatcccagctacttgggaggctgaggcaggagaatcacttgaacccaggaggcggaggttgcagtgagcggagattgcatcaccgcacactagcctgggtgacagagcaagactttgtcacacacacacacaaaaaaaagtggacgcttgcatcacttgagcctgggaggttgaggctgcagtgagcagagatcaggacactacactccagcctgggtgatgaagcaagtccctcaaaaaggaaaaaaaaaaaaagtagacccttgcaccccaaatctgtattgttcaaaggttaactgtatcctcctttaaaaaaggggttactgttaaataataatttttatatcttactttttttcatgatccctaaggaaaacatgtcacaaatggatatgtctttctagttttgtcaacaaccactttcacggtatttttgggctgttgctttttacttgtcatttttgtgttgtaaacccttgaagcaaaactcaaggtcttttctttttttcttttcttttcttttctgagacagggtattaccctgtcacccaggcttgtgtgcagaggcacaatcttggctcactgcagcctcagcctcttggactcaagcaatcctcccatctcagcctcccaagtagctgagaccacaggtgtgcaccacccattcctggctaattttttttgtgtatttttttgtagagatgggggtctcactatgtttccctggctggtcttgaactcttgggttcaagcgatcctccagtctcgcctctcaaagtgctgggattacagagccaccacactcagccatttcctataataaaaaaatattttgtctgtgatgtagccatcaaagttttagggggaaaaattggcattgtctttccctggagtctagacctataggaaaaaaattgaaggctaatatttgggttctagatgacgcaaaataaataataaaacatctgtgattaccttgattgaaaagtttgtgcatagaaattattctggtactttggagagctacgagaaggcctaacagaaaaaaaaactgataaatacaattaaaataacagtcgagcatatattaaagcacttactatgcactaaactctatatatctcctgtcattagttggatgcaattattagacatctttggtcctccacaacataggtgattaaaaagtctaagaaactgaggcgttatctatgtctttggtaagacacacaggcccaagtgaagcctgcaatgatgtgcaggcttcccctcccccacggaccacatggaccacttcctcttttttttttttttttttctttagacagagtctcactgtatcgcccaggctggagtgcagtggcgcaatctcggctcactgcaacctctgcttcctgggttcaagtgattctcctgcctcagcctcccgagtagctgggaatacaggcatgcaccaccatgcctgactaatttttttatgtgtgtgtttttggtagagatggggtttcaccatgctggccaggctggtctcaaactcctgacctcgtgatctgctcgccttggcctcccaaagtgctgggattacaggcacttcctctttttactgttttcacttagaaaaactgagaggacttttgctgccactgaatgacacagcatagttgaagcggttttcttgtcatttattatggctcgaatgtttgtcccttctgaaattcatgttgaaacttaatcctggctgggcacagtggctcacacttctaatcccagcattttgggaggctgagactggaggatcgcatgagcccaggagtttgagaccagcctgcgcaacatagtgagtcctcctctctacaaaatcaaacaaacaaaaattagctgggtgtggtagcacacacctgtggtcccagctacttggaaggcggaggcaggaggattgtttgaacccaggaggagtttaagagcagtctgggcaatatagtgagacctcatatctgtctatctatgtatctatgtatctatgtatctatctatctatctatctatctatctatctatctatgtatctatctatctaaaataaattaaattaaaaaataaaaaataatgaggcaaagaaaagaaagttaatcctcaatataacagtattaagaagtagggcatttaagaggtgactgggtcatgagggctccttcatgaatggattaatggattaatgggttatcctgagaatgggtctgttataaaagccagtttcgctctttctcttgtgcccctctaaatctttatctttagccatgttatgatgcctctctgatatctttacccatgttatgatgcggaacaaagccctcacccaaagcaaaccagatacagcccctcaacgttgaacttctcagcctcttccatacatttttcttcctttcttttttttgagataggatcttgctctgccattgtgccattgcagcctcaaactcttgggctcaagtgatcctgctgcttcagcatcctgagtagcggggcttacagatgcacacccccatgcatcactaatttttttttttttttttgagatggagtcttgctaggtcacccaggctggagtgcagtggtgcaatctcggctcactgcaacctctgcctcctgggttcacaccattctcctgcctcagcctcccaagtagctgggactacaggtgcctgccaccacgccaggttaattttttgtatttttagtagagacagggtttcaccgtgttagccaggatggtctcgatctcctgacctcatgatccacccatcttggcctcccaaagtgctgggattacaggcatgaaccactgcgcccggccgcatcgctagtttttaaaaactttttgtagagacagattcttactatgttgccaaggctggtctcaaactcctggcctcaagagatcctccagtcttcggcctcccaaaaagatgggattacaggcatgagccacctcacctggcctcttttttttgtatattacctgatctcaggtattctgctatagcaacagaaagacgaagacagaatccttagctgtctgcaagtgtgcatgccattttcatcctctgaagagtcagcgagtgtcttaggtggagtcttgcaaaagcaggccctgagccaaagatttggatgcaaatgacttgttaagaaagggctcttcgagaccgtgccattgcactccagcccgggcaagaagagtgaaactctgtttcaaaaaaaaaaaagtggggggctcctaggaaaagaacagtaaaggagtgggggatgaaggacagggaatgggaagaagccaagcgagagcatgatttccgaagtcctacactcagcctgatcacacgggaagctttagaacaaagaacacacctcagagtttttcctgcctcaacacaaaggagctgggctttggtgctcttcatcagcctgtctttggctatccagggttgtggaacgaggtgaaacataaaactccgagatacttccggctccctccagtgtctgagggtaatctgcaggactgagggtaattgcagatgctagctgttagcagcaaactatgcaaaagctgaggactggcttataaagccagatctgggtgagtcatgtttcctgtcaacatcctctgctgggcccataacacatgcaaccccaaacttccattacaagttcaaagtttctaaggggatagcattacagtgtgtatgatattggactcagacctgagtttgaatcctaattccacaaaagaaattggaaaagagtcatattgctgacttgaccctttgtcaccatatccataaaatgggataattattcctatatcataaatttacttatttattcacttagtcatttgttaaataaatacggagtgtctactttgtgccgggcactctttttagggtggttctgagaaggggatggcaatgagaagggctctctaagatgcaagactccaggcaactgcttttacttccagtggttctttattttcacagctcattagagcaaattaccacagcagggagatacaggttgagtgtcccttatccgaaaagcctggcaccagaagtgttttaaattttggatttttttttgatttttggaatatttgttaattatcagttgagcatctctaatgtgaaaatctaaaatccaaaatgccccagtgaccctttcctttgagcatcatgttggtgctcaaaaagtttgagatgttggagcatttaggatttcagatttttggattaaggatactcattttgtacaatggaaaacttcttggcactaatctgatgaaagaagaaactacgggagaatccctttccctaaaaggctttcagtaacaagatggccctgactcattctggacagttcctccaaaggtaggcctacaggtagaactcttttctggcagcataggggttttccagaatgaaggtgtattttttttttactgaggccaggaaaggtgaagagaatgaagggttcctagtgacgatgcagcaaccaagtcatttatgtaatggagccttatctgacagatttctaggatagaaactcagtatccaagctcaggcttggcagactgaggtgggcaccgtccccaggattgcagtgtggattagaggtttcaaccccaatcatattcaacagctccctttcccccaacaacccctttttataacagttgttttgtggtgattcttttactaatatgatcatgaaaattaagtaatttagcttgtgaatgctctagcttggctgcactgctggtataaagaagtgccagacacttgcaactgcctaggatctctgtgaaccagcggcatggaagactgagaggcacgctggattgatggctcagattcaagtatggtattgcaggttct

SEQ ID NO: 281 - DNA, 813 bp, Homo sapiens
gggcattcctgaagctgacagcattcgggccgagatgtctcgctccgtggccttagctgtgctcgcgctactctctctttctggcctggagagagaattgaaaaagtggagcattcagacttgtctttcagcaaggactggtctttctatctcttgtactacactgaattcacccccactgaaaaagatgagtatgcctgccgtgtgaaccatgtgactttgtcacagcccaagatagttaagtgggatcgagacatgtaagcagcatcatggaggtttgaagatgccgcatttggattggatgaattccaaattctgcttgcttgctttttaatattgatatgcttatacacttacactttatgcacaaaatgtagggttataataatgttaacatggacatgatcttctttataattctactttgagtgctgtctccatgtttgatgtatctgagcaggttgctccacaggtagctctaggagggctggcaacttagaggtggggagcagagaattctcttatccaacatcaacatcttggtcagatttgaactcttcaatctcttgcactcaaagcttgttaagatagttaagcgtgcataagttaacttccaatttacatactctgcttagaatttgggggaaaatttagaaatataattgacaggattattggaaatttgttataatgaatgaaacattttgtcatataagattcatatttacttcttatacatttgataaagtaaggcatggttgtggttaatctggtttatttttgttccacaagttaaataaatcataaaacttg

SEQ ID NO: 282 - protein, 55 aa, Homo sapiens
MSRSVAVLALLSLSGLERELKKWSIQTCLSARTGLSISCTTLNSPPLKKMSMPAV

SEQ ID NO: 283 - DNA, 939 bp, Homo sapiens
gggcattcctgaagctgacagcattcgggccgagatgtctcgctccgtggccttagctgtgctcgcgctactctctctttctggcctggaggctatccagcgtactccaaagattcaggtttactcacgtcatccagcagagaatggaaagtcaaatttcctgaattgctatgtgtctgggtttcatccatccgacattgaagttgacttactgaagaatggagagagaattgaaaaagtggagcattcagacttgtctttcagcaaggactggtctttctatctcttgtactacactgaattcacccccactgaaaaagatgagtatgcctgccgtgtgaaccatgtgactttgtcacagcccaagatagttaagtgggatcgagacatgtaagcagcatcatggaggtaagtttttgaccttgagaaaatgtttttgtttcactgtcctgaggactatttatagacagctctaacatgataaccctcactatgtggagaacattgacagagtaacattttagcagggaaagaagaatcctacagggtcatgttcccttctcctgtggagtggcatgaagaaggtgtatggccccaggtatggccatattactgaccctctacagagagggcaaaggaactgccagtatggtattgcaggataaaggcaggtggttacccacattacctgcaaggctttgatctttcttctgccatttccacattggacatctctgctgaggagagaaaatgaaccactcttttcctttgtataatgttgttttattcttcagacagaagagaggagttatacagctctgcagacatcccattcctgtatggggactgtgtttgcctcttagaggttcccaggccactagaggagataaagggaaacagattgttataacttgatataatgatactataatagatgta

SEQ ID NO: 284 - protein, 117 aa, Homo sapiens
MSRSVAVLALLSLSGLEAIQRTPKIQVYSRHPAENGKSNFLNCYVSGFHPSDIEVDLLKNGERIEKVEHSDLSFSKDWSFYLLYYTEFTPTEKDEYACRVNHVTLSQPKIVKWDRDM

SEQ ID NO: 285 - DNA, 946 bp, Homo sapiens
gggcattcctgaagctgacagcattcgggccgagatgtctcgctccgtggccttagctgtgctcgcgctactctctctttctggcctggaggctatccagcgtactccaaagattcaggtttactcacgtcatccagcagagaatggaaagtcaaatttcctgaattgctatgtgtctgggtttcatccatccgacattgaagttgacttactgaagaatggagagagaattgaaaaagtggagcattcagacttgtctttcagcaaggactggtctttctatctcttgtactacactgaattcacccccactgaaaaagatgagtatgcctgccgtgtgaaccatgtgactttgtcacagcccaagatagttaagtgggatcgagacatgtaagcagcatcatggaggtttgaagatgccgcatttggattggatgaattccaaattctgcttgcttgctttttaatattgatatgcttatacacttacactttatgcacaaaatgtagggttataataatgttaacatggacatgatcttctttataattctactttgagtgctgtctccatgtttgatgtatctgagcaggttgctccacaggtagctctaggagggctggcaacttagaggtggggagcagagaattctcttatccaacatcaacatcttggtcagatttgaactcttcaatctcttgcactcaaagcttgttaagatagttaagcgtgcataagttaacttccaatttacatactctgcttagaatttgggggaaaatttagaaatataattgacaggattattggaaatttgttataatgaatgaaacattttgtcatataagattcatatttacttcttatacatttgataaagtaaggcatggttgtggttaatctggtttatttttgttccacaagttaaataaatcataaaacttg

SEQ ID NO: 286 - protein, 117 aa, Homo sapiens; identical to SEQ ID NO: 284

SEQ ID NO: 287 - DNA, 97415 bp, Mus musculus
  misc_feature (1)...(97415): n = A,T,C or G
ctttagcaagcaagctcggggtgagtacgtgtggtccggtttccattggagggtatctccacctaactcttctggtatcctgccggtaaatattatgtcaaatgtatctgtctttcccaaagacagatacgacttttgagaaagagaattaacccatttacaagttgagaaagagaaatacttgacattcccttgattaacacaagcttcctccttccttgctgacagtaaaacagctaacagttcctttacgtctggtttttcgattgtgcctgatgtttgacattagtttaaaaatcaagccccatagcctgttcctattagctctcttaatggcctgtggtttgctacacaaaggccaagcattggaaataccttgtgtttctactctcttacaaattacatccctcctacatgtggtcctcctgctgtcctccacaaaattaaatttttgattaaggtctcatcctccctgtgttttggaagacacacaataagaagacctaagcccctggtgcaagtgaccttctaccgcctgcatgggagtgaggcagggagggtcaatttcccagttacataaataatacattctcagggagaaactttccagccagagttctgttttcctgcgtgtgtgtgtgtgtgtgtgtgtgtgtgtgtgtgtgtcttcttttttagactgaccttttgcttatttgcccactcaaggttgaacatttgcctggtgtcctgtggaatcatcagcagttaaacatttttttagagccatactggggagggagagcagctccagccagttgtccgacattccaggaacttttccactgaccttagactatggcctgctttttgcgtaaggctattatttcaacaaagggcaagtctggaaaaaaaagaaaataggtacaagataaccaacccacttggctctttgttaaagacttctgtcaaaggattctgtggacaagtttgaatcagtgatcagagtgaaggctttgttctaaatgcaaagtaaaatttgcacttcctgctgggtgtggtgacccaagcctcttatctcagcgtttaggaggtagaggcaggcagatctctgggagtttaaagacagcttggtttagcaagggtagcacgttccaagccagtcaggactacatagcgagtgcctctccccaaaaagatttatatttcctgcttggtatgtggtctcagataccccaaaataaactacctccccacccccatagaatagtaataacagtaacgctattttggacatctataatattcatcaacattgtacttcatcggaaggaatggtgagtcagtgcagaagctgtattgagatacacgagcacacacacaaacatgcacacacacacacatgcacacacacacacacacacacacacatgcacacacacacacacacacacacacacacgcatgcacacacacatgcacacacacgcatgcacacacacacatgcacacacatgtgcactgacatgcacacacactgaaggaaagtgattttctgctaccttagagcagtttttccaagctttatctctttaagaagattaggaccagtcaccagttgcttagttgcttaaatgtaacaagttaggaaaagctcatgctaagggctggtgaaaggcaggatgggaagactcaaatacttaatgagaatgaaagtcattgtgtactacagaacttctgagagtgatggccctagataaggagtgagagtagccagaaatgtcaacagtcatgatgccagcgcactgacagagcccacagtcatgatgtcaacagtcatgatgccaacagtcatgatgccagcgcactgatagagcccacagtcatgatgccaacagtcatgatgccagcgcactgatagagcccacagtcatgatgcccacagtcatgatgccagcgcactgatagagcccacagtcatgatgccaacagtcatgatgccagcgcactgatagagcccacagtcatgatgcccacagtcatgatgcccacagtcatgatgccagcgcactgatagagcccacagtcatgatgcccacagtcatgatgccagcgcactgatagagcccacagtcatgatgcccacagtcatgatgccagcgcactgatagagcccacagtcatgatgcccacagtcatgatgccagcgcactgatagagcccacagtcatgatgcccacagtcatgatgcacacagtcatgatgccagcgcactgatagagcccacagtcatgatgcccacagtcatgatgccagcgcactgatagagcccacagtcatgatgcccacagtcatgatgccagtgcactgatagagcccacagtcatgatgccagcgcactgatagagcccacagtcatgatgcccacagtcatgatgcccacagtcatgatgccagcgcactgatagagcccacagtcatgatgccagcagtcatgatgcccacagtcatgatgccagcgcactgatagagcccaacagtcatgatgcccacagtcatgatgccagcgcactgatagagcccacagtcatgatgccagcgcactgatagagcccacagtcatgatgccagcgcactgatagagcccacagtcatgatgcccacagtcatgatgcccacagtcatgatgccagcgcactgatagagcccacagtcatgatgccagcagtcatgatgcccacagtcatgatgccagcgcactgatagagcccacagtcatgatgccagcgcactgatagagcccacagtcatgatgccagcgcactgatagagcccacagtcatgatgccagcgcactgatagagcccacagtcatgatgccagcgcactgatagagcccacagtcatgatgccagcagtcatgatgcccacagtcatgatgccagcgcactgatagagcccaacagtcatgatgcccacagtcatgatgccagcgcactgatagagcccacagtcatgatgccagcgcactgatagagcccacagtcatgatgccagcgcactgatagagcccacagtcatgatgcccacagtcatgatgcccacagtcatgatgccagcgcactgatagagcccacagtcatgatgccagcagtcatgatgccagcgcactgatagagcccacagtcatgatgccagcgcactgatagagcccacagtcatgatgccagcgcactgatagagcccacagtcatgatgccagcgcactgatagagcccacagtcatgatgccagcgcactgatagagcccacaccacaggctttgaagaatactgggcattgtgttcccaaatcagggaaaacagtggggtttgacaagaatcaagtcagcaccatttttaataagtaagatattcctgaaggttcagtagcattttgaaacttgaaagggtaaagactagggataaagtatgctgtctataaattaagaacatccctgggggttcattcccacaatagaggaagacctgaagaagagacgatgtgccataaggttttctttcccaggattcagcttcctgatctattattgtgcatgaggggaggctgaagggtgagtgagtaccctcaacactgacctgcaactgtggactaaagtaaaccaaagagtataagttcatacagattgtagcataagcatcccacaacagacactgggatggtgatagtttaattgataaagaaccaaatataaggacttgagtttcagccccaaactctttgctttttttcctccttaaagaatgaaaactgggtgtgatggtgcatgtttgtaattccagagctagggaagcagagacaggtggatccctggggctcactagccagccagtctacctttatcagtgaattccaggccagcaggaaaatctgtccttaaaaagataaagtgggtagtgcctagggctgtcctctggcctacacacatgcccacttatgcatacacacttgcagccatacatgtacacacacatgtacacacatacacactacattactggtaatatctttgggaattctcaacttacaaacttagaggcagtgagcacagttagtacccagatcttgttttctgacaaatgactgatcctcacacaggagcagaaaataaacaagatgactctggaacatcttgtaactccataaaagtcaagaagtgttcaacaagaaggagttgggtatagaagtttgtgcctgtggtcccagggctcaggagctgagacaaggagtccttgtgtccatgagtttgtaaccaacccaggaaacatttagagactaaacaaaaatataaaacactcccaccaatgtcatgtagcacagaagtcagcttaaatagctcccatgggccaatggctagagctatttgtatattatgataaaatgacattggtttaaaataagagtataaaataaatatctgtgagtctgtaatgaaaaaaattaaatgactatatgcacaaatttatctcaaataatttaggtgaatgctgttccttccttcaaggaagtggaggatgatgccccattccttaagagtcagctgcccacagtgctgtcctttcagagaatataatcaggaaaaaggatgaagagaaagaaagaaagaaagaaagagagagagagagagagaggagggagggagggaggaagaagaccactttacagtaaaaaaaaaagccataaacgtcatctcgatcgggggtttaaagtcaatctcagccataatgaatctcagtgctaatatgcatcatttttatctttgtaatcttcctctctagtcctataactgtaggacagaagcagcagattctagctgaaggaatctgaacagtattgtttaaagatgtggaagtttgaaaaacggattctcaggggacccaataacttaaagtaactttaagagaattggttgctcttttcagaggacctagcttcaattcccaacacccacatactggctcacaactatctgtaattctagttccaggagatccaatgctttctggcaaccgtggtgggcaccagacatgccagcagtgcatgcctatccatgcaggcaaaccatctaaacacacacacacacacacacacacacacacacacacacacacacacacccacaccacacacactctcttcttcttcttcttcttcttcttcttcttcttcttcttcttcttcttcttcttcttcttcttcttcttcttcttcttcttcttcttctgtttgtttttcaagacagggtttctctgtatagccctggctgtcctggcaacacaggggcccttgtggtataggatgacaaaaaaagacaggggacaaagtctcctctctctttggaaaaatgcttcatatagaaaccacaatgtccatagcaagttctgggaagggctggacattaactatagtgacaggagataacagcaccttcagtgtagacagaggagccctctgcaccaggtgctgtccacgtgcagatgattgcactggggtagtcacaagatgaggaaagcagacattattcatggtagtttcaggggaggaatttcttaaggaaacaagaagcaaaacacaaggaagtagattatttagaactgtctctcagagtaatctgcagcgaatgcacaagaagcgctttgaaagcacctccaccatagtgggaagaagcttgaagaagggctaatgtctattaaacacaacaggcagagtctatctgcttctgtatgtgccagctagtacaagctcacttgacaaccacagtcagatagcttgaaaaggaagaatagagacaaatggtgtttgcctaagcttttgaagttgctactgtattaagtactgaaccaataacaaatactaaagaataatcagataacactgaactcttaaaactatcattttgaaataattgtagtgcacagaaatataaaagatactggaacaaggccctgcgattccttcacagtttcctccaatggtgccatctgacgagagcatatcatcaaaggcgggaaacggccaccggtgcgtccacatatttgttacttttatttgggtgggcatctgaagtttatacagtcttatcatgtgaagatctgtatgagtaccctctcccttcaaaccttaagaaggcttacctgtaaacacaaatgtgggttaaatgttaactaaccactgcatagcagaatagcttaaggcgagtgttcaaaggttactttctgtgtaaacataataatgaggggtgtgtctcttatcagataaacaagtttcagggggggatttcttaagcaaaccagaacaaaatcacaggggagaaattgtaagctaagttatttagaactatcttttcaaagtatacagtaatctgcagagattatcctctttggcctgaagaagacagaatagtatatataaagtgcttataccaaagtcatgtgtgtaaaatcattctgaaaacccagaatctttggttgaaattacgaaagaccaagtgtcttctatgttatttagagtctgggaatacctaaaatctagaacatgggcattaagaagcaaactgcattctaccctctgtcagttgttgttgctgttgtttttggtgtgtgtttgtgtgtgtgtgtgtgtgtgtgtgtgtgtgtgtgtgtgtgtgtgtgtgtatggcttacttatttactttttggtttttcaagtcagggtttctctgtgttttcctggctatcctgcatactattcactctgtagaccaggctggccttggactgggagatctgcctgactctgtctcctgagtgctgggattatagtgttaccatgccaggctgataggtttatttatttgatggatgctttatctgcatgtatgtatgtgcaccatgtgtgtgcctggtgccctcagaggtcagaagagggcatagaatactccactggaattagtgccagttatgaaccactgtgttggggcttggccctgtcctccagagcagcaagtgctcttaaccactgggccatctctccaccctcctctactttgtttttgagacaaggtctctgactgagcctggagctccaggatttggcttgatgaggccatcatgactgtaaaacagccgtctctctgactgagtcatctcccaggccctgtctactgttttgaatcagagtgacacacaaactcaaagggatcatcccataaagtctttgaatttaggacaaaggggcatggagaaggggatgtttcactttgtcttctgtttataaactgttttcagttctctaggtttctgttataaagctgggcttgtctaggaaataaagtacagttttgttaattttattcagggttatagtctttgaatcatagacttttttttttttttttttttggtttttcgagacagggtttctctttatagccctggctgtcttggaactcactttggagaccaggctggcctcgaactcagaaatctgcctgcctctgcctttcgagtgctgggattaaaggcttgcgccaccacgccctgctgaatcatagactttttacagtgacttggtatagataatgagtctcaggtcgacttcattagttttaaagagtgacaactgggtctggagggatagcccagtggttgacaacacttactgctcttgtagaggaccctagtttggttcttggcacctgagaacctcaggtggcctgtctctttagctgtagggaatctgatatcttcttttggcctctccacaagcacttcattcacatatgcacatactaacacatttaatatacgtaattaaaaaaaattgctgggcatgctgctgcacacttttaattccagcacttgggatctctgtgagttcaaggtcagactgcgctacaaagtgaattctaggacagttagagctgttacacagtcattattttaaaaaccttgtaaattggcatattggttttagaattaccttcatggtatttatcaaatttgatgtgcttataccctttgttctggaattctatctataatattatattccatagatgtaaccatatgtggtcatagctatgtgatgttttgtgtggcattgttaattattttgaatagctacaaataatttaggcatccactattttggaaaaaaacttaaataaaatatggcacattaaatcatgaagtactatggggtattaaaatgaagtaaattaaaatattgtaattaaaaatagttaaagtaggcaggcatatgtcaaagttcaaggccagcctggtctacagagtaagtttcaggacagccagggctacacagagatctcaaccctatcttgaaaaaccaagcaactaactaaaaacaaacacaaacaaacaaacagggaaatttattataaaatatacctcaaatacagcaatagaacactccatcggctgcttctctctcccttcctcttctctctcccttcctcttctctcctctcccttcttctcctgagtgagtgctgggattaaagtcatgtgctatcaccacctggtccgctgcttttctctgacattttattattactttatttttctgtgacctaggatggcctgaaacatactatgtagctcaaggtagccttaaactcaggtaggaattataggcacagttatgtgcctatataccaagttgctattttaaaatcccatgtggcaatgtagggtggaaatgtttctaaacttaatgtttagatttaacatacaaaatgttttttgacatcttcttgaaaaggggaactgaaatttctttaaaaatgaccttcctgaattgcaagctggttatactttttttttttttttttttaaagaagtgtctacttattttaaagtaggtaatcaggaaagagattgaagttgttacttcctttgaaatggtgtgggcagactttgaagacatggcttaaatggctcaaatttcaatgatctgtgaattgaaaaagcattccgttcgttcagaagtagatgtgctttgaaagagggggaacgtgtgttctcactagttatacacattatatgtactaaatagctgttttacgttttacgtgtaacttggttttgctcatactagaggaaagggttttggtgcaaacaaaacattttctggctgtgaaatttcggagatctctcgcgtacctgggaaaacattaatcctttccaatcaggctcccccagccccgccccgcggaaggatgaataaataaacttataaaatactggcattgtaatggccattaaatagctatgcaatgaaagtttcttttagtatttgattgttgggtagaaaagcactcagattaaaaccgtgtgaaagtgaagatggacttcagtcctgggcagtctcatctacttcatttctttcccaaccacacctatccgtccagtgcaggtctcggaggtcagggtctggcggacaggctaccgtcgctgctctcaggtccggaaagaccactgtccacccctgccccgtggacgtcgcgcgggtcccctgccgtgctgccagcagtgtcgcccgccagtagtaactctgctctgcttcaaaagttccctggggtccccaggcttttctagccagcaccgttcagggccctaagcctgagtcccgggagccggaaggcccgcgggcttgtaggagggcgagtcgcgaagcgggaagcacaaggcgcgcgttcccgcgaacgcaggcgcgacgctgggcggggggcgcgcacgcgcgcggaggcatgggcgggggtggtggtgtcggggcggggcaaagaggcgaaggcgggaagagggcgccctggagtccagccgagccccgggagggcgtcgacgccgagggggcggggccaggcgaggcgggaacgcgctcgcgggccgggagggcgggggcgcggcgctggcgagagcgtgcccggtccccgcccctgtttcccactcttccttccacctctgaccggccggagctgcggagcggctccgctcgctggtttcccggagccgccgcccgctttctccgcccgcggtgagcccgtcaatccccgcacaacgcgctcctccatctgggccatggatgggtaagtgccgggtggccgttccggggctgcgctggcctcgtttcctctcggcgacgcgtcccgccgaggccggggagcagggcgcgacgccggctagcggaggagcggcccggggctaagcccgacggcagggaccttgggagcgcgggggtctgtccgccgcggtctccgcttcctgcgcgcggcgcccccgtcacgtccgcccctcgcagcctcggggcgccttcgggaagcagagacgagccagggccggggtgccgggccggactccccacacttcctctcagaaaatggtgcgcggcgctggcgggggcggaggctgaggcggccgcggcgctcggggagttgctgtttaccggtggggtggggcgcgcggcggagctttcccccggcggcgggcccgggcgagcggcgacagccgtctgggcggcgaccgggtctcgaactgcgggcccgtgcgggtctcggaaccggcggggtctcccgatttgggctgtgagatacgttaaccacttctaaataccgagcgtctgcactttatcaccagggacgcttcctcttcgttccccacccccaagaaacttcgtgaattcgcctcgggcgatgtcagnnnnnnnnnnnnnnnnnnnngatgtcagatattgtgtaagtgtagatttccgggcgctttcaactgctcggtttaaatggggtctgtgactaaaagggggaaaaaaaaaagaaaaaagaaaaaaaaaaaaagatttacagtcaccttttccgagctcgtaatttctctgggaactctggaacatggggcaggacctgatgtattttaataaaaagcgtgaattgagggtcatatagtcaagattaaaaaaaaccaccaacaactccaagtcaattagaaattccaccttttatttatttaaacctttgccgtttgagttgttccttaaccccctcccccgccgacttttgttgacaaggattctataaactgcggaatggtggagcatataacttgtttgaaaagtaaaatacatttagtaacttgccgcgtagttgatcatacgtgtttaagtgaggacactagaattttacaatttttgccctcgttaggtttcgtttatcttaatttcacaatattgtgatatatggtttatctcatttgaatgcagattgcacactgctgcagatatcaaagtgcaattttagattttgatttatggttgtgatgctctttaaagtatttttatttaatgggagctactttgcgagcgaacgcttcaccttgagcattggcttctcattacccgactctgattcattttacgtgtgaaataactttcagtgatttatgccataagtgccattatatcagttcaggaagggctatgaagtgttcgtcttcagaaggttcaacttcgggtgtggggaaacaagttagctttttgtgtggtgagatttaaagggcttgactgttcgcttcttcactgtgaagtgcaagctcctcccccacagcgcaatggtggggggcaagggtgactaggaatagtcacccttattcagcatctacggtttatctgatccagaacagagaatccataggcttttagtgagcatttgctacttactacatcttgttaaaaattacctttttagttggcttacaaagtaacaggttttaaaatgtttcacatagacacacacacaccacctcattcattctgctcatacttctctgccctagccttcccaaactgacttgttgatagtttttaagaactttgccttgcttgtggaattaaagctaagaagccggtgatgcagacggaggcattcaaatggggaaatgttgttttgtacatcaggaccagcaaagatactattacacactcgtaaaaagtctagtgtatcagctatttatcaggcttacgtttcagagaaatgaatacaagtttcaggactccacaaggaaaaaaaggaatggttattgtttaaaacagtgaagtttataccacttgatgcaaaggcaagtttacatacctttaggaaattatgactctattgattagtaacgtaatacagaactgatgtgtagctttcttttaggaaatatggagctaaactgctaactgaagctatagaagaggccagttttggtatagctgcataggagttttcacacattatcttatagagtgtcgcttttaatatagtgacctatgccccaggcaagcttattaaatttcattttcccacagcttgcaaaaagcccatttcctttattctgagtagttaaaaaacaaaaacaaaaaaaacaaagcatactagccaacatatttttagttcctcctcgaatcccagctctctgcctccccccccccatccctgtgtgtgtgtgttcatgtatgttcttgtgtgtttgtgtgttcgttcatgttcatttctaccatggttttttgtattcagaacagtattgatggataacatttttaaaatagtaaatctgaatggtgtgtacaaactgatgcttgtagttattagcctgggagacagtcatgcttttgtgaggctttcgggtgatatgaagctgacttacaagatgctttttgtggctgtaaagttcaagcccaggttctgttttaccgaggcttcagggtgtgatcactcctgtcaatgatttaaaagaatgaactttgatgatttcagtttcggtttggacttgtcaaagtgagataaacacatgcttattgtattgaagcacaactgttctttcctacacactagagagtaatttgtttcttgcgttgatgttgaggctttgcttttgaactctgctgttgctacactgtctgttgttgttttttttttctttattaacatttcacagttcattttttcattatttgttattataatgctttttctttttctttaatcttatctgtcttttaaaacttgttctctaactttgttttccattttctctttttactttttccatacagtgttgttacagatcttatagcagtcggtttaaaggtaggaatcttttactatcctttcatagtttttatattttaattttgacatttccccaccagtggtgaaatgatttcacctgttcacaaaattgtcttttgttctgtgtggtaatagtcttttacttttaactccaaaataagtaggcttgtggctaattttggattttatgtaccttttaggagaaactatagtattatgtatggaaaattgaaaccacccaaagtattacttaacagaattgggaagggggagattggctttgtttttgtagttaaaataatcataggccctgatattttttttaaaatcttcttttgttgctgcacttatgaataataaaataacaatagctgattttttttgactgccaactatgtgccatgtgttttacctgtatgcgcactaatcattatcacatcccttcaagatgggtaattactagtcttattttagagatgaaaaagcaggttgagaaagtttgtccaaggtgttcaaatgcttgtcttcctgttcagttttcaaagacttacccctttgttgttgttgttgttgttacaccttgttgctagcagttaagtctctatctaaaacgtgactatctagagaactcaatatgtctcaatatgttgtagtaatgatttttccaagtttcaagtctttagttacaccagaattttctcattattggattacaaaatacaaatcaagaaaacagtactcctcagtcagtatgagggtttaaaactataatttgtctttgggttggagagatggttccgcagtacgtacttactgctcttgcagacaaccagggttctgttcccaggaggtatacggtgactcacaactacctgtaccttcagttgcaaggggtcagatgcattgttctgacctctgagttcacatacatagtcaggcatgtacacatacatgaaatttaaagacaaataaaataaaataataagataactgtcataaagttttcttcgatatttgatactgatttgggaatctagttcaataggccacatagtgcagattactggagaaagaagaacaaaatctttacctttgcatctattttaaataagctaggtttatttatatagtgtgatggctttctagtctgtcagagttagcacacatcccaccatggctccctagctctgttttgttagtcagttctgtttgtttgtgtatacttacaggatgtgatggtagtgcttgtattctatgatttcttaagaaataggcataaggagaagttagagaatggggtgtctaagactagcacagttgagaactatcttttgaggttaggtagagttggcctgttttggcaagctctgaatatgtttatgagtaggaaattaatagaggcagccttttctggaactgcctcctcccgtatgtcatcagtttctcgcttaagaataatatgcagagattagaaattcaggcctcaactgtgtctctgaggtgcctgtggaagaagggatatttaagtgaattgttttggtctttaaagatgtgttttgtgattctggctttttatctggccagaaataaatacagcagacatttaaaaaagataccactttaaggttaaagaattatgcttattttattatggtgaaaactcatccataataaatgaaagaaatttaaatgttatgcttaggaaccagatatgaatatttaagattggattttctgtttgtatcttttgaagtaaccattttgaaagcaacagctctgaagagatgataagctgattagttaattcaataggcagcctatattaatatatttatgcatgttataaaaatgtatactatacatctattcagcatctatatattgaaatactagaattgtgctttaaaatattcaatgtactttctggcaagattgttctttctttgatctcaccaaggaaatttagttattaccaaataatgagtcagtaagactttcatttcattcagaatatatgaaaaataagtcaatatttgttttctttgtttggtgtttgaataatacaacacaattaatggttttaattagcaagaatggaatttaggcagtgttccctaattttgcttcgtggattaaaaaggtatttatttaaaattagttaaaatttattttatgtgtatgagtgtttttcctgcatatatgttaggtgtatgttacatgtgtgtctggtgtttatggaggtcataagagggcaatctggaactgtagctaaggatggttgtgagctactgtatgggagctggaatctgaacctgagatatctgtaagagcaggaagtgctctctctagtcctaaaaattagattatttagattttgcaaaagataatttaaaatacttgtaaatataaaagtaattattttaacaaagggaaactaagttgcttttaaagtgttttataacgtcacaaaagacatttgtgaggctttctttactattgtttctagtgtctgataattataaatgtttgaatgaatgaatgatgtggaacacatactggaatccaagctttctgatactgctggtattctaatcggcattaacttagtgagaaagaagtccttatttagattggaatgtattgaagacatgtatacattttcaggtgttttcggattcatatcatgatatgtaccttgaatgttctttgtggggtattattattgtttttttgggggagctgttgagacatggtttctctgtgtagtcttggctgtcctggaactccctctgtagaccaggctggccttgaatttggacatctgcctgcctctgtctctccaagtgctgggattgaagtcatgaaccatcattgcctggcttagggaattaatttaaaaaaaattatctatttattttatgtatatgagtgctctttctgcatgtacatctgcatgccagaagagggcatcagatcacattatagctggttgtgagctactgtgtggttgctggaatgtgaactcagggcttctggaagagtagccagtgctcttaaccactgagccatctctccagcccagagtattattttttaaacattgcccaaattaaaagattagcttttggaactcattgtgaaataattttttttttttgggttgttgagacggtcttgttaggttaaccaaactggacttaaacttgcttcagtctcccaatgtctagggtggtatgcactactatgactggctatctgtatatgtatattatatgtctatacaaaatacacacacacacataaatatatcattgactcattgagaaacaatgatcagtgagtcctttaaatgaagacacaatctggtgatgaagagtgctatggcattcattttcgggatttaatatgccacataaatcagtgacagcattgtaggcaatggccttttctgagagccaaagtgcattttaaacttccagcttgcgcattcagtagtattagctgactactactcaaaaatctcaaagccacattttgtatattcctgtttattttggtctttcataactgtcacagtcttttctatttttagtgagtagttgagtataggaaaacacgtgtttaggaaggacagtaattgacttccaataattgccatgactgctatgtagaaaagaacagtagagcatatcaaaattacttttgaaggtcagttttctccatgctagaccttgggggttaactcagcagcccatgggcacacctggcttgccacctgcttctgtaagtagttttattgggacgtagccatgcttatttgtttcaatattgtctgtggttattttcacattatattaacagctgaatagtggtctcagtctgcaaagcataatgtattgacctcatggtcatttacagaaaacctttgcttaccgttatgcttcactgttggaaatgtggaagacagtggcaacagtgttcttttgttttgttttgtttttagatgaaatgttatttatctagagtgcaattcaataaagtttgacaaattttaacactctaatcaaaacaatacaatgctgctccataaagattcctgttatctctttccagataaagtctaggcaactgttctgattttcagtaagagattagttttacctgcacctcatatgacagaaccatagaatataagctctcctgtatggctgttgcacttagcaaaatgaattttgttatgttgctgttgcatagtagttcatccttttatttctgttttttgttttttgtttttgttggtttttcgagacagggtttctctgtatagccctggctgtcctggaactcactttgtagatcaggctggccgcgaactcagaaatcctcctgcctctgcctcccgagtgctgggattaaaggcgtgcgccaccatgcccggcttatttctgttttttttattgtgtcttaaaatctgttctcatgttgatgggcatttgaattttctttccagcttgggaatattacaaataaagcttctgtgtgtgtgtgcgcgcgcctgcgtgtgtgcatgtgagtgtgtgtgtgtgtgtgtgtgtgtgtgtgtgtgtaagtctttattttatttatagatgagtgctctctctgtttgcatttatgtctgcatggcagaagaaggcatcagatcccattacagatggttgtgagccaccatgtggttgctgggaattggactcaggacctctggaagagcagccagtgctcttaaccacttagccacttctctatccctgtgtataagtctttagtatactgttgtatatctatcttctaagcctaggagtagaagtgcaggataataggacatacagacttatcagaaactgttcagtattgtttggatcttgaatgttcctcagagatctgtatgttaaaggctcactctgcagggtagcattttggggaattaatagaaccttttattttattttattttattttatttcatttcatttcatttcatttcattttgttggtttttcgagacagggtttctctgtgtagccttcgctgtcctggaactcactttgtagaccaggctggcctcgaactcagaaatccgcctgcctctgcctcctgagtgctgggattaggtttagtttcctgtgaaggttttagttttccatgagattgtggggtgttgtctcttcattctttccctttgttctttgaactttaggtaaactatttgtctatcattcacacactgctgtttctacctggccctcttacagcagttttatctgtttgattttggactggaacccccagagctatgagctgaacaaactcttctcttgtaagttaattgtctcaagtatttcattataatgatgaagagcctaccttgagctgttgaaccgttttctaaaatgtatgcactttacacaatctgctttatattctagctcacatctgtggtcatattaccttgaatatgcctgatctcccaatctcatctatattagaactcaggttgttttctaccctttgcaaggcttggttctgttctactttacttttaggtatctaaaggatgtaactagtatcagtaatattttattgtatttgcaacattgttactgatttgatgactgttacttatatttattaggattcttctgtgtactatctagctgttcacttttgggggaattttgtgatgtccctttgttgttttgttttgttttgtcttgagacagggtttctttgtgtaaccctttagaattcactcagtagaccagactggcctcagacccagagatctaccagcctctgcctcctgagtgctgggattaaaggcgtacaccaccactctctggccttttaacactatcctttattctagtgtagtatctcctctcttaacaaatatatccagtggctctcaacctgtctaaggctgtgaccttttaatacagttcctcatgttgtagtgacccccaaccataaagttattttcattgctacttcataactctaattttgctattgttttgaattgtaatgtaaacattagtgttttccgttggtcttaggcaactcctgtgaaagggtagtttacctctaaaggggtttcaacaacaggttgagaaccactgtcctagagttgcagacagttgtgaggtaccatatgggtactgggagttgaacctcagagcaacaactgctcaatccctgaatttttccaggccatctgttaagtctatatttttcttctttccctccctccctccccttcttcctctctcccttatatcctggccacccttaaatctcggtctctctccctctttctccctctctcccccccccccccccttttctttcttttccttggagacagcccttgtcttggaattagctctgtagaccaggctgacctctgcctgtccctgcctccggagtgttgtgattaaaggtatacaccacaaccacccacctctttagtgtttcttaaagacaaaaatcgaattttttaaaaaattaacatttatgtacttacttatgtaattgtgtgtgcataggccacagcatgtgagtggaggtcagaaagcatcttgccagaattggtctcaccttcctctcttgtgagtacagaggaccaaactctaggttgtcaagcttagtaaccagtacctttcccactgaccagtttcatcagcccccaaaaagcagctgcttggtttgcttttgttgttgtttttgagacaaggtctctgtgtaaccttggctgtcctggaactcacttgtttttcctttttttgggggggtgggggggttcgagaacagggtttctctgtgtagccctggctgtcctggaactctttgtagaccaggctggcctccaactcagaagtctgcttgcttctgcctctcaagtgttgaaattatgacaagcaccttcacaccccacagattccgatgatcttttaattgatgtaagtagactgaccaatcacagaactgtagtctaatgaatatattagttacttttcttgttgctgtgaccttaaggaagagaggaaggtttacactggtgcatagtttgagagtacagaagaccatcattgtgggaaaggcatggaggcaggagcttgaggtcagttcacattgtcaggaagcagaaaggtaaatgttggtactcagctggctttcttctttttctcttttcttcattctgggatcccagtacctgagatgattccactataatcaggatattttctccacctcagttaaacttctggacacaccctcctgcacacactaaaagcgtgtattctagatgctttcaaatccagacagattgagggtgcacatcagtcccttctatgttagttgaacatgtaactgattcaagttttctcactcagcacattaattagttcttattttgtaaacattttctttgtaagttgccttgtagttaacatatccagttataactcataagtacagcatccaaaatcactatattgcttcatgtgtactgtaggtacaataaaacagcagtctcagttcttttctgtcatttatgacctcactaaccttcatttttcttaagcatatgcattatcctgtactttagagctgttattatagcacaattatattgaaaatgttttatgtgtgcatgtctgagagtgagtttgtgcccctgtggagatcagaagaaggtggtggatcccatggaactggaattacaggctgttgtgagttgccctgtgtatactgggaacagaactcaggttctctgcaaaagaaatgaacattcgtaatcattgagccatcttcccacccctgatagctcaattaaattaaatgattttaatttacctttatttatggatttccttcatatagatccaagttcctgttcagtaaccagaatgaacttctgtttcctcagataacttcttttaccttttcttacagacatcctactaacagtggagtctcttagttttggtacatcaaatcatactgggttgtgtggaggcaatgttggggattgaatttagagggccttggatattctgtagataaactatgtatacctccagcacctggcatatttagttcctttactgtgaaaggtactatctgtactaaaaatttggcattggctctttcctccctttctctaacaccttaagtgtttcagtctttttgttaatgcttttgatgagaccttgtaattgttattcttaatgctttgtgtgtatagacctagtacacttatttctccttcctcagaggttttctttgtctagttttctatagtttgaacaacatgctgaagtataagtttaattttggtttttatctacattggtaatctcttagcttcctggagctgtaatttgtagtttgatataaatcactaattatggaaaattgcaagtctttgttcctttttttctttccatttctctccccacctctctctctctctgtgtgtgtgtgtctgtttgtctgcctttctcagtcttgttacattacatattatgcctcaaaatggctcttggctctttctattttagtttcccctgtagctgggcatatagaatgcactagggagccctattgttaaccttttctcgttgttacattttaaacactactttaaaattttttgaggttaaattatatcactgtttcctcccttttgccccttccatgtatccccattatatatatatgtatgtatatatatatatatacacacacacatatactattttttccccttttgaacatatttttggcttttgtctctgttacttatttgaaattgtcacacattattggatgttttggggttttgttgtttattttcactcagcatttcagtttgggaagtttctactgaaatccttttctttacccctctgcagtactggggctgggtgtatattctaggactgagcttctacctacagcccctattgaaataccttcaagtttattgattttttttcttcagtaatatctagtctattaatgaacccatcacagatttaattttttgttacatttgtgtctgtgtatatacaccatggcatctagtttataaaggtttttgtcctagctggacatgatggtgtgtgcctttaatttcagcactgagaaggcaaaaggcaggtaagaaaccctgtttcaaaaacaaacaaaaaaaacccaaggactttttaaaagacgtatttatttattttatgtatatgagtacactgtagctgtcttcagacacaccagaagagggcattggattccattacagatggttgtgagacaccatgtagttgctgggaattgaactcaggacctctggaaaggcaggcagtgctcttaactgctgagccatctctccagcccccccaaaacttttatcctgcatgattctgttcaggggtttaatgcttgtctgtgtttatattatttacctcttaaagtgacttttacttagtgaaaagccagataccatatatcagaacagaaatttagaggcaaaaggtcatttttggataggttctatgctaatctgtctaggtgttgggttgggttgggtttggtatgtgctttagtgcccaaagcttcagtttccccattgttcttatttgagtcctttctttagaaaatgaccctgcagctctttcagctgtaatccattgttgttaacagtggagccctgtgacatgtaagattttgagaaaggatgcattctgtatgtccttacagttcagcttttaatggacatatgtccttgttctgtgctgtcttaaattccccacaccccctaggtgagccaggaaggctagccgggggtagagtttgaggaaatgctcttctttggatagagttaagtagtttacacattagtgtaggagtgcattagtcaggggtctctaacggaacaacggatagaatatatatatataaatatatatatataaataagcatatatatgaattatcagttggtttacagatatggactgggtagtccaacaatggctgtagcatgacagaaaggtggagaatctgatatttgtttagtccagaaggctaggtgtccctgtgatctcaatctggtacttggtattgggggtagggtggtgtggattcctagagagctattagttttcattctatgttggatttaatactgggcatagaaacaggatagatgaatttgtcagtgagggcaagcactcagaagaaaactgctctggcccagttaccatagttcttcctgtttcagatctgattaagaaaaatccctcacaggagagcccaacagcttgattttttttttttttttttgataaatattctagagctgggtgtggtgacacatgcctttttaatcctagcacttgggaggcagaggcaggagaatccaggcaggagaatctctttgagtttagggccagtcttgtgtacatggagtttcaagacagttaagattacatggtgaaacccagaatttaaaaacaaaaaacagggctggcgagatggctcagcgggtgagagtactgactgctcttccgaaggtcctgagttcaaaacccagcaaccacatggtggctcacaaccatccgtaatgagatctgatgccttcttctgatgcatctgaagacagctacagtgtacttatttataataataaataaatctttgggccggactgagcagggttgacaggagcgagcagaggtactaaattcaatttccaacaaccacatgaaggctcacaaccatctgtacagctacagtgtacccatatacataaaaataaataaataaatcttaaaaaaataaaaacaaaagctgtgtattctggggatataaaggaagatttttctcacttgttgttgaaagaaatttctaggctgaattattggacaccgttgtttgaaatgaatttaccacatatgagttgggatatttctgcttgatttatgccttcttacgttattatcacatgtacctaataataacaagaatgtaatatatcccgaaaccatgtggagtagttctctaaatggttatttatcaaaactgcttcagctgttctagaacatttacatttcattttaaaatttacattgagcttacttctacaaatggtgtcaaactacctggatagccaccacatagaaacaaatgtatctgaactgtgtacaggggaatttgaggctcattttagccataaaactaatgatatatatatcatatatcggcatgcactaatgtaaatttcattttgttttaaattatacatttaagtgacaattacaagaatagtacaaatagtgtatataccctttacccatttagttaatttaaaacaatttattactagggtgtgtatgttgaggtcagaggacagcgttgttgggtcagttgccctcctctacccttacaggggttccagggatggcactcaggtgtcaggcttgcatcactgggtggtgctcatctttacttgcctagccacctcaccagacccctttgagtgaacatttccatttgtttctctttccctcattcgcatctgtttctctcttaaatgtcttaaggtgattgctggtcttttcagctataaagccacataacttttcttttatagtcagtagtttagaggttgttttgttttgtaatagtttattcctcccagctatcccagctgtgagctgagccaggaagctctaagtgctccttaccgctcttacgtcctgagtgtgctccctcttgtcgatcactgccaccccccaaccccctaaattttattttcagaaaagctttctataagttgctgaaactggttttgaagtttcacatttttaaaaaaagatttatttatttattatatgtgagtacactgtagctgtcttcagacactccggaagagggcgttagatcttgttacggatggttgtgagccaccatgtggttgctgggatttgaactcaggacttccggaagagtagtcagtgctcttaacccctgagccatctcaccagcccgaagtttcacatttttgactaatattttcattatttcaaaatacctaacagtttcctgtttttctaattttctctttgacccatggattatttagtactttaaaatttttttgttactatttctaattcatttcttctctttctcttcctcgtttcctcctttcttcttgccttgtcttttttcctttccactgtttagctccagtagccgggagtacaatcctcttgttttactgtcctgagtgcaggccttttagcattgtaaccttttcattgctaacttgttctcagaaaaatagtcttagtagattcctttgggtgaaattgagacttccttaaactaatacaggaattagcaaactagggctgaagggctaactactcacggtcattgtttttatatcttataagctaaaaccgtctttctatatgtgagtgttaaaaaataagattagtatttcatgacaggtgagaagtagatgacttctaaatttggtgtctacgttgtactggaatagagtggctcatttctgtgttgttttttgttcatgcagcagtgtaagctgaatagttggctcaaaactcttactatctggccctttacagataagcttaccaaactgatacagtatctgtggtatgcagcccctctttgtgcatgtgagataaatgctttaccacttagttataactgaatcccaaaatgtctgctataaatattattcctagctgtgtgtctgggtctccatttcagtatatctgttagcacaggttactgattctcacttgtttcctcttgtcatatttttgtatgtttagtttcttagtttctaagagggatttattaaaaatttagattatactatagaaaagagtgagttttaaataaatgaaggtttgatttgactgaaggtcagactggaaacttagcagtcccactacatgctcaatgaaaacaggaacactttataattttcttttttttttttttttagcatcacagaacatttaattgcacatttaattcacatccatcatcagacactgaggtcatattgacttccactggtcagcaggcggctcttccaccagtggctcccaaggcttccactgcaacattttcctttccagacttagttctttttcagcctgaagaatcacctcttctacttcacccttaacatcttggttctgctttgaccacatccagcttctcattggtgatctgttctgtgtattttctatcggctgcatgtttaggaaggtgtttcagaagatcaagaatctttatatacaatattgtcaacctctcatgtggagtgtcgcacacccaatactttataattttcttaagaaagtaattttaacccagcgctgcagtcaaatgaccttttgtataagtagaattctcacatatgcatgggcctagaagccttaccttgtttttagttatttagggatacatttaagcaaaacagaaaagtaaactaagaactcagggaaaaggttttaaaaaagcattgagccatcccagcagagcagggaaaagactttgctaggcagttgtctagaatggttagaaagcagtaattctagatttgaacaaggatatcttggtgggatgaataccatcatggaaagcttgaaataaaagttgttatgatataggacaagagtataagcaaaaccaaaactaaggtcattagagatgtcatggaaatctaaacaaacagggtaaggaaattatggttgttaagttagactgacatggtgttatgatattaactaggactgtaataatgcatttgatcttaaatccagaaataattttgtcttcaagtaactataaggttatgacactggacgatagaatagaaaatgaactgtatcaggaatacgatttcttaataataattacatagtttaaaaagtgctgtttcttgattttcaactttgagtcagcctttagtcaccacaggaatggacagagcctgtaattgcctagcagaatgtgacaattataataataaaaggggtggaagaggcagggagattattacctctaacagttttgtttttcacagaatcaagacgtaatgctgaattgacaaataaacaataaagatgcactattaaagctcaaaagtggtcaggtgtggtagtgcacacctgttttctcagaattcctgaggcagaggcaggacgattgctaatgtcttagttagggttttattgctgtgaagggacaacatgatcaaggcaactttttttgtttgtttgtttgttttaagatgtatttattttatatgtgggagtacactgtagctgttttcagacacttgaagagggcattggatcccattacagatggttgtcagccaccgtgtggtccctggagagtaaacacaggacctctggaagagtagtcagtgctcttaactgctgagctatctctccaagcccccaaggcaactcttacaaagggaaacatttaattggggctgatttacaatttcagaggtttagttcattatcactatggtggaaagcacggcagtgtgcaggcagatggtgctggtgcagccaatagctctaaatcttgtttagaaggcagcagaaagggacagtatcacattggccagacttgagcatatatatgagacctcaaagtcctgccaccacagtgacctacttcctctaacaaggctaccacacctcctccaataaagccacaccttctactagcaccatttctcattgggccaagcatattcaaactaccacagacagtttgagaattaacatcctgtatagaaagttcctcagcatgacctcatctcaaaaagtctattccatgaagcacctgaagactttccaaatattagggaagacatggctatccagatctaataggctcaaaggattttatagatttgatcctttttaaagatgctctccaaggcttatagtgagtccatcaaaagaagtagataaaggaaattctaaaaatagtaagaaaaaaggtgtcaggttagtttgcatatagcttagtggtagagcacttggctggcttgtataaagttttgatacaagtgccatggggcaagagggggagccagaagaaaatcataatgggaagttctattaaactcacaacggatgtctctggagaaaccatatagaaaagaatcaaatggatatgatatattcaaagtcctgaggtgggtgcggaggagcaactaagattactgtacccactagagttactctttagaattgaagaagacatactttccaagacaacaaaagccaaggggatttgctgccactagattagctgtaataaatgaaaatttaagaaatatgaaactcaaaaaaatcagtcttttagagaaaaccaaaaaataaccaaaagtattttaacaaaatagcaagaccatgttttattagtaataaccttgaatatgaggattcttcagctaaaagatataaactgaaaaaaaaaaatgaaatcatgtgggaccagttggtatgctgctgtgagaaacccagttcactagtgcagtcacaaaaactaaaagtgaaaggatcaaagaagagactcttcacaagcaaactccaaaagtgagtagagaatgcacacattaaactaataaccgaagacacaggttactctataaaggtgaagggctagtttagcacgctagaattatagttataaatatgtatttatgggccagagagatggcttagggattaggagcactgactgcccttctagaggtcctgagttcacttcccagcaacccaaccacatagtagctcacaaccatctgtaatggaatccaatgcccccttctggtgtgtgtgaagacagctacagggtactcacatatataaaataaataaataaatcttttttaaaaaccagtatttatttaattctggggccactcctttatgtaaagcagacaatactagttataaaggctctaatacagtgtcatttgggacttcatcccaaattcattttaatgagcagatcatctagaaagaaatcaccagggaagcatcagagataaggcatactacagaacaagtgggtctgacagacatttaagtaacatgctgcccagcaggtgtagaatgtgtattcttctgcatgtgcttatagtcagaggctacaagacaaatctaaaagatcgaagaacttgacatgagagtttgctttctctgaatacaatgagaaaagtaaagccaagagaactttagaaatagtagaagtaagctggagagtgatggtgcatgcctttcatcctagcacttagaaggcaaagataggcatagctctgagttcaaggtcagcctggtctagagagtgagttctagatcaagactatgctgtgaaaccctagtcccttggaaaactcacatgtctaaaatatttatgacttctaacagcaaaactacagttatgaaatagcaaggaaaataattttatgagggtcatcatagcacgatgaactgtattaaaagttcacagcaattggaaagttgaaaaccactgcactgaattacttaagcaaggacatttttggggtgtgtgtgtgtgtgtgtgtgtgtgtgtgtgtgtgtgtgtggttttaacatagagtacatgaaaaaagttgtaagttctgtgaaggaagttataaaggagagcaatcagtagggctagaccagggccaaggagataaaagctcagtacagcaggggacaagatccagggccctggctaggaatggcagaggagggaaaagggaaaatacgattaggtgtatcttctaggcaactgatgatacagatgcaatatggtatcactgcataatagtactttatttctgtttatggaacaaattactaagagcaggacaaatgaaatttttattctggaaagtttcacaaaagattgttagtccatctgctagaaattttgttttgattttgtacttgggtatttatttcaatatttcatgagtatgttcatttaaagaaagaatcctagagatttaagactttttagatagtttgtttccctgatggtcttgataggtaaaagaaatgataccttatcctaaaatttcatgtgcatgttatatctgatctgaatttaggtttttggtttagtttcaaaatcttaaattttacttcagtggctttcctcgattgacatattgtcttttaatcacattaatattctttcttgaattgcaaataaaaccagttcccatcaaatttgataaacaaacatttgtactgcttaataacagtattcctttgctttgttggccctgtatatttagtttgtcagtcagagggagcttcaataattgatgcttgaagcaaatgaagctgatttatgtgttgacatcgtcagagagctaacaagtccacaggaaattgctggacttatgtaaactgaccatgtgtttctaaggagactgttgatgcagtcttaacctcccttccacacttgccacatgatgtctcatttttcattctgttaagacctccttggcaatgctgttaattgtttacccatgatgcactctttatcctcctgctaagcatccttgttgtctttgaggagagaactggctcccttgcacacatatgtcacataaagtagtgataacacaagagtgtttcctttgtgatcaacctcttaatatttgagattactttgttctgtgggacagtagtttatgtttttaataaacaattgcatgtatttttaaagatttattctgtaattgatgacacttggttgttttcagctgctctagtttgaatagtgttctgggaatatccttatgtctaattatatataagtcagcatatcttgggtgtgtacatagcagtaggtcacagggatcttttagatattcatatatttgactttcattggttgaatagcattacaagttgtaccaatgtatatttccattaaatcacatccagctaagtcccatgtaattctaagagtttttttgctctgccttgactgatgctccattctactacttttcttcacatgatggtattctgttagggaattaacttatatgtccaaataaccagtaagagtaaacttgttttcctatgttgatcactatgttagaaaaatgtttcttgtttatttacagtgattgggctttagagtaaagacttcctcttgtgtggggcatatgcttgttatagagtgaaagcaaagagaataaaaccaacaaaacggctatcctatgcttttttggttaaatgtttttgtgttcatgctccagaggccaaagcctatcacaaaactatgctcaatgccagtgaggcagaaaggtgctctcccaagccaggcattggaagtcatggggccgtgcatggaagagggtgatcctttcactagaaaggacaaagtgcaggtgctacacagtgctcacagtctattgccacttgacgggatgctgctcactttcttccatttgtacctcattctcatttcttgtgttttgctcttttacattttttttaagatttatttatttattatatgtaagtacactgtagctgttttcagacaatccagaagagggagttagatctcgttacagatggttgtgagccaccatgtggttgctgggatatgaactccggaccttcggaagagcagttgggtgctcttacccactgagccatctcaccagcccctcttttatatttttaaaaaggtttttaaaaggtttttaaggttataaatgctttgttgattatacacacaaacaaccatattttctttcacttgttcttttactctaaatacaaaactttgaagtgtgtatcagatgttaagaattttagaattctctaacaggctgggcccaaccactagtcctaattgtgttagtgaaagaaatgaataattgtgaaaagcagagaaaggaaatttaactaacttgcactaggaagagaaacataaagaagagacccctgtccttgtccatctaaaataggtttagatagaggcagcatggaagtgggtgggtactgcagatctaggtgtcgtctgtctgtccattgttgcttttctggttctgcatggtgatcagaaggagttcttacaactctaggggacaagctgcttctcggatgagtcatgctctagagtgctgccttcccattagggacagttaccctcatttggtcatagtttgttgtgggaggttttgttgtttctggggtccttggtgactgcaggtttaggacattggagacctttcaatattttgtggggatctggaataggacattatgaaaagctgacaataaggtacctcaggtacttttatatttgttccttgcaccttgaagtgaaataaagaggttagttaggtattacctttttgctaggtagtgattaacattcctaggtgcagaattaaggcatatagttgcaaagtgagaggagcgataccaggattttagttagttaccttgtgggcccaagtgaagagttggtcattttttggtttgttttggtttttatttttttgttttgtttttgttttaaagcaaagtcaggttttaagagccttttaccaaaccagctgtattttggcatgaaacatattaatactaaagacacatatatagagaggatatatctattagcaaaaaaccattaaattccttactttaaaaccatgttggatattagattatatacacacattacatatacatgtatatatgtgtgtatatgtatgtgtatataatatataatactatataatatatacatacatacatacatacacacacacacatatatacatatgcactactgatctaggtatcctttctgttcatcgtttcttttctggttctgcatggtggtcagaaggagttcttacatctctagggaacaatatatatatatttattcctccccgtcccacaagacaagatttctatatgttcttgaactccctccatagaccaggctctgaccttaaactcagagatctgcctgactgcatcccaagtgctgggattaaaggcctgtgacactaccacctgacaaattactaccatatttaaaactcaaaaaccttaactttatctgcaggtagacaacaagctacaaagtttgttcatgatcagatcagaaatcacagtaatacttttatatcagaaattaggaatttctgtgctttaactatcctggtcttttaggcgagttggaatttgaaatttttctttcatcctggttggttaattcctttattttttagtggtgttttgttaaacttaagtaaaagaaccgagggtagtaatttctggatgcttaaaacatttttgtttaaataattgtttttgtagtaatgcagacattttggaagttagtccttccacaggagccaaaatgtttgtagtaggagctggagagctacctcagtatctttaaggaaaaccaaagtttcattcctagcacccacagtgagcagctcacgacaacctgtaactctgtttccaggggatccaacacctccttcagacctctgtggttccccagcccccacaacatacatttacacaagaaaacacataagtttagaatgaaaataaagtatttgttatgttattctaaaatttatatagttatttgaagattgttttattacccaatgaaccaaaatacttatatttttttgattcaccaggatgaacaaaattgatcgatttgaagtacattggttttgccttttatttcatatttattacccttttataaccttggttatctatattaggcttttaatgaaaaggcttatctgatgcattttagcattgagtattcagatgttcaagtaggacagaactcttgtttgaacaggtctggtggctcatcctgcagtccctgtactcagaaggctgaggcaagaacatagattaccactcagtcatggctatgtactaagactctcatctcagaaaagccgaggtgtaagactggagctgagtcatgtttgcccagcctagttaaatccccagcaccatgagacaaacgcttctctcttaccgtaaagaaatcaatttctaaaagcatatttgcttaagaaatagtatacaccaaagatagtttttagggttaatgatatggaaattaataattttaaaaaatttgaccagtatagataaaattgtgtccttgtagctatctatagttttagaaatgagtattaaaagtcaagattcttagaatgttaaattatttgcatgtaaataaaaactgccagaatgtagtcatctaaatatagtttagtacttcaaacattgaacaataaaaattgttagaggtacttgcaaaattatgtcccaagtgttttgctttttttttttaataactacattgataggcatctgctatatttttccttactacacagtttgctcctaattttcttaaatatctttatacttaaataaataatacttttggtaaatttaatagtaactataaaccattattttaaaacttgctttattaattgagtgctcattctgcttttcagcggggatctgatgagcttctgtcttctggtgtcattaacggaccttctaccatgaacagctcgacttctgcaggtgtgtatggtaagtgtgaacaccctgtcctgtgcttcctttctaggagctgctttttttctcattcttcttttgtgccactgtttacagtaaaaatttgtgaattttactcaataagagaagtggaaagattcagctaaggaaaaaagtgttgaagaaatttaggaatgggtccaccatgttgtccatctaccccacagtaattgggaagatattgtaggtagagactgtttaatataaacatgtaaacagtgatatgggaggtgagactaaagccaactttgtaccgctgagctcaccttagagcactggagaagcagctggggagatacatgtagttcagttgtggtgcttgctatgcagccatgagggcctggctttgactgccctgtctgcttattgcctgtgtctgttacccaggattagggtgcaaggggaggagaagagaatccttggaacttgctggccagctattctagctctgggtttagtgagagacattgtctcagaaatccaggtaaagagtgatagaggaaatcacccaaatcaattcctggctgctctgaggatgccgtgtgtgggtagttgcctatgcgcatgcacgccaggaagcagagaaagatgaattctactactcattaccttttccttttttatttgttctggaagtcttgatcatggaacgatactgcccatgctcagggtggggcttcccacatcagtaaagacttgggaaaaccttcctagactacacccaagggtttatctcccagatgagtccattatctgtgtcttgaagttgacaatcaagactaaccagcatactcagaatacttgaaagcactgaaaatatgcaaacagcctgacttacctgtgaagtttctgtgtgggggagatgtttgcctttgtttttagagctcttaggtcatgcatcagagacacagacctaaggggtgttgctagggatctaatataattgttgagaattctagacagaccctacccaactaaacttgtttgactcattcatctcttaatgtttcttttaaattgtcctagattcccagagcactatgtcctggagggggtgtgtgtgttactagtaccttgaatttccttatgatttccacttggtaatgaggaactaatttttctttcatcatgctgggaattggacccaagacctcacatgtattaagatgaagttgtatctctagaaccaaagaaacctttaaaaaaataactttgtaataatccaaacccagggttgtcggaatttgtggtatttccccctctgcctccagaatgctgttatatatagtctgctaatagagttgctgactttctatggaatatacaggaaaaactgcatgtgaaattaattaaggaaaattgtgagttgatttattgcaagcttttaaacagaatagtgataaggttgtatttcacatatgccttgccaatgacacccacattttcagctgttggcctagccaccaagtggtccaacatgatggtgcgttcctgtagtcctagcctggggaagtggaggcaggagaatcagaacttcaggatcatctttggctacaattttagaaagtggaaaggaaaaaaaaagtgtgtatgtgaatgtgggggggggttgagggaggggagagcgcacgagcctaggcaataataggtaaaaagattgaaagctgctagaaaaaaactaatcctacttattcatatcctactctacccgctgcttttaaatcaaaagctctgtatgttgtccatgagatattttataaagagcgtcagtctctcattgactaactttcagatttaactgttctaagaggatgcgactatagcagaaacactaaagaattagatctaccaaatcccattcttgcttattttgttacaataaataataatatagatatatttaaaatgaatattttatgttgcataaggatactggaatactggtgccaagctatgacactcccaggcgatgtgggatctatggttattctcttaagctattgttagtgttattttaaaatcccatgtttgatgagctacttgaggtgctcaggaggtaaaggccctgctgccaagcctcatggcctgagtgtgatcccaggcagttcctgtgtggtagaaggagagaactgactcctgctgtccttgacttccacacatctgctgtgacacacacatatctacaaaaaaatcaatacataaaatgtaataaaaatcctttctttcttgtaggtacatattttgtaagagctttaaattacgaagcttagttctaaaataaagaatattccttcctatgagctttacctaaatatagacttgaagatattttgactcagcttacattaatttgttattataatatgctgctttcactagtgtatgtgctcacgcatcctcatgcacagggcaatgtattttatatctgggaacttgaacatggatctgcagtttaatttttttttcttttaatgtcctgtgataactgaaaacatttcaacacttcataactcattcattatccttttaaatatagttgtacaaacgaatgtcagaaactgatactattctgtttgtttactaaagaactgatttgttttgttttgttttgtttttcgagacagggtttctctgtgtacccctggctgtcctggcactcactttgtagaccaggctggcctcaaactcagaaatctgcctgcctctgcctcccgagtgctgggattaaaggtgtgtgccaccacgcccggctagaactgatttttatatcagcccactgttactcagactaaacagctacttttaaagtcttccttttaggtacaggtggccttgactagtacaagtgatttatgggacctatgggtcatctctgtatactgtttgccttttctcctactgcttggaggacttctatctttcatctcagattgtaaaggtgatggctaccttttagcaagagagacaaccttgagcctgtccctcatagttttttatgttggcattacaaacatataagcaatgttgtttaacttcacaagcataatgttaaatgttatgtatttaatatcagtatatgttatattattggctcatttacacaatgtttaaaaacataaatactaatctgtgttgtaaaaaatcaaaatgtgcttggaagataaatataactggaaagagaaaaaacttcacgtgcataaagctcacgtgtgtttctgtgtgagtgaatgtgttgtgtgtgggtgcctcctgataccaatagaggttgttagatcccttagaactggggttataggtcacccacctggtgtgggtgctggaaactgattagagaagagtaacagcaagaggtcttaactgctaatccaccatcattcctgccctgtattcttgatttggctgctgattatgcagtctatttacgaagctatgataatattaatactaaaatctattaatgactacagtacaaaaagaaagttatagagaaacactttgatatagttctaacaaacatacacaagatgaacacaatatatacacagttgaaaatatatgtatagactcttagtgatcattctaatgtctattttcttttcctttcaaaacagaagtcccaaattattactagactgccatacaagaataaataccaatttcctcctcccactttaaatggaatgtcagtgataaaagaagattggcagagatgaagtccagctttaactttccttaacctcttctctaaggataggaatgttggtgatagtggtagtttgagtaataatgacctccataggctgattatttgactgcttagtcatcagacagtgatagcgcttgagaagagttaggaagtgtgaccttgttgggataggtgtggtcttgttggaggaagcgtatcactgagaagggtgagggtcggggttcaaaagcccaagccaagccctgtgtcactctccctcttggtcagtggatcaggttatagctctcaatacttctccagcaccatggctgctgccgtgctcccagtcatgatgataatggactaataaacctcggaaactaagcaagcccacaattcaatgctttcttttgtaagagttgccttaatcatgatgtctcttcacagcactagaacagtgataaaatgataaagtgctgttttacaatttgaacgagtagtcataaattatagtagaagatcctattagaaagtctggttcctaagcaagaaatcaaatcccctgtcatctatcagaagatctaaaaatatacccaagtctaatttgttttgaattacagcactctcatctatatttgagttaacataccatacttaaataatactcccatgatcagcctggcttaatttatgtatacaagaacaggcccaaaacaagaaattataaaatatgtcactacatcagatgagtggagagaaaatcttattacagattactaaaagcataattatagctgttggtaataaatacaaaataaaacaaaagcaaattagtgagataatctttgtattcacgtacttgaaataatcttcatttaaatcactacaaaatctggaagactactgacatagcatgtatgaggtcctaggtgtgtataatacccagaaacacaacagagcagtgtactaacagtacatacctagttacaaacacacatttgggaggaagtgttatatgtgtgtgggagaggagggaatgttcaattttatatttttaggtcaagtcgtatgtacaatcacaacattaaatattgctgtgtttttatatggccctcttgacatttatttatataggattataggtagtaatttttcattagtttttcgaaaaggaatattaggaatttggtaagattgtaattttctgccaatagtgacaaatatcatttaatatttaaaaggattataatgaaattttaaaatagttacatttggcctgtcttcatactatttgtgggagaagaatatttctgaatttcatctgcataaacttgagtaatcattataaaggcaggtcagttgtagttagtatgatttgaataaaatcttgctatatgctaggatagtcagttcatttttgcagcggctggtctgagatgttagagcagaacagcatcatggggaagtactgtactgtagagtgttgagtagcatgcctggagtttgaagtatgtaggggtattgaaaaatatatatttcaaccaaggtctgcttattactactgagtagcatacaacatttagctagtagagtgagaaaggctataatgcttaagaaataaactaaaattttacatataactcatccagatcattttggttatattaggcacaaaatttatatcataatctttcttaaaacttgttgtttgtctgtttgtgtgagccctggctagcctggaactcagtctttagatcatgctggcttcgaactcagagatatgtttgccactgccttctgactgctgggattaaaaagtgtgtgccaccacagcctggcttaaattttattgttttaattctttttattttgcagtataaacatttgaaaagggttctttaaaaatatattagtggcctggagagattggtgaataaggttaagagcactggatgctcttgcagaagactcaggttcagttcctagcgcctacatggtagcttaaaactgtcggtaatctcagttccagggactctagtacctatttctggctccttgggcaccaggcatgcagaatgtacatacatgcatgcaggaaaaacacttatacccgtaaaaacaaacatacacatgagatattttggatgttgagtttagaggtatggtcatacctcaattagtgattggcatgctttttgaaaatgagtaggggctctcaacccatgggtcatgacgtgggggggggggtgtgaactatccttttacaggggtacctgagatggtcagaaagtacaaatattcatattataatttataacaagcaaaattacagttacaaagtaacaacaaaaataattttatggttggggtcaccacaacatgaggaactgtagtaaggggttgtagcattaggaaggttgagagccactgtcctagagtgtgcttacacagacctgggcaatatagtttactatacacttaggtgtatatggtgtatgcggtttagcttatgcccaagactgcaaacctgtgcatattgattttgtgcaaacctgtcaccctattgaatactataggtagttgtagttcaagtgttgtttatctaaacttagaaaatgtatacttgtggttaatgcttgccttatgaaagtgatacgtgaatctatgaagcaatataattgatttatcctaatacttttcctcaaaaaaaaaaaaaaaaaaccagacaacaattaaatgtaatggccatagtgaaagaccaaaagtgggttcattaagaggtggttggtttcatttcccactcatgtcatcaacccatagctcatgaatttcaaatctggtgcactaggtcaagtgtgacaatttagttaatatagtatgtcaacccaaattagtttcagtaatttcaaacaaatcttatgtttttttagctaatgggaatgacaacaagaaatttaaaggagatagacctccctgttcgccttcccgtgttctccatcttcgaaaaattccatgtgatgtcaccgaagcagaggtcatatcattaggtctaccatttggcaaagtaactaatcttttgatgttgaaaggaaaaagccaggtacgtaatatttaaagattgtcactgagtgattatcttctgggtgttagtatttcatataatttctattttcttgaacttaaaaataactagttgatttgagacgggtctctatgctgctctggctgatgtaaaattcataagctcaagtgacctttctaaagtcctgcctcctaagtatctgggaccgcaaggtgtgccaccttgtaagtatctgggaccgcaaggctgtgtgccaccttgtaagtatctgggaccacaggctgtgtgccaccttgtaagtatctgggaccgcaaggctgtgtgccaccttgtaagtatctgggaccacaggctgtgtgccaccttgtaagtatctgggaccacaggctgtgtgccaccttgtaagtatctgggaccacaggctgtgtgccaccttgtaagtatctgggaccacaggctgtgtgccaccttgtaagtatctgggaccacagggtgtgccaccttataagtatctgggaccgcaggggtgtgccaccttgtaagtatctgggaccgcaaggctgtgtgccaccttgtaagtatctgggaccacaggctgtgtgccaccttgtaagtatctgggaccacaggctgtgtgccaccttgtaagtatctgggaccgcaaggctgtgtgccaccttgtaagtatctggggccacaggctgtgtgccgccttgtaagtatctgggaccacaggctgtgtgccaccttgtaagtatctgggaccacaggctgtgtgccaccttgtaagtatctgggaccacaggctgtgtgccaccttgtaagtatctgggaccacaggctgtgtgccaccttgtaagtatctgggaccacaggctgtgtgccaccttgtaagtatctgggaccacagggtgtgccaccttgtaagtatctgggaccacagggtgtgtgccaccttgtaagtatctgggaccgcaaggctgtgtgccaccttgctgactttcagcttttcttactatctatggctacaaattagtttttaagtcaatttttcccctgtatgacaacaaacaacacaataaacaggaaaattttttatctatttgatttggggtcattttctttaagacctattttatattttacttacttgatgtttttaactgtaggatgactcctaaaaatatcatgtaatacctaagagaccttgatagagaaattataaattgcacttcatttgtctaactaaagaacagttaagttttccagacagtgcagttatcactataaactaaaggtctgattggcttttacatgggatttaagagttgggagcagcagggtatggtaacacacgcctttaatccgagtgctagagaggtagaggtaggtgagtctctgagttgaaggccaacctgtcgaattccatacatagtaaattccaggacagcctgggactatgctgaaagatcctgtcttacaaccaaaacaaacaacaggaacagaaaggtttgggagttacatcatttataaaataaaattgaatgtttagctagatatgactgaatagttagtatttttaaaagtggaagcaaacgttttttaaaggctagagatttagctcagcagttagttaagagccctggttgcttatgcagaggacctaggttcagtttccaggccataagtggtggcccataactggctgtgggcatcaggcatacacttgatgcacatatgtacagtcaggcaaacatatatataagatagaaaatgaatctttttaataatggattggtttacagtaggccacttttcttataagagctcatttctttttaatatttaaaaaaaaaaactgattgctataaatctcctataatttggtcagtggtagcctgttgctttaggctagcccaaaatagtgtcatatctcctgcttccataaaaccattatgcatattctagttgtagaattattgtgtagcttctttagtaatttgagagacataagggaaatttcattgtacaaatgagtttttacattaaattattttttaaagattttattagttatttttggtacttttgcgagtttcagacatggattgctcatcagatcttatgtgaaatgtgatagatatatgtgcatctgtgtttttgttgtttgttttttgagacaggtttttctttgtaacctgggctgaacttgctctgtagaccaggctggcctcaaactcagctatctccctgcctctgcctcccaagtactagcattaaaggcaagggctaccactacttggccaaatctgtgttttgaagaaaccttcaacacttacttctgagccctaggaacattagctaatcacgtgaccaactagagggtggtggataagattgtaaggtagtaagtatatgttcaaaaagattgcttcttacgatttggagcaaataagagtaagtggatatggaatgtagcaaattcttggtatcttaaattaatgctatacttgatttctcattatgggttgaagttttaaatcttaaaggaattatgaccataatcttaaattgggaaacctttaagtaattaaaagtatctcacatgtataatttaaaaagtcacaagtagagaattttttaaaatgtgatattacccagtcctgttcccttcccccattctccgacagggtttttgacttgtttgttataaagtagggccttactatgctctgtaccaggcagtcctgtaactcggaggcgctctcattgctctgactaaaggtgtacaccaccacactcatacttggacttttgtttttaacctctttgtttgtctttattgaatgaaattctagcatttcttttgtgtactctagcagtttagcccaaggttttacaaaaccaattttaaattatagcacctaagaatattcatttgtagtggtgatgtaaagatttatttttatttttaagcatttgaagaaatagaagttaaaagacacacataaaacataacaaaataatttaatctcctggcagtttcctcagttggaaacttttattgaacccagtttttcaaattaattttatcccctagggaacaatgtcaagtatactgagaaaacacaagtttagaccaatatggaatgattcttaaccatcttcttgtgtttattgcaggcctttttagaaatggcttctgaagaagctgctgttactatgataaattattacactcctgttactcctcatcttcgaagtcagcctgtttatatccagtattccaatcaccgagaacttaagactgacaatctgcctaatcaggctgtaagtattataggcatctgtaagaataattatacaaatatgtggtattataatttaaaattaactttctatacttcagagaagaactactatatatttttctcccttttagtatactttatgaggatttcatatgtgtatgtaatttgttcttaaatgtttgaaattaaaaatagttttgtttggaaactttggaagttgtagtgttagaaatgacactgggctgtgcatgggtaacattcttgtgattctagaaggaggacgctgaactactcagggaaactttctcaagaaaagcaagaagtaaccctccccccctcaaaaacaaacaaacaaacaaacctgttttcataattaagataaaatcgtgtacctcctaaagtgagaaatatgaaaaaggtgctggaaatagctgcatttacacttgctttgagagaagtcaaaagccttgagtttgccttccagggtcctttgtgtgtgtttgttaagaactctcccagtaactgcatcctagccaggagtagttctctgttgagaggttagggaggcagtttaagatgtcaagaattgctcagaattttcctttaaatgagttttgactcctcaagtgaatgtggaatagcctaacaacataatgcttttatttctggtttttattttgatatggttcatgatgagtcttttgtatctttccgggttcattttaagtggttaaatagaaatttgatttaacatggaaaaaaaaaacttgtctacaaagcaagtgtatttttaaaaagtgtgtgtatctgtttgtatgtctgcctattatatgcatgggtgttttgtctgcatggatgactgtgtgaaggtgccagatgccctagaactggagttatagacagtgtaagctgtcatgtggggactgtgaattgaacccaggtcctctagaagagcagccggtgctcttcaccactgagccatatctccagcactgtgtactttattttttttttaatcttttaaaattgaatataattatttcactttcctcttttcttctttcttcagaccctcccatttcccacattccctctcaaatttacaactgctttttcttttattattattattattattattattattattattatgcatatccttttattattatccatcctcaactttacacacaggatttctctgtgtagcttgctgattctgtttagtgttgcttctgtgtatatgatttcagggctggccacctggtactggataaccaatttgaatactcacctccagggaaggccaattctcccttgctcagctgttattaattggtggctctttgtttaagaggagagacatgtgaggtttctctctaccagtttagcatgtttatctatgggtgttgctcttgtttaggcagccatatgttgaggtgtaggtctcatggatgtggcttctctgtcatttctaggagatacagtctcaacagacttcctgtcttctggctttcagtctctttccccctcctcctatgatgttcttgagccttggatgcaggagttgtagatgtatatcattggtgctgggcccctgacccagttgttctctgaattttgatcaggtatggttttctgtaatggtctccatcgggaacaaagtgaagcttctttgatgaaaggtggtctgtgggtataaggataagtatttaggttaaaagtattggtgagatcaggaactcacagcccataactaaacataataaaagtaatatacagcaaaccaatagccaacatcaaactaaatggagagaaacttgaaacgatctcactaaaatcagggacaagacaaggctgccctctcttctcctatctattcaatatagtacttgaagttctagccaagcaattagacaacaaaaggagatcaaagggatacaaatggggaaagaggaaggcaagatatcactagtttcagataatatgatagtatatataatatacccttaaaattctaccagagaactcctacagctgataaacaacttcagcaaagtggctggatgtaaaattaactctaacaaatcagtaaccttcctctactcaaagaataaatgggctgagaaagaaactagggaaatgatgtccttcgcaatagtcacaaataatataaaatatcttggtgtgactcaaaccaaacaagtgaaagatctgtatgacaagaacttcaagtctctgaagaaagaaatcgaagacctcagatgaaaagatctcccatattcatggatcagcaggattaacatagtaaaaatggccatcttactgaaagcaatctatagattcagggcaatccctatcaaaatttcaactcaattcttcacagagataggaagagcaattctcaaattcatctggagtaacaaaaacccaggatatcgaaaactgcgctcaacaataaaagaacttctgggggaatcaccatccctgacctcaagctgtactacagggcagtagtgataaaaactgcatggtattggtacagagacaggcaggtagatcaacagaatagaattgaagacccagacactgatggtcacttggtctttgacaaagaagccaaaaccacccagtgggaaaaaaagacagcattttcaacaaatagtgctggttcaactggcagttagcatgtagaagaatgaaaatccatcaattcttatctccttgtgcaaagctcaagtccaagtggatcaaggacctccacatcaaaccagatacactgaatctaatagacggggaagagccttgaacacagggggaaatttcctgaacagaacaccaatggctcatgctctaagatcaacagtagacaaatggtattttataaaattgaaagcttctataaggcaaaggacaaaatggcaacccacagattgggagaagatctttaccaaccctatatccaatagaggactaatatctaaaatagacaaagaactctagaagttagattccagagaaccaaataaccctcttataaaatggggaacagagctaaacaaagaatcctcaactggagaatcctgaatgtgtgagaagcagttaaagaaatgttcaacatccttagtcatcagggaaatgcagatcaaaacttccctaagattccaccttacacaagtcagaatggctcagatcactcaggtgacagcagatgctgacaaggatgtggagaaaggggaacattcctccattgctggtgggactgcaagctggtaaatctacgttggaaatcagtctgggtgtttctcagaaaattgggcatagtactacctgaggacccagctataccattcctgggcatataaccagaggatgctccaacatataacagacacatgctccactatgtttatagccaccttatttttaatagccagaagctggaaacaacccagaattccctcaacagaagaatggatacaaaaaatatggtacatttacacaatggagtactacttgctattaaaaacaatgactttatgaaatttgcaggcaaatggatggaactagaaaatatcatccttggactggagaggtggctcagtggttaagtggctcttccagaggtcctgagttcaattcccagcaacctcatggctcacaaccatctgtagccatatgacagtgtactcatatacattaaataaactctttaaaaaaatattatcttgagtgagataacccagacacaaaagaacacatatggtatgtactcactgataagtggatattagccacaaaactcagaatacccatgatacaacccacaaaccatatggagcttaagaagaagaccaaagtgtggatgcttcaatcttacatagaagggggaacaaaataatgacaagaggtagagggatggagggacctgggagggagagaaaagaaggagggggaaagaggggcaggcagggttaggtattagaagggataggagagaagtaccagagggtcagaaagttgaatagaaatgtgtagcagtgggaggtagggaattgggggtagccactagaaagacccagatgccaggaaagcaagaggctcccaggtccaacagggatggctttagctgaaatatgcaacagaggggagataaaacatgtagagacgcctccagtagataggcatggcccccagttgagggatggggccacacacccatctcaaaattgttaacccagaaatgtttctgtccaaatgaaagacagtgtgttagttagggttttactgctgtgaacagacaccatgaccaaggcaactcttataaggatagcatttaattggggctggcttacaggtttagagattcagtccattatcatccaggtgggaacatggccgcatccaggcaggcatggtgcaggagaagctgagagttctacctcttcatctgaaggctgctagcagaatattgaattccaggcagctaggaggagtgccctaaagcccacacccacagtaccacgcctactcccaacaaggccacatctactccagcagggccacaccttattacagtgccactccatgggctgagcatatataaaccatcacagacaggaacaaaaaatggaaaggagattgaaggaaaggccatccaaagaccacccccacctagggatccatcccatctgcagacaccaaaccctgaaacttgctgatgccaagaagtgcttgctaacaggagcctggtatggctgttccctgaaaggttctaccagcacctgaccaataaacacagccagccatcgaactgagcccgggatcccaatggaagagctaggaggactgaaggagcaaaggggcttgcaaccccataggaagaacaatatgcaacgtttttttaaatataaagagaatttttcatgtattcttgctctagggcaagatttctccagcttttttgtcacgttgaatgttatgggaactgcatttataaaattattagaactttctacattaatacaggaacatttcctgtacataatccttgttttagggcataatgacatgtttcatttgggggggggggatcaaattgagagccttaagcatgctaagcaggtactatactgttgagctatagctcagactattagagttcttcaatgaaaattgtttttatagattgcaaataagaaacctgttcatggttaaacatttaagcaatttagaaaaatatgaagaaaaatgcaagcatctgtttgaacagagataatgaatattggtgctaatattctattaattcttctgttgtgctgtatatgtaactatatacaagtgaaatcctggtgtgtgaagtgtttttgctcttactctgcaatatatattatggacattgttctgcagcaagagacatgcttgtggatgtttaatgaccactcttactcctttgatagaagacctatatatagtcctggtttttgataagcactgaactgtttttcctattttaaaggttttataaacagtactgcaataatacattttggcacacataaaaccttatcttactagatgaaattcctgggttcaagcatatgcatgttttaatatctatcctgattgatttctgtatttaatgtcattaaatactttttaaaaccttatgtgcatgtgctcatgcacaatgtattcatgtttgtttgtctttttttgttttttgtttttcgagacagggtttctctgtgtagctctggctgtcctggaactcactctgtagaccaggctggcctcgaactcagaaatcgcctgcctctgcctcccaagtgctgggactaaaggcgtgcgccactactgcccggcatgtttgtatgtcttaagtgtggggaataaatgtgtgactcttatgtgtagagatcagaggacacctttgggtgtcattcttgctttccaccgtgtttgagactatgttgtttgacactgtgaactccaggctcgctgactcttgagtttctgaggactcttgtcttcacctgcacatgggcttaggagcatagggctatggcggtacttgtgcagctttcatgcagttccagggactcaagtcctcatgcttgcattgcagcagatgcttttagctgatgagccatctctccaactctcaaaacacacataacaaattcgtctttaagtcatctgtaagtgtacattttaatggttgttaaggacaatcattaactcatctctctttggaacttttctcctgtggtaaactgaaattccttgtctgaaataacagctttccatttcctctttctttggcctctgtcaactgccattccactatcagattatgactttgtgtttgggtaattgaaaaattatttttagatattggtaacttccttcaagatggtcatatcatttcataccatgttccaacataacattaagataaaaaacgaaacttctaatatttaaaaaatgtatttataagtgtatgcatgtatggatatggcatgcctggtgcccatggacatcagaggaaaacagttgcatggatggttgtgccactgtgtgggtgcttacaaacccaacccaggttctctccaagagcaacaggcactcttaacaactcagccctctctccagcccctctcccactattttgattgcttctggtttgatattcaagtctttgttctcttggatttttttgttttacatatgtgatatctatatgatacatgtgatatatattattataaaggtagcactttattcctcctaatagcaagaaaagtttcttctggtttatttaataacccatttgttaaactactgatatgagacatatcctattttcatatcataccctttctgcatgcttacaatatgcatttatatacacttgttaataagtgtatgttaacattctgtgttcatgaattctgttcacttagagtgaactgcaaatctagcttggacctgacttttccatcccttttcgactttagtgtatactgtcaatttattgcagagcaatatattatctctccagaattgactgattatagtttttatagttatttttgttaagtcttgtttccttttaaaaattttggattttttttggtaaatttggaaataattaacatactcttctctgaatctttagtaccagaagttgttttgtctgtttttctattaaagtttttcagtagaatttaaacattttttttcatgtaaatcatacagttttcacagtagttttattcctaagtatgttagtataaattgctagaacaaaagataatttattaaaaacttagagattggattatgccaaagggaaactgtgagaaattccagttgctaggcaaccacagtcacccaaatggcctagtttattcttagatagccttgatttcatcccaacacttttttattccaaaccttacaccagatataagtcaaaatggaaaatacctgtgtgtgtgtgtgtgtgtgtgtgtgtgcgcgcgctgcctcttttttttcaaagccaaggaatcagatagattcacccccctcccctttttttttttctgagaatcaagataccccaaagcaagcatttgactcccagctgtggacacagttgtcaaagggtcaagtccatatgaagtagttttacattcttgctttgctggagaactatagttactaaatataattgtgttgtatagttcaacatttgaacactttttattttggagttttcttgacttgttagtagtttatgaatttgcaaaaatgactttttaaggttttacctttaaaatgttctctaaacaattattaagatgaatactaaagaccagcatattcactgtattctagttgccatattcttaaccttagaaatgtattcttcaaatcacataggtcccttttctgttgtgttttatttactaaggtagagactcacttgctgctgaggttaggctgagctcacttggtagcccaggctgtccttctactcctttcctcctttatctcttgtaagtgctgggatcccaagtctgtgccaccgagctccctgggtacattgatgtcttatagcagctatatctccccagtctaacttactaaagtccttgtgcttgtttgatcctactgatttccatttcccttagtaatagtgtagtcattctagtattgttgccttaagtgtctaaaattcatctcctacagtagtaattttattacaccataattttaagcatcaaatgcattttcatcttcaaacactgtttttcttaaatgtttttgcctagttaaaaattgctactaagaacttggtatcatagtagtacatatttataatcccagcactagagaggctgaggcaactacaccatgaaattctgcctcaatacaaaacaaaaatctcaaaatcttataattataacatgtttaccatattttcaggtccctcccctttgtactttcattttcaaaaactcttctgcccttcctttccctcctcctttcctccctctcctcactcctttctttgcctctgaccctcccccctccatcttgtaaacttttgaccccatcttaccctttcagtactgatattacaggtgtgctccactgcacctcactttcaaagcagagctttactttcttgccagttgtttagaaagcttgagtcagtgcttgtgagcaccagtgccgcctcctgaatgctgtgtagcgaggaggacagtgtgcactactaagtctcttattcttctcgaaaagggaaaaagtaaagaaagaacaataacagcaagactagcagcagcaactacttgatagaattaaaattaatagaacgattattgacatgaagtaaagaagtgagaacaaattttttagttacacatgcttttgatattaaatcattttaatgtgagaggaatgctcattatgtttttgcctagattctccagactgttaacacccaatgcagaagtagtgactgtgtttaattataaaattcagctacccagttactgtgtctgatagctgccatatgggccgtattgttttgttttgttcttttgtttgttttataagacagttttttctgtgtgtccctggttgttgtggaactcactctgtggaataggctggcctcagaatcacagagatctctatgctgtgattaaaggcttgagccgccactgccatcacttgagatacccagctaactgtcatattgaacggggtaaaatccaggccttatcacaggaatctgttggctgtaagatagcactaattaatatcttatacttcctaatttgtggagtgtatagaatagttcacatttaattctaagcctgtatctttttttaattggcatcactcacctcatacacaccaattaaagttttaaattgaagtctaagttggttttcaaacctgtaaaatcagtaccatcctcattttctaatcttactgagaagctcagaatgaagtaaatgaggtagaatgccatgtttaaagcaaacaaaatgttcttttaattcacatactgttttttaaaggtgatgttgctttgggaactgaacttcgggttgttttgtattatatgatatgtaaagaatgtgttgacacaaaagaagtcattagatatgccctcactgataagtggatattagcccagaaacttggaatacccaagatacaatttgcaaaatataagaaaatcaagaagagggaagaccaacgggtggatacttcattcctccttagaatagggaacaaaatacccatgaaaggagttacagaaacaaagtttggagctaagaagaaaggatgaactatccagagactaccccacccagggatccatcccataatcagccaccaaacccagagagtattgcatatgccagcaagattttgctgaagggaccctggtatagctgtctcgtatgaggctatgccagtgcctggcaaatacagaagtggttgctcacagtcatctataggatggaacacagggcccccaatagagaagctagaagctgcaaccctaaaggtggaataacaatatgaactaaccagtactcccagagctcgtgtctctagctgcatatgtagcagaaaattacctagttggacatcattgggaaagaggccccttggtattgcaaactttatatatgccccagtacaggggaatgccagagccaagaagtgggagtgagtgggtaggggagcagggcggggggagggtatagggaacttttgggatagcatttgaaatgtaaataaagaaaatatctaataaaaaaaagaataagaaaaaaaagaatgtgttgacataaaaccactattaaagggtttatagactaactaatatctttaaaaggatcatgttttcttcatcttgtgtactaacactggaatggatacagagattaatgtggcctgtgcacacgtgcaaatttgtgaaatgctttgtatattaaaaaaagattttcttatccaggttgtggtagcacacacctttaatcccagcaattaggaggcagaggcaggaggatctcttgtgagtttgaggccagcctagtctgtacagtgagttccagggctctgttgcacagtgaaaccctgtttcaaaagacaaaaaaaaagtactctagtttgtaagcaaaacattaagtgcataaaatagaaaaaaagagcacatatataactggccacggtgctgcatagcttttccagaacttgagaggcaaagacaatgggttctttgtgaatttgaggctagcctgctctacatagtgagttctaggacagctggagctacatagtgagaccctatctcaaaaaggagtcaaaagaaaaaagaacaaatacaagtgtaaaaactgggatttgttaagcattcaaaaagtaaaaggcttccaagtttgagaaaggtgctttgtttagcaaagttcattatagcaggtgctaagaactcaagcatttcacactgtaaaagtgtaaacaaaaactaaaaaccaaaattatttaaaaatatcaattctatgattaaaatttcctaattgaatatatgaaaatgaaagacattaaatttgtagaattgtttttattgtgatgcacatttttcaaattatcaccactacaacaatatgaactaaccagtagcccccagagctgtgtctctagttgcacatgatagcctactcggccatcagtgggaggagaggcccatacagcttttattgtttcagtaatttttgcattttggaaaatataacaaaaataccacaaaaccaaaatgatttcacacttattttctgtttttcttgccacagttctgaaccagctgctttttagaacaccttgtttcatattaggagaaatgtattagaggcttatttgtacactaacaccctttgccaggttacctgaatgacaggttagcctgatcacactctagactcaacatactggttcattgcttgtccaccccatggacctcttcaccttcctcaggctgtctcatgacaatggctccccgtgtcataggctcccttctaacttcttgggctcaggcattctcagccagctgccccacctatctttatctgactcttctcatgctcttcaggtgatagctggcattgaagccccttaccccccaaacagaagcacaccataaatatcgtttttttcttgtctgggttcagatttccctttgcaaggcagctctggcctgtggttgtgtcttacacgcattcacgcgaccggccaggaagaacgcagcaaactggaatcttctgcggcaaaagctttattgcttacatcttcaggagcaagagtgcaagagagcaagagctctattgcttacatctttaggagccagagcgcaagagagcaagagccagagcaagggcaaaagcaagagctttattgcttacatctttaggagccagagagcaagagagagaatggcgaaaccccgtcccctttaaggagaattatcctccgcctaggacgtgtcactccctgattggctgcagcccatcggccgagttgtcatcacggggaaggcagagcacatggggtggagaactacccttggcacatgcgcagattatttgtttaccacttagaacacaggatgtcagcgccatcttgtaatggcgaatgtgagggcggcttcccacagttgtgctccacagcttgttcatgatgtttcatggcagggaggcctacttctactgatggcctgctttcctactgacaccaatcacatttgtacttatactgcctaaaagctttagacttgaattgtcaagactttgtaatgcacacctttaatcccagcactcaggaagcagaagcagtaggtctctgtgggtttgcggctagactgatctacaaagtgagttccatgacagccaagacaacacaaagaaacccctcacccccaacataatcgtgctgggactaaaagcatacatagaccactgctcctagctttttcatgtagattttaaggaacaaactcaggtcctcatgcttacaccacaagcactttattgattgaaccatctcctgagccccatcttaaagaacgaaaggaagaaggaaaggaaaggaacagaaaactgctcttaaacatggcaaacttgagatgtgcatccagatctgtatccaggagtatttgtattatgttgtatgagcttcaggatgtgaacactgcttctgtgatcacgagtggtcatttttctttttcatgtattttttgccttgttttctagagagcccaagctgcactgcaggctgtcagtgcagtccagtcaggaaacttgtcccttcctggagctactgcaaatgaaggcacattgctacctgggcagagccctgtgctccggataattattgaaaacctattttaccctgtcactctggaagttctccatcaggtaaggaacaaaatcttctgatagcaaaatcaaacatggattttcctaacttttgatagttattgtctgttttgtaaattagatatgatggcacagaactttaatcccagcacttgggagggagaggcagatgaatctctgaattcaaggccagcctaattgcctaatatacaaatcgagctctaggataaccagagaccctatctcaaaaaaaaaaaaaaaaaaaaaaaaaaggaaaaaaaattgttctttactgatttgattcatattgcctttctattatttgcttgtatagtggaaagaaatttagcatcttgtgtttttaagacctatgaactactgtactacaactcattgtgtagaccagactggtcttgaactcagagatctgtctgcctctgtctcccaagtgcttgtattaaaagtgtgtgtcactgtacttggcctaacttgaaggcctggggtgcagctgagtggtgtaggacatgtggtaggaagagctttcgtgcctgagtcctgttcaatccctaatatcagtaattatgataataatatcaaacattggagggaaaacgatgagtaagaaaatctagttttagccaggtttaatagcacacttataatcctagcacttgagaggctgaaacaagaggatttctacaaaattaagtctacctcatagcaaaaccccatgtcaagcatagctttgccattgctttagtgctgtgaaaagacactatccaaagcaacttgtacaaaagaaagcacttaattaggggttgcttacagtttcggagacttattcattatcatggcagggaacatggcagcaggcaggagtggtgctgcaagatagcttggagctatatcctgccacagtcaaagagacattgggaatggcatggacttttggaaccctggagcccacctccagtgatgaacgcactttttccaacaagaccacactcataatccatctaatcctatgaaagaattacactccctggtaactaaacatttaaatatatgagcctatgggcgccatctcctgagtgttaggattacaggcttaattttttaaatagctaaacaagaaaaaaaaaagaaagtataatatcattgataaaatctagatagatgtagtttcttcaaaaattatgtcaccaaagaatacaactaatttatttttttttttgtcacttgctgtatttgaatattttcagtttaaaattctgaggtggaagccagtgagatggctcatcaggtaagagcacttgcctcctagcccagtaacttgagttaattccctaggtcccatatggcaggagaagagatcttacttctgaaagttttcctctaacttccccacttgtactgttgaacacatgaatgtgtatgcatccacaggcacacatatacataaatacattttttaattctgaagggaagatatatatagtaaacttcaatatagacatgcatttatgatgcgcattgtgttagataatcacttgtaatccagtataatctttgtagtcattcattactgcatctaaactgtcttatcaaagatagtccactaaatcagggctaatagtatttaatatttacaaattggaaagtcccctaattacacagttttctagagggtaaaactggacagacttcctccaataaggccatatctcctaatccttcccaaacagttccaccaacttgggaccaagtatcaaacatgagcctttgggagccattctcattcaaccttccatggcatctccatggccactgtagacttgtggctgtattataatataaagtcatttcatctactttctaaagtccccatagtctttctttcagtctcatatagtttaagggtgccaggccttgtcacaagcaagcaactgaatatggcagtgtcatctatgtggtcctggctttagcatcatgaaggacacaggagtaaaggggttgtggaatcttctatagttaaggagaacccctggggctaggcactgtgtggtagctgcctgtgttgggtagatccttgctgctttgaaccacagtgtttaaaagtccaaagttcaaagtcccttttaaaactcaaggaagtccctaattgtagtcccttgtaaaatcaaaaagcaaattatatagtagcacagagcatacattactgtgggaagccgccctcacattcgccattacaagatggcgctgacatcctgtgttctaagtggtaaacaaataatctgcgcatgtgccaagggtagttctccaccccatgtgctctgccttccccgtgatgacaactcggccgatgggctgcagccaatcagggagtgacacgtcctaggcggaggataattctccttaaaggggacggggtttcgccattctctctcttgctctctggctcctaaagatgtaagcaataaagctcttgcttgctctctggctcttgctctcttgctctggctcttgcttcttgctcctgaagatgtaagcaataaagctcttgcgctcttgcgctcttgccctcgctcttgcactcttgctctctggctccttaagatgtaagcaataaagcttttgccgcagaagattccggtttgttgcgttcttcctggccggtcgcgagaacgcgtgtaagacattaccattccaaaagaaaagaatggaggcatagtaaggaaataagtaaggaaagaaagtaagaaaagaaaagaatggaggcatagtaaggaaatactgaaccaaagaaagactggaactcaacagggcaaattctataaaccctacagctccgcgtccagtgtcagaagggctgagatgactccatccctccagctctgctgcctgcaggatacatctcttcctctgcctggtttcattccccatgcacagttttcctttgtagatacctcataactctggcgtgcttaatatcttggcatctccagtgcagcccaagctgtttgtcctctcagggcctttgtgtagggacatgcctggcataagtggttctcctatactctggaagatttcacaacctctttattgttggatccttcatgactctaaagccagaaccacttggatggtgctgctatgtttaggtgcttgctttgagatggatcctggccctcttgaaccacatttgcagcagattttctttgttgcttttaccaaagcagaaaattcctaatgccttttatagaagttggtagcctgatgggtgcatttcagggctttcatttccccttaatcttacctctttcagcacaagccttggctcctttcctggggctcttattgtcatcttctcttcaaactgtgcattttgtacttctttttcccttattactcttactcattgtagatctgcataactgtgattactaagaaccacatggcagagtcaatactaggctagagaccattttttgtggtatttttgccaatgactgtatatgctttctgcccttgtcctaagaatttgttgcaacataatttaaaagtaacactaatttctttagtggacaaatctctagcccagttgctaatattattcaccctcggtgctagagagatggctcagtggttaaaagcattgactgcacttccaaaggtcctgagttcaattcccagcaactacatggtgactcacaaccattgctattgggatccgatgccttcttctggtgtgtctgaaaacagcgacacacgtacctttggatctatatgactaaatgaagagttgtagggtgtgtgtgtaccaaactgaaatgtatctgaattcaaaaattataaagtctagagcccttagacatccttttacttgcccatcatcatatcagttatgatgggactgagacttacttccagtgttctttgctatgcatgtaaattctaaatatactaattagtaggactactttattcctttcaataattatctgagtaccagtttgaaaataagtacacctgtaaagcatttcctagatacttaaatggtgatgttcgtagacacccttgtcttttcctaaaagtggttcagtagttcaatgattggttgcattgttctgttaaatttgttttctgtttattgcacaaagtagcacttaacagtcaaaggcttgaattgtaactggtttttattttatttcacaaagataataacctatgtgatccatcagcagagtgtctgcatttgcttctgtaatgttgtggtaatttatattcttataaaagatacttttaaacctatgactcaacactgccaccacccagcaggtgtgttagtcagtgtcatgaggtcatgcctaacagtctagttaccttttcccggaaactaacaagacttactttctcctatagatgttcctagagacctgggtgagcaggactattttcaattctcagtaccatcagttggattaatactctcagtctttagttacaaaagtcattgtttagttcttcccagtgctgttggaaaaagaaaaatctttaccatagctccttaggccccacagacaaatgtttacaccattcctcatccttggtacctagcattcttgcctgtaacaccttggcctttctggtgccctgcccatctgttatctgtcctcccggctagccctgtctttacttacctttgtgtttcttggctttgccatactccttaacctacaaagtcaggctgatgtccagctcagacgcttcctccttaaggagtcttccttcacttaagtcctctccctcaacactgtacctcgttcatccctctctgccttagtcattattatgttgttgtgaagagacaccattatcatggcattgagggcagcggatggtggcgtgcaagcagctattgaagcagtagctgggagctacatcctgaactttaggcaaagagaaactctgggcgtggcatggctttttgacacctctaaatccacccccagtgaacacttttcaagtagtatgagcctattgtggccattctgattcaaaccaccacatcatccaagagatagagtggttaaagctagaggcgctggggctggtttgaatcttgctctaatgctgttctgtaatcttggtgtgttaattacttttctcaatactgtaacagaatacaaaagcaatttaaggaaggatttgagggttcgagtgcatagtcagagaagaccaggcagtcagagtgattttacagtgattgcaggggccactcaaccagccatattgtgtcctcaatctggaggcagagaatacactaggtgtcaagctggcttcctcctttgtttctttttattcagtccaagaggacatggtgccgtctatattcagggtgagtctttctttctcagcttgaaacagcctccaaaagcacctagaggggctggagaaaggactcagctgtcgtgtgtactggcagctcttccatagagcctagatttgattcccagcctccacagaaggtgaagagctgtgttactccagttctgggagatctcacatggtcttctggcctctggaaaccaggtgcacagtggtatatagcagcaagcagaacattaattcccagctcttgggggacagaggcagctggatccctggaatgagtttgaccctcactctggaaaacataaaagtaatttagcattggtaactacagatctgttagaaatattccctatattcttgtttattcctcctttttattttgcttatttatttttttgagactggcctcaatctttaactcacagaagttacctttctctgcctttcaagagctgggattaaaggcatatactccaggcctagcttttttatttctcttaacagaagacatttcagcaagactgaccttaaccaccttcctactttctcagtagggctccatttaacctcagccctctctcctcttctcatttttcttataatacttttgttatggtaccctttgccaatttattgtcttaataaagcagaaaattttgttgtccccccactttttttttgccagtgcttagaaaagtgccttataattattgaattagttgaacaagcctttgttgcaacatcttatatctgcttataaaagccttcagaagtagctgatgacttagaaggatgaaatcattgactcatttgacttcttgtttcaattcatacacttgtgaacatctttatatcaaactattagttaattacagttgttaccttctgttttagaattgtaccatttgtacatagtataaataaaattggttagatgtttgagcacctgtggtgtaccagtaacatgtataggcattgaaataataatatattaataataatagtaattattattattataggcttggtttaagacattttgtaccagaattttaatagagaaaattgtttttgttttatatattaatgggcatcaaacaaacaaaaaaccccaaaagtcaaatgctgtaattcaaaatcaacatataatgtaatagatgcctgtgatccagcactagaagggcagaggcatgaatcagcctagcttacgtggggccctgcatcaaaaaaatcaaaactaaaaccctgaaacaaaataggcttcataaaccaagatgtatttatgcaggtacattagcttaacattttcccttagattaaacacgaactctttttttattccagatattttctaaatttggcacggtgttgaagattatcacctttacaaagaataatcagtttcaagccttgcttcagtatgccgacccagtgaatgcgcagtatgccaaaatggtgattatacttgggtctttcattcttagtcactctctttggagacatccttgccctgatttatcttgtgcctaattatgtgtgacctcattacttttgtaaccacattcagctctcatggttatttagctgagttgataaaagatagaaaatcttaagaaatatgcttttgtcaacttgtgtttttgttgttgtttgttttattggctttgtttgtttgtttgtttgtttgtttttttcgagacagggtttctctgaatagccttggctgtcctggaactcactctgtagaccaggctggcctcgaactcagaaatttgcctgcctctgcctcctgagtgctgggattaaaggtgtgtgccaccatgcctggccaacttgtgcacgaatctttgattttgttttaatgaggcagagtgacacatttgatcacattagctacttgagctctccaagagagctgtcattaacgttaattctcctttatattggtttagaggtagaggctaaagttgaacaggcttttgtttttcatacgatttgaggaatacagtcttacatttcttgtccctctagcttcacgggggtttttatattaagtttatgcatcatatagttgtcatattctttggtttctgtgtctgtttttatacatttgactatttgtgaaagtagggagtagccaggtagcccacctgcacattgtattctgaggaagggagggattaatgatctttatttacaggtgacttccttcgttccttattcaaaaatgcaagtacaaaggaaataaaatagaagttaatattttatgcactatgactaacatactatttacagtaatgctttatcaatacattatactcgccaacataaattatattaaaataatgtcaaagtatgaaattaacatctttaaacatacatatgggaaaaatcatcatcataatgtttctatactattgcacaatggttttccaagcctttgcatctgtttcttcatttatctgaccaagtcagagaataagtaagcctagctctttgcacccttggccttggcactttgcttagtgtgggattgccgaactctaagataagaggctgctcagttgtcagcgtggtcttctcgtctgctttaggctctggatggccagaatatctacaatgcgtgctgcactctccgtattgacttctccaagctcaccagccttaatgtgaaatacaataatgacaaaagcagagacttcactcgcttagaccttcctactggtgacggccagccatctcttgaacctcctatggctgctgcttttggtgagtagttcctccttcagtcacaaagcaactcttctgaagttacaagtgtcacttgtttgtatcagccttcctaggttctctttggatttctaaagaaattgtggaacaaagatgcccataaattaagccttaatatgaggtggtagttcccttagtccacaaaacacataggagcctgggattatgctccaacttacttttctaccattaacacattaatattatcccaaagctacttatttgctttaaaataattattttaatggtaatttttagattaccatttaaaaattctaaatgtgcagatttctaaacagaattttgacattaagtgctcttgagaaaacttatttcttttaaagtaatgataacgtctaaatcattgtcataaattagcagtgtctttcctttagtcaaagaaagctgactttattctgttttactactttagcaatagagctgttatctttgaggctgtgtcaatattaacatattatattaaataaaccccttgaaaatatttgcctttcaaattatctctgcaaaaataggtttgaagagcttacctcttttatttaaagtaaacctttaggatgtctgacttggaggccagcctggtctacatagtgagttccaagacatccggggctacattagagaccatgtctcaaacatcaacaacaaagttttgaaaaaaatacaacaaacctttatgtaaaggccagaaaaaaaaatggctactttggatgtcattagattactatgtgctactttttagttttatacctctaaaaagtgagctttcctattcaggaaagttgaattttaatagtcttaggatttattttcctctgctaagtaacaccttagaatattgttggtgcctatggtagtattaataatccatccatccatcttttgtttgttcttttgagataggaactctgtatgtagctctgtctatcctgggactcgctgagacccacctgcctctgtctccagagtacagagattaaattaaaggagtgtgctgttatacctggctccagtttctaagtgagaaaattaaagcattaaaacaactaattggtttagtttgtagttctattttacaaagtagaaaataatttgtaattctattttagagtaaaagtttttgtctttatcattaccatttcaatactgaattacaaaaattagggcaaattcaagcttgccagaacttggttatcaaattcagaacgagttttattacaataattgaatatatatatactgatgtaactaatatactctgtaaggaaaggagcagggcctttgaaaaatacagttaagaattttttttttaagtctgggtgtggtggtacatgcccttaatctcaactctcaggaggcagggtcatgtggatctttgagttcaaggccaaccaggtgtagaaattgagtccaggagagttagggctacacagagaagccctgtatatgtgtgtgtatagtgggatggggggaggttacattctaaatgtaatttatccgagaaaagtagttttatgtcttatatgaaagttagtctgtttctaatattcaacagattgcccctgtactgtctttgttttggagacaatgtactttgcttcttatatcacattaaagattgtgtgtacacacacttgtcatcctctgttactctccactttgttttctgatgcatggtctcccactgaacctgctcacttagttgctacactagctggctaggaagccctggggattctcttgtctccatctctctctcctactcaggccttcttcatgtttgcatagtaagtacttcaaagattgagcaattgccttagtccctgtggtggtttgaatatgcttgccactattaggaggtgtggccttgttggatgaagtgtgtcacctaaggggtaggcttggagaacctcctcctcctagctgcctacgggtgctcagtctgctgctcctggcttcctttggatgaagatgtagaattcttagctcctccagcgccatgcctgcctagatgctgacaggctcccaccttgatgataatggacagaatctttgaacctgtaagccagccccaactaaatgttgtccttataagagttgtcttggtaatggtgtctcttcacagtcatgcaaactcttttaagacagcccctataatgatataatgatatcttaacatagtgttttctttatcatgattattaaagttaagcatatctttatcagttcttccccctccctctccctctctctcccccctcctctccctctctctctcccnnnnnnnnnnnnnnnnnnnnnnnnncccccctccccccccctctttgtgtgtgtgtgtctgtgttttaaaacactagttccatagaccttgaggctggtcttgaactcaaagaagtctacctgcctctgccttgtaagtgctacgattaaaggtgtgcactactacttcccagcctttttcttttctattggtatgactttcttgtatagaccatgttagtcctttttgtccgtttctattataaatagtttctcccagtttgggcttattgatagtcaagttccttatttcctttatatgtagtaattgttgttgtgtgtgaggagtcatttaaaataatacttgttacactaaagttataaagatacttaaaatggatacagtagtgcatgtacccattactcagaaggctgagacaaggattgtgagttcaagggtagccttaggtatataaagagaccttgtctcaaaaaacaattttttttcataacaaaagagcattacttacattctaaagttcatactattttacctggctttgttttaaaataatgtaagctgtaggaatagcataaataactcgattcagatttcttatttgtgtcatgccatgcttgctttattgtttccaattgtatataattgtatatatatttatagttgtatctccctcttgaaatcattgcagagtaagttgcaaatgtgtttgactttacttctaaatgctcaatgaatgtttactaagaacaaaaatgttctttgtgtgtgtgttttttgtttttcagacatggtagccctggatgaccttgagcctgcctaaactaggtttataagttccagccaacgggcttagtaatcagtattcctaaataaaagtcagtttttaaaattagttttagaaaactaatacaccacagcatctaaccaatagaacttttgaagttttgccagttataaaacaaatataatagccatttttctaaaaacttgaaaattatcaggcttatctactgagtcatctctagctcaacaatgaaaactttcaatggcacttagtatatttgtgtgtgtgtgtctgtgtctgtctatctttctgtatgatcatatgcatgcacaaatatgtatttacttgcctgtggtggctatagaacacacttaggcatcattctgtagactccatctacctctcttcataacaatctctcaatagtgtggagcttgtcagttaggctaggctgactgactgatgagcctacatatctacttgtatctgcctatggagggttgagtttctaagcatgcactgtcaggcatagctaatgccagttccggagatcaaatgctggtcttattgtttgcatggaaagcactgcttcagacacaatagaagagagcatcggatcccattacagatggttgtgagccaccatgtggttgctaggaattgaactcaggacctctggaagaacagccagtgagtgctcctagctgctgaaccatctctccaggccccatgtgtaatttcttaataaaatgaaaatatgtaggctgctttcaacagaatgctccacctggagaaacaaagggaaacagctcagcctttgcttggttggatttttttactattatttgaaaactatgcttttctcctcgtttcctgtctaactcctgttgagggacctccacttaatttgaaagtattccacaggatcctttttttctatttctaagactttgtctttcttttcccctaataggatatttttttctccctttccctttagccctgatcatcttactgtttggcccctatttactcaagttttcctctgtaggcactcactcagtggctaaggcagcataattactaagtctgtatgttgcttataataattctcagtttgtcttggtgtttgcagttgtgtatcttacagtcggtcccctcgcacttgatgcctccattggaactgacctatgttttagtggcactgtcacaaggcttcctatagaattgcttgtctagaatacacagagatgcactgtgtttgcagttacatactgtgtagctcaaactttcccctaacttacagagatatcttctctaacccatcatggtaaagcctctaggacttctccgccgtccgcttgctggattatatgactggaggacccttagcctgtgaatctctgtacttcattctcaatgactaataatctatctcatatttgtttgtttaaacagaatcgcactgtgtagctcagactgtccttaaattcatgatctttttgtttcagtaatggaattaaaagcatgtgtcacattgttcagttttattatttcttttcttcaacccagtattccttcaaaacagtacagtttaacaagcatttgatggcatttcatatagggaaaaaatgctctatgtaaacacgagaatcttagcctcgtccatactcctttaacagctaagcttcatccaggaacccatttgaaagctatcagcccctggaggcagcaggagctttctatactttggggatcactgactgaacaactctatgattccatcttcggttccacttataatatattctcacataggcatttcatagtgtgttgatatagcaggcaatatatttattgtagctttttcttgacaggtgcaccgggtataatgtcctctccatatgcaggggctgctggctttgccccagccatcgcatttcctcaagcagcaggtgagtcttttcaggttgagtttgaaatgaatctttaaatgagcttcttcttttttttttttctaggagctcaccgaatttgggcaattaaaaataaaggcattaggtctaacaaccatggagtgacttgtatacacaccatctttatatttacaaatagttctctcttgttccactgggtacaccagtaattctactgtgtgttcgaatcacttagttaactgtaggttaactacattaaactagtaaactattaaacctgtgtcaggttgttagataaggtgtatgatcttctagcttctttctttgtttattatgtgttgaacaaacctgagttttatttatctttgtgacttcaacgcatttggaaggaatatagccagtaaacacatcaatttgagcatctttggagaatgtttgagtatctgtgagttctcagtagtacctacccatgaagggtatgtgtgtcatttatttcagggtatgcaaattttttcctgagaatatttatggcataataattattattcctggaataattaagaaataggaactagccctggctgtcctggaaatccctgcgtagagctggctggccatgccctcacagagatctatctacttctcctccctgttcttcttctgcctccctgagtgctgggatgccaccaccacccagctttatgattttttttatcatatactttatggttttatctctgtgaagaaaacaggtttgtaattaagaagtggtatgaatctgatcttatatattaacatttctgattttcaactatttgtgaacataatagctatattttaaatttcagagtagcttctttccagaaattattattatactttaatgttttaattctggaaattatagtgactatctctctctgttggacaaaatagaattaactaaaaagaagactgatttttgagaataaagttaagtcctagtaagttgttgggtggtttaatatattgtaacacatctttatgcgactgttctgattatttcaaaacaaaacaaaacaaaacataaaatcccatagcttttgttttttgaatctctttaatttctgtgcatctggaagtgaaggatttgttttcctttgtttcagatactatgtttagacacattgtagttttaaaacacaaaaataaacattaaggggatgagaaaatgtttaatttggtaagacttgcaaggctaagtagagcacacactgtagctctacttttagctactgtaggcattatgataacccactgtaggcattagcaaaattgtgagtttggagtagaaggacatgagaaggagatcatatgaaggagaaaaagaattaagctatttgtggtggtgcacgccttcgtttaaagcactcaggaggctgagacagcaggatctctgagttctaggccagccagagatagaaaattgattcccaccaaaaggcattcatttggagaatgccatctgcacagtcttaaacctctgagattgccaagcaaaacaggatatatttcaattctactgcaagttaattacatggtataaagtagtcaaggagtatgaaaaagaatgttaaactgaaataacaaattgaagctggggatatagcatagtgatagtgtttgcctagtactcaaggacctggtttcattcccagtattgtaagataagtaagaattggctccttttatagaatcagaggcttctatacccttaactacttttaaagcaaaggtttatgtggtgggactaatgagacaatgttgttttaagtacagtgtcagtatatcagccttctcagtagttcaagaatgcctagggcattaaaagtctgaatttttgttacaaaatataataaaattattactttataaggttaaaaaatatttttcccatgtaagctattatgtagtactacccagtatacatctttgatacatctattgaagggctatgcatgtgtataccaccttgatatatttgaatatgaaaattacattcacttggcataaaggtgctggatagaaaagtggttgtaggtaataggtcctctgagaaacctgagtttttgtggtgggaagcggagggtggaaggttgagacaagatttcactgtatagccttggctgtcctggtcctcactctgtagacagatatccaccaccacccagcttccttagttaagaccagtgagtccagttactctgtggagcacagtatgaatggtattaattatggataatgtcaacaaatatgtttactttcttggcttaagttatatcctatcaaattttattctttagatgattagaatataagaaatactgttggtatttttaaaaggtctgtctgtcccagctgttcccggagcccttggtcctctcacacttacctcctctgctgtcagtggaaggatggccattcctggggcaagtggtatgcctgggaattctgttctgctggtcaccaacctcaatcctgacgtgagtggaaaaatggtctaagtctttcaggaaggggtatagtggattcttacatatagtctagttttgtgttataatgcttaagtttgtttaaggaatttaaataaaaattatcaataggctgtgtagaagcataactagtgctgtaataggataaactgtctttattatattataaatagttgtttttaagttatgctatattaagttatatttttgtgttatccttttcagtttatcacaccacatgggctttttatcctatttggtaagtttttaaaattgtttttaatattatctgtgaaatgagcatattttattcatttagaaatacttgtttgcagagtagagactgagaagggggacaatattcgaaatgtaaataaataatggaaacaataaatacttgttcattacgttatatgttttatattatgtttgacactggagctagagcaaagattataaccagggaagttagatttataaacagaaaataaagattgtgagtattagtacaaagcagggagtacttgcctagctgactcaggagaaatagtgattaagtagacttgttaaagttgaggaagagtcagcaaggagacatagtgggtgcatgtcttcacacatagcagtgagagatttcttagaagatgtatgcaaggtaaaggaagcccacttgaaagtataaaacaaacatgttgagctgggactgatgacgagtcatgcagtacttataaagtatgtgaagattagttccctaaaatacataaataagtatataaataggaaaaccatatcattttaagcaagacttttaggattggttttgttttttgagtattgggaatcaaacctagggctaccaaattttactctgtttttctcaggctagtgaggccctatccttaaaaaaagagaaagaaaaaagaaaagttcagaaactttataatagtcttcccctctcagttaaaagcataacaagtatgtattccagcttcataggatcaattatttatacatctatcttttattatactcatatgtcatgggacacacaaacatgggaaccatgaaatgagcagtactcaagtataaagaacataatacaaagcccttcaccattagaaatagaaagttcaaatggaaacattgtatttttgctgtacttcattaattattacactgatagattcagttgaatccaggcctttttgatttgctttacctagaaaacttctgtgttttcctgttagcagatttgaaaagtattgtttttgaatgtttaacaaatagggcaggtgattatttctaagttctttaagtggtaatagttggttgggtttttttagacctagagattgaacctaggaccttttaggcaaggcatctaccacggaaaaggagtctctttgtttagctcagactatctttctgccttagcctgcaaagtagctagggttatggcatgctgcactgtacttggctgtatgaggctgtggagttttagtttttgttgtttgaaattggagatacgatgcaatggttaagagtagctagaatacctgcttgcttattgaattcagatacttattaaaaactttattatcttatatgtatatgatgtatatatgagtgcacatgtgccactgcatacatatacatatgaatgttaaagaacaacactagaatcagttctttccttccacatgttttggttttttgagacagggtttttggggtttttgtttgtttgtttggttggttggttggttttttggtttgtttgtttttcaagacagggtttttctgtgtagttctggctgtcctggaactcactttgtagaccaggctggcctcgaactcagaaatccgcctgcctctgcctcccgagtgctgggattctgtgtggccttagttgttctgaaactcaccctgtagaccaggctggcttcaaactgagaaatctgcctgcctctacctcctgaacactgggattaaaggtgtgagccaccatgccaagctctatttaggtgtttttttttttttttttttaatgtctacttcggcttcttgtcatttttgagatgggcagtgattcagaatgcttgatttttttctttcttttaaattttaaaattcatctctaggttaaatgttatctttagatgctagtgaattaacctttcttttctgtgccttgagggtatttgtagacagtctcttacaggattacaagtgtagtgacaatgcctctgcttttgtgacaccagtgataatctctgctgtagaaactgcagactagaatagtacatgggatggggtgatgaaaaggggctttcttaaatggtaggccctcctgtctttaatttttatggagtaaaagttaagatgtaattttccatgttggtctttattttctttccacactgagattatttccccttttgtgatagatgactgactgtggtaaccactaagaataaacaaacaagtaaaccaatgtgaataaattggtgtggtgagatgagctggaaggtgttagggtagcttttgagtccataggatagctatgaccggtatgagtgtagaagtggacatttgtgagagctcagaaggccagaaattccaaaggtgctggggattggctgaaagattttaagaaaggtgtcgaaagttgatgtctgacaggagcaattgtgtacatagtgtacatttatctttagccagggatacccaacaccagaaatagaaagatgtgacagggattgaatccattggggcatattctgaattcaatgtgtttatgagatatctgggacagattgagagataaaagctgtgaaacttattaagacagtatgtataaaattgtatggtatgtagcaagaaaaagaaacctgtagatacagggaaaaaatcacagccaggcatttagattcagtactttgtgttttgctttaattaggagtgtatggtgatgtacatcgagtgaagattatgtttaacaagaaagaaaacgccttggtgcagatggcggatgcgagtcaagcccagctaggtactgacagtggtggtgcccattttgcatattgcttccgagtgagcgttgtagaactggtacggatgtagttttgcagcagcacttccttctggtagtgttttcattatcatttgtacctgctttttttgcggctctggagttcattatgtaaaacacataacacgttgtcattgctgacagcttggactcagggctttctcccatttactttaaacttataacatgaggttttttgttttttttcacttgtttgtatgggttttcatttttcttttaaaagctgaaaaattatgtatgagaagaaacaagtatttttcttctaagttggattttctagaaccattgagtaatttaaaagttttggcaaatttcctaataatggtacaagaaggagttcttctcagacgttaaagtatagctactcagatgtcttacaaaaatgctttaattaagacaaactctatagtcatataaccattcgttgagggtttgttatgttccgtgcttgtagctttctggcactctgttcagaagttactttggttaggttaatttttaattgcttttattataaaatgaaatttatttatttttcctgtcagctcttgaaatgcttttggttcataaagttttatgtgtatgggtattttgtctgcatatttgtctgtgtgccacatgtgtgcccagtgctcgcagaaaccagagaagcaattggattcctggagctggagttaaagacaattagaagttgccatgtatgagctgagcattgaacatgggctctctgggaaagcagcaagtgccctgaatctgtgagccatctccggctcctgagctcttacactttaaactttcaaactgattacaattttaaatgactaaaattttttaaatgttcacctattttttgagaatgttaatcttaatactcaaagttttcctattttccttcctatccatcagcaatgaaccacctaagtggtcagaggctctatggaaaagtacttcgggctacactgtccaaacatcaagccgtccagctccctagagagggacaggaagaccaaggtctgaccaaggacttcagcaatagtcccctgcatcgctttaaaaagcccggctcaaagaatttccaaaatatcttccctccatcagccacacttcatctttccaacattccgtatgtatctaataagtgatttaaatgattaatctatgatatgtggtttaggagaagcaaaggccacaaaacttttctaaacatcatcattatcttggttgataatttcttttatgtaccattatgttgcaaggattctgtgttactaatcatacccttaaaagtggaattatcaacatttgaggattttcaaataagtagtttaattagttgcttctgtgtttaaagagggcataaaaataagaatatgcaggcattgttttgctagccatttgttcagtgctttatagaagaagtacagctctcagacaatatagcaacatcagcttgtctaaacatttgactgaagaattctgtggtaagagtacgtaacagcaggtataaatgtcatgtcaattcacaccatacctttgctgctttgaaactacatagaaaactgagtgcttacagcacagattgtatagtccaatggcatgagatatttagtctctgacccttcaaagaaaatgtttattgaaattccttaatattcagaaaaattagcaatttttgtctattttaaacttattcatgaaaggggaagccttggcatagtacttaaagttgtaggagtgtatttgtgtatttatgtgtgtacagtttaaaaactaagggagtggatggctaaagtttggaatataattgtaagaacatgaactaacaagtaaaagaaaaataattacttaagatagtattgactgctttagtttttctgctggcttgacggaaaccttccatctaaattaggcagtaaaatcaaacttcataccagttatacaaatggaggagtcatttttttaagaaattcttttttttttctctgtatgcttaccttatttttttttaattaggtattttcctcgtttacattttcaatgctatcccaaaagtccgccatacccaccccccaatcccctacccacccactccccctttttggccctggcgttcccctgtactggggcatatacagtttgcaagtccaatgggcctctctttgcagtgatggctgactaggccatcttttgatacatatgcagctagagtcaagagctccggggtactggttagttcataatgttgttccacctatagggttgcagttccctttagctccttgggtattttctctagctcctccattggggactgtgtgacccatcccatagctgactgtgatcatccacttctgtgtttgctaggccccggcatagtctcacaagagacagctatatctgggtcctttcagcaaaatcttgctagtgtatacaatggtgtcagcgtttggaagctgattatgggatggatccctgcatatggcaatcactagatggtccatcctttcgtcacagctccaaattttgtctctgtaactccttcaatgggtattttgttcccatttctaagaaggggcaaagtgtccacactttggtctttgttcttcttgaatttcatgcgtttagcaaattgtatcttatatcttgggtatcctaagtgtctgggctaatatccacttatcagtgagtacatattgtgcgagttcctttgtgtttgggttacctcactcaggatgatgccctccaggtccatccatttgcctaggaatttcataaattcatttttttaatagctgagtagtattccattgtgtaaatgtaccacattttctgtatccattcctctgttgaggggcatctgggttctttccagcttctggctattataaataaggctgctatgaacatagtggagcatgtgtccttcttaccggttgggacatcttctggatatatgcccaggagaggtattgctggatcctccaatagtactatgtccaattttctgaggaaccgccagactgatttccagagtggttgtacaaatggaggagtcattttttaaagaaattcttaaaggagtcactttaagaaacattcttaatgtacacggatttaaaaatatatcagctctctgagcggtggtagtgcacacatttaattccagcactcgaggcagaggcaggcagatccctgagttcaaggccatcctggtatacagagtagttccaggaaagccatgactacactgagaaaacttatcttgaaacccaaaaagtatcagctcatttctgtggcccctctaaatggatctgttatttttaagtgtatgtttgtatgttgttgtaagtatgtgttcggctagttggttggtgtgtttgtttgtttttggattttttggtcttgttttgttttcagtgtctacacccggtcctcatgtatggccagcaagttctcttctgttgagctaggcacccagccttctttttatgttgatgcttctaaaacttgagaccttcctatctcatcttcttcttgagcagctggaattgttgactttaaccattatgcccagtttgtttgtttcttgagcgtagcacattatggaggagctggtcaccattatagttacataagacattaaaggtgaagaaagaaatactggtgtttctcaactattcctaagttgtaggctctgtgccagtgttttacacgtgtcacctcattttatctctacagcaacccctttttaaagtgatttgtttatttttatttcatgtgcattggtgttttgtttgaatgcttgtctgtgagggagtgttggtctcttgaagtttgagttacagacagttatgagcctccatgtgggtgccagaaattgaacctgggtcctatggaagagcagccagtgctctttgcctctgagctatctccgcagtccctataacaacctttttatttttgctttgttttttatctaaactccatataacaaatacataccttttgactattataagtatatggtgcagtacacattctcattaagtacattcatagtttttgtaactttccactcctatccgcatcaccattccatcatccaagatgaaagggtcccattaaacaatcacactccatatttctgtgagctctagtctggtaactaactattctaccttaacttattagtttatccataatagcctttaaagcagtcattaggttcagtttattgatggtacccacactcaggaggacagttcattcaaaaggacatacagccaggcatggtggcgcacacctttaatcccagcactcagggggcagaggcaggtggatttttgaattcgaggccagcctagtctacaaagtgagttccaggacagccagagctatacagagaaaccctgtctcgaaaaaaacaaaaaacaaaacaaaaaggatatacaaatgagagggaatacggtgtaagcacagctgtttccttgaagaactattgattattttccatcatgtgactctgtaatagatcatgtcatgttagttattatagcactatataacactactcccaaacaccacataatagtaaatatttcttatctcatacttttaatcaggaatgtagaggtggctcaactggtgatctctgagtatgtttcataaggcagtggtcagaatgccaggcaaaggagtaccagaggatatagctcagtggtagagcttgtacttaacatgtagttaacttaacatgtagttaaactctgggttcagttcttgacacatactgctgtctctgatatcctaagggctccagaggacttgttacagtatgagaggatagccaggatgtaaatatttggaagtaagtcattagagatcatctcagagattggctatcccatacacattctgaaaccttgaaaactatagaaagtgtataattctaggctatagcaggtaagccagagctgggtatgtagctttgttattacttgtgttaattactaatgccagtagtgtgagaataataatcattttgaaaaaatagctatggctgttatttttagttttgcctttatatacttttcaccatctccagatatgtatatatcagtcttgactgttctgaggttcagaatacattgttggggatataaagtatgctagagatttgatgacagtctaagttcatccttgatttgtttgcaagtggggctaatatagttgacactctgatattttcacagtccttctgtcacaatggatgacctgaagaacctgttcacagaagctggatgctcagtgaaggcttttaagttcttccagtaagtccttgctttctaaagtaacattttatttaacatggattgctacttttttttaaagtagtttagcaaagtccaaaggaagggaagatttaaaagcaacattaattctaagtatttgtgtattttgtcattttaggaaagaccgtaagatggctctcattcagttgggatctgtggaagaagcaatccaggctcttattgagcttcacaatcatgaccttggagagaatcaccacctcagagtttccttctcaaaatccaccatctgaccttcccgtgaaattgtctccttatactggaccacagtttctgtaagatcttcaggcacagactgaagcagctcaagaccatttctgcctcttcacaaaataactcttcgggaatttgatattcgagaacagtcaaaacaagagagagtccttttcttcctctcgttttccccaacagtgtatgatcaaaagtttgctttgcctttgtattgtggtttctatgaaaataactttcggggggaaaaaatcaggaaaatctttttaaaataatttaattccctgaatgagatttaaaaaggacagagtttctttctgtttgggtccagagcagccttacatgacatttctaaactcctttgtactttgagaaatttaaacatacagacttttacaatttcttgatgtaatttaaatcacctacaaccaagtttttttaactttatgattcagaagtttccctgtagaaaatgacattcattcacttataaaaattataccagatatttgcatctattgatagttattatacataactacatggagatatattggaaacaggtttataaacgtgcatgctttctttcagatttcttttttccccccactgtagcacactcctttaaataatgtccatcttctctttttaagaccatttggaaaagcaaagtgttgcagttgtccccagggaaacagaagtgaaattcagcctggatcttttacaatatcagcataattagtcattttaggaaaaaaaatcatgttttaaatttcaaaatgacactgtctagtaatgtaatgtgatcttggaaaattttaaaagaaaaataatcctacttttttataattgttttcagaaaaaaagtttacagtcttaaggaaaaatattcaggtctatcatatggtttgacagattttttaaaagttatttttggtaaggtcttcttttagaaaaaaaaatctcaagggttttttgtaccactataatctctaatactcagaattactgtgtatttacttaatttcttattatgtgccttattatgtgcttaagatacaatagattagaattttatctaaatatctagaaagataaattgtgggcttggtgagcattctgttattttttcctgtcttggattttaagggttttggttgtttttgttttgtttttttctttttttctcgttgcaattttaagtggttttcaataagtaatagtttctactcagatttttggtgctttgggatagtggtgggatagagaagggtgagtggattgggaataaataactcagtgtgcacctgtaggcctctctaggttggctgccgccagccgtcagggaagtctgagctgtagacctgcagactcggatctctgtctgtctgccttcactgcccgttagattttgtctcaggattacttgattccttctcagcactcaagtgagaacctgattttctctgttaatgcgacttcattacagatagcccacatatttggagtatgagaaagtgggttatttttttatattctgaccctcttacttttttggttgaatgtaaaaagtacatattaatgttgcttcaatgattgtgtcatgtaaaattactttttaatatgaaactgcttttgttaattatttcttcaatgcgtgattggcttttaaaatacagaatttgtcagaggaatcaattttgtccaccccttctcacttttaataatctcagagtggatcatctcatctttttaaaatatctcagtctttactttcagccattaatttgaacattcttttaaaaaaaaaaaagaatgaaggaaagaaaaaaattgtataagctgaaagataattataggttgaagtcaaatcagaattccctcaatacagagcaactattggtaggctaggcagggaaatgctagattgggacgtttcagatgggttaccttcatgttggttgaatagttaggtatgatgattttccagtgggtgttttcccacttacatctgaggtgtattttcacctgaatactgaataagggagggaaaaaattaggactgtctccccaaatttgcttttttttcccctcacacagacattatcttaattttcagtggcattttaaattggattgcttcctttattttgagttgggaactactatgtaatttattaattcatggcactcatatcatccagcataagtgtagcaaaagtttttgagaatagaagggaaatcatactggtgttgaatgtaattctgaagtagggatggcctttaaatatgagagagaacattgaaatccttttcagggatttgtgtagatatgtgtgcgtgtgtatgtgtgtgtataaataagtgtatatacatacatatactcttttaatgttatatatacatgtgcacattacatacattttaatttattgacaaaattaacagtgatttgggaacgtaagatatgcttgttttaaaagagcatgtttgaagccatcagattgtgtctaaaattagctgtagcatatggatgctgtccatatttgagctctttactgtttattatagaggtctacaatatttgtgttggcatagttttaaatatcagggtggtgggaaaattcgatctgtgtatttttattttagcatgcagtattcagtatcttttaagcagtggttaatttgtgctgttgatgccttgctgagttaatctactttatttttcacttttcaaggtatcctgacttttacaaagcatatatattcaggacttagaaaatagcagtacacatttaataatagagttatatatcaagatgttttactttgggatttagatgtgttttgtgacagatgagaatatacaagtcatgcattctcttaattgacaatttgttagaatttcaggattacctggtatccccatagaatgttatgcgatctttgggactaaatactacaagcagctctttgtagcagtgtttgcactgaatgttttagagtcatggttgctgtctttttagttccttctttgtcttttcctactgtggtgattaagggtcctgttgtggttttggaattagcccttatgatccaggcatagtagcacacagctgcaattgaagcactggaggaaactgatggttgtgactttaaacccagcctggactgcagaccatgctccatgctagtcttgctaagatcctgtgtccttccctttccccagttaatctactatcaactttaaagtcttcatgtcatcaagcagagcatttacttgagtatattatcgtgcagttcctcatctagtcccataatgatcttttgtgcctcagtgaatctacttgtaaactccaagcttatctcttagaaaacccagtgtgtactgctatttttagaaccaaaaagcatgactatgattggagcatttttctcagcctttcctttgtcttgatctattgtcaattcgaataaaactgccagacttaaaatactcactatcgtgctaaaacaaacagtttagattgtacataactttgcagtgtaactcagctgtctccttaaggattgtgttagatataagactgtttgcagtccttttttcagagcaaatcctaacaggtacttgtgaattgttttaaaaatagaaaattacagaaatcttaatttggggtgggagcttaaagggagaaaaacaaaacaggaccaaagtttatgtgccttcttcagtagtcttaattgaccttttcctatttgagactaaggtagcactggtattttggttttcaggaaatatctactatatagattaagagactattgtccctcaaactggtcatacaagtgactagttatgactgagttaaaaagtcagctacacttatgccttcagcattatgtgttaccagttgaagagcagaactgctctcggtctttatggtagtcaccgtagctttcgcagcttgtcaggggccttggtgttgatagcagtcataaccgaaagctgctcatagcaaatttcacttcacactgtcagcagaggtttgttggtatgtcctttgtaagaacaggtattttaggtaggaggtttttggttttgtttttgttttggcgtctttaagactatcatcctctagtcttttttgtttcttggttgtcttttgttatttgtttttttccttgccactcattgttacccagatctttaaaaacacatcccatatccaggaagtactaatcaccaagattgctgaccacaccaagttttacactgaagtttcacctcattgctctgaccaaagactgcttgttctggttttaactcaaaggtgaagcattttccctgagctctttcctaaaagatcccatgcagagcggccttgacttttcctttcctattggtgaatagactacttagagaaaatgggagttgaccatgaacagagcgagacagaaggatggacggttgttttcagaactgtatttgaggaaggaatagcacagctagacgcctcgaacattgtctaatgttttacatggtctgttcataaaattcccttttctgtttgtaaggatgttcatctaacagaagaaaatgctgtaaatatttgtaacaacattttttaaaccaggccaaaaagaaaaaaaaaaaaggttttcgggaacaagttaacatataaagtggttttatataaaacagcgattgtcttgtatattttgataagcagcagtaccagatttcatttgtaatacagtttgtggtattggaagaaaaggattctgtgattgtctaagtgaattatgttataaatgcaaagaggagaaaatattaaaaaacgtattttctaactgtgtagtgcatggttaattcaagcttctgtacactacaatattgattccgcttcccttaggtttgtatatttgataactgttccttggaatctcagcctcttttcctaacacatatagcattgtagcatgccttttaataaatgtcatggcatctgtactctcttaaggtttttctgtgttcttgtctgtactttgggttcccttttgtcttacctgtaatcccaatgatgtcatttgttttgttttgttttgttttccccatggctatccatctcaagttgtcacactggatagtagatactttaacaactttaaacgccgggcatttaaagaagaaaagccaaagtcatctattctttaggtataattctcatttttaatgaaaaaagcacttccctgtttttaaaacatactgctttgtcaggcatcctccattgcacatataaatcagtgtactccaaggctcctcccctcctttcccctttgtatccagggaggcatggaggatatgaccttcagtgagttggagtccttttgagttcagttgctagctggccatatattgcttcactccagacaaacactggagttcaggagtcctgaagagtcatgtctgttttactcaaaatctctagaaagtgggcatttatttttagcacaaaaggaaattttacaacactgctcattacctacagcttacccataggatctattattcacttaaatgttactaaataacaatttcagtaaaaaggggcagaagaaaaagataaccctataaccaaatgaaactttgatcagttgattaactgaaatgtgtacagcagagggcatagggttatcaccaagagctgtgccagttttaacatgacaactaagagaccatgcttcagttttcagttgattgcagttctctttacctttactgcctgctacacgtaagtgctatggttttatattcccaagcacagataacagcaggattgtgaaggtccatccacagtgatagggggatgggatggacagggcttatgtcctctttaccaagcccaacttaaaagacactgggtatcttttaaagacgacagtgtgctgggagcattttgctaaaaaatttaagctgactatatagtttggcaaacctagccctttaaaaagttcattccttgcagttatagggcctgaaaattcaagttgtttttcaacttcagtgggaatttgacaccatttctcttcatgtgcagtttttcttctgatactacctgtcttgctgtgtagatcttgtggtctttgtgtgcctccctttggttctcttcccttgtgtttgtcctaatcttacagggcaagcaaacttggtgtagtggcacatgcctgtagtcccagcactgcagaagtagagacaggagggaggatcacttgggttccactcagagatgatgtttcaaagcaacagaacaggcataattaagcccaaccataccatctcaccttgctttatctactataggccttgtctctaaatacagtgtgagatgtggggagttagacttcaaatgtgagttggaatgaggggtacacagttcagcccacagcactgtggaataggaattactcagcaacttacactgcttatgccaacagttgagttgcatgctgggaaagtaaacattaaatgcatgtgacttttgggagaatgcagtatagtggccataaagaccatctaattttaaatcatacctttgaatttctgcctctaaagttccaaagctggatggtgtagctgctattctgccaaaataaatactgctgaagctgccatacaactagtgatatggcagtacctattttttactaatcatatacttctactctagacataagccatttgaaagcattcattgttgctcagacaggtgttatttgaagaaaaaagaataatagaacacaagtctgtgtgtgtgtgtgtgtgtgtgtgtttgggacagcgtttctctagccctggctgacctgggattcaactttgtagaccaggctggcctcaaactcaagagatctgcctgcctatgcctcctgagtgctgggattaaaggtgtgtgccaccattgcccagccggaacctgtttgctgaaacaaggtcccatggcccaggctagtttctaactcttaaatagtgctggggttaaaggcatgcactaccactgcctggcttctgggtctagttaatcctcaatgtgttaatacttggatggtgctactgggtaaaacagatggttaaaaggattaaagctatcttgtgtctgttatagagatttctttcccaaggcattcctacgtcatgcctttttttgttgttgtttcttgaaattaatgggaatttgtcttttttgagttcctatcttaacaattaaaaggataaaaataaatggtttcatgaaagttaactccatttctgaaccattgggtttcagcatggaattcacaactagtctaaagaaatagaaaaagaatggatgaattcctgtgaagaggcagtaatggttcttttggaagaaagtgccctctgttagatttaagtcagcacctatatctttgttcttggcctaagattatagaatttgcagaattcttgatcttggaagaatacaaatgtcaagttgtaatctgcttatagagattgtccttaaccaaaagaaagcagatattgagtatctaaatgtcagcagatgtacactttagaatcagatgcagatcaagagataatagaacattttaaaatggggctgtacagtgattacatagaagagtctcgcagatgggatgtcaatcaatagaagcagtacagaacttagaggacgtatttgcatcaggttcagaaataggaccttggagtgaccttggcaaaggaagagattgagaggcggatgagtctgtatttcacgtctgtgccagttgctcagaagcattgattttctgataatacatctttgtctatgtaggatttgtgtttctgcgttgcactttaatgaggttttaagaaattatcaagcccaaggcttgtgttgcttaagtcagaagaatatcctatccactgaagctgtcttaggaagaactcaaaaatgccatggtctaagtttactgcaaaattcttccccatctgtgtgtatgtcaagtttcactaacaaaagaccttgttttaggtaaaattgatcttctcaatggtttgatacccagctagattcagaagtgttacatttcaatgcatattagctttgtatttgcaactctaagcctgatcagtgggttgttctcaaaccaaatgtgtttttatctagaggagccaggcagactatgttaactctatcatccccccctccccaaaaaaaaactgtagtaagacgcttacttacacttgtcactgatattcttaacccatacacgtataatatgatagaaccccatgtatctagtatccaactgcagttacttagctgcgtggtaatcaaatgtagggccttatgcatcctaagcaagtattctactgctgaactatacacccagctttctttgtgtttattttgatatgccgaggtttgaaccaatgtcaacatgtttgctagacaagttcttgccggctaaaatgcataacacagtctctcctctgatcatcaacagtcactgctggccagtgtggtttcatgtctctccccttttttgctcaccttcagggttatttttaaaccattctgtccgtattaaagcgtggttgtcagtaacagcttttcttcccatgatttgtgttttgcttgttgaactgagctcctgtagaaagcttttgctgtctggatgttgcagattgggtttcccagggatcctaactccaacatcttctgaaaattggttgctcattcagactagtttccttccttccctgcttctatttctattcttccttttttttatctggcaagaatacttcatagatgacaccgtgtcctgccttgtgacagcagtaactattgataatcatttcctagctccattaattttagcgactataaattggtaaaactgtgctgttggggattaagctcatacacgaccttgtacgcgataaaagagtgctctaccactgagttacatccccagcccacaaagctctaattctgttgcttgcttccatgtattaattggattgattctgtataagagaattgtctcagtaccatgtatttggtattctgagatacacagttctagtaacaaagaaattcctggagagtccttgcccactttgtaaattattttgaatcctccaaatcccttaaaagaaaaaaaaaaaaagacttgtgttcctttgacatttttctaatatttgtgatagtaaagagttgtataatgaagccttgtttctctcactcagctaaagcaattcatgactgctgttttatatacccaacatgcctttcgccttactaggaggagcagggcctcttgcagaagaccagcacatggtgggtatctgttgatatagttacttgccatgtgctttgagtgtaagtacttctggttgaagcctccctttttcttggcagccactggtcactacctctgaagccagagaagccatgggcttttctgaataataagactagagtgaccctaagttgggctcagtagtaaaaggcagccagctgaatggtcactcagaaaaggaaacagaggctgtatctcagcctaccatgatacttcctcttaacttcagggagtttggtacacaacaaaaaagtagaagcatttttaaagagtattcagatccctggatctatgtcctcactagaactgttggttctaacctgtatttttctcactgatgttttgacctggacaatcccaaggatgtcaagatagtctgcatattgtttgctagggctgtcagaacagtatcacaaacttaggtggttcagataatagttgactgggatgttgtcatggccctgggtctctcctcagcaaaaacaaggtagagaagttcatatctcacgttcttgaaattgcaaatatgagatcaaggtgcccatgggtttaatttcttctgagatcttttccatttgcttttgagagaaagaaccaattggatggatgatggagtaaggatttgggggaattgatccacacacaatcatggatgcctgtggcctgtgctctgtgctccgtgctcagtgctcagcgtttgttgaagcctgaggtctcaaaaacaggcatgtgttaaattccttgccaaacagaaacacttccacagacttttggaaatggttttaaggacaatctgcaaaccaacatttcccgcagaatatctacaaaatggtcagagtctgacccagaatagctcctctgtctgccatcacagctctcagtgctgcatctctgctgctgaggttaaatcctagcacggtagaggtaggaacattatttggcttagaacctactcatgaaatggagctatttcttggggtatagtttctatggggtctgggtcacttctgtgtcagcttatgttgtgtgtggtttttttttttgttgttgttgttgttaataaaggcaactccacccccacccccaaaccccagctgctcccactacagactcctgggcaagctgagccagtctactgtaaaaggtttccttccctgttctgtcttcccgattccctatctgcccccctctcccttctctcttcttttacttttttttttttttatattggcttcatccttggattttagtcctagcaagactcctcagtcagaatttcatattaatggaaatactctcaatatttggttcacttccccatttcccactgttggtatggcctgtcctcaagcaagaattccttttccatgccctgatggcagcgtatgtgttgccattgctactcctgtatcaagagtttgcattgagccctgctaatttgagtcttgagtgattcctagcatgatagttctaaacaaaattctcttgtagtgcatttggggataactttcccaccaaccaggggcccagactgtcactcagagaggcacactagtgtcccagctccagtgggcagctcagatgatacttcaggaaaaacaaacaacaaataaacaaaaaagccagaccataaaaccattcctaatctgtaagaaggatctgccttctgggctgctgactactcgggtaaagagtacttgtctactgttcgttggacaaaagaaaccagaactttaagaatctattcagttgaagatgccagaactggattggataaactgtggtgcaagctatgcccccagagcataattaagaactgtaaagcagtcatctgacaacagtgtgttttagcagccaggggagagaggaagtaagccctaccaaaaccactgattctggacagactctgtagtctccagtagagacaaggagaacaagttccagagaatgggaccagtagcccaaatcactacaatgttttctgagatgtacaattttcaaccatgtagagaaacagaagtattgtccataaaggaagcaaagcagagcaataggaaacattgtgctggggctagaaagagacttactgttactgtagagcacccaagttcacaactgcctgtgctccagctcatggatatccaaggcctttcagacactacactcatgtacaagcacacacacacacacacacacacacacacacacacacacacacacacacacttttaaaagtgattgtattaattagagacactaagtgtcagatttattggataagcattttatagaagccaatgtgtatgttcaaagaatgaaacaatgcatggttaaagaaataatcaaacatccaatgttacgttaaatacactctcagaaacttattgcatggagccatggaacttaaggagggaaaagaaaaccaaacaatggaaacagaaagttcactagaggtttccaatactacattaaccggcaacaattagagattagataatttgaggaacaaaggaaataaagagccttgatataggaggcttccacgtcataggggagcatgttgaaaatcaaagaaaagaacatctttaagcagcaggggggaaaattaaaaaacaacaacattacttctgaaggaatcataataaaattagctgacttggcagaagcagaggaggcagagagcagtgggagggacaacattgaaagtggagaggaagccaggtgtagggctggagacatgtctcagtggttaaaagcgctgaaagccgagtgacgatggctcacaactctaatctcagcatccagaaagctcggcaagaaggttgtctgttttgagtctagcctgagtgatctatgtagttctggccagcctttgctacaacgtgagaccttttcccagctataaaattaaaaaaaaaaaaaaaatctatcaactaacagtcttgtatacaacaaaactgtggttcaaaataagaggaatccaaaggcttcccaagcaaaacagacccatgacttcagtgctagcagacctgccttagaaggaaatattaaaggcaagtgacctcttgtcattcttgcatgtaaaaaacgctagccagcacttcagcacttcccttggggggtgttgtaaattgtaaaaacaagaaaaaaaaagcaagaacatgacaatggctatgagaaggaacgtttgttaatgccaggtctgaaataatgccaagcaagtcaccctgtcccacatcatctaggaatgtgtatgttgggtaggccaaattgttttttaagtcaccgtgcatgtcgtgaattaccgaacaagaaccctgagtattgacttatgcgttacaattttttttgcaagcagggaaccccacaaatactggtgttggcaagactatatattgttcagcagctccacagatatgtgaataaatgactttatacacggatctccattttctgtgttagaaacaaagggaaaagactataaagggctaccagatagacccacccaacatgactgacttccacagtgagttgaagactgaataacatagtggagtatttgtctcaaatctgaacactgagagcatctacttccacagtcagggtgaagatctcaagtcacatcttactgatccgttttcctgctgtctgcccctttctcaggttcaccttctcctctactcaagagatctcgttctatcccatctataaatcctgtcatctaggtgttacagagcaaggctgtaatgtgtttggtggagtgccggggaggactccttgcattggtggcaccaatgtagatctggtgtaaggatcttacaccaggggcctggtttagccttctgaactttgtcttctactcttgtcgcctttcttctctgtcacatgaagataaaatccctcaccaaacccagcaccttgacctggaacttcctactttccagaactgtgagaaaatgaaacatctgcattgctcatgtcagataccccacactgtccatccctgtatgcactctccatccctctatgcactttccatccctgaagctcttctggattagcctaccagtctttaaaatatgctcaggcttctcccagcttaaagcataaacctccaggctcccttgctgacttccttgttctccgttgctctctttacccttcataggccaagcttctgaaaagaattttttttgttttttttttttttgattgttttgttttattttcatctctttaattgaagcctcctactttgtgtatgcacgtgtatgcatacggaggccagaagaggatgtcaggaatcttcctctatcacctcctaccttatttgtgtgtgtgtgtgtgtgtgtgtgtgtgtgtgtgtgtgtgtgtgtgtactgtatgcatgtgtactcatgtgtgcacatacagactccagaggagtggtcagccattctctctccacctttgttacttatttggagcccagggcttttactggacttgtagcctgtgagctcttggaatccactggtcttcacataccaatgctggaggttacaggcacacatgaccatgcctagctttttgcataggtgctggggactagaactcacatcctcttgctttcacagtaagcactcttattcactgaaccattcccttggccctttaaatatttttttgctgtagtataatgattcaaaagtcaaaatttgcttttaaaattaaagcctgcagttgccttaaaacagcacttactttcatttgtagctgcagccatatggcgccaagcccttcacatgagcagcactccctggctgtcatctatctgcccagtgccacctggttctgcggctgctgaactagctctcctcccacgtcagccacgtacctgccagcctagcgccttacattcaaatctctgtattttgtgttggggaaaaaaagagttttcaaaatacaatcaaactattttcttgctgttcttcagtctgagcgttgaatgtgcagcctgctgacccaatgactaagaatccctgtgcccagtaataaacattcagagaaatggttaagtccccctttgttagataagtcatttacccagccagcctttctgtgttgaccctgttaacgtctccagcagtatggacagtgagaatgtaaacaaacattgcaattgtggcgtcagagtggcaagtgacctttttgaaatttccagctgtggaaatgtcactgtttctcttttcgtttgtgactaaaatttaatgtcatctgccagaatctgtcttctgattaccagcaactgtataaagaacacagctacaagtatctgaatttgcagagaccgtggacctatttcaagggaggtgatcttttgtttaaggtactgtggagatgacaccagggaggaaataaccttggtgtgaccagtacagtcacaccccaggtgctattagatggaaaagcatctgactataaacttgagaagtgtttggccacggatgccttcgctcagcatctgtcaagtagctaacgtgctatggacattcttgatgaaaacttgaataagacacggcacccaggtcctggctagttggggcaagataagtaagcgggctctcacaaggtgttagaagaaccgggct

SEQ ID NO: 288 - DNA, 5133 bp, Mus musculus
gaccggccggagctgcggagcggctccgctcgctggtttcccggagccgccgcccgctttctccgcccgcggtgagcccgtcaatccccgcacaacgcgctcctccatctgggccatggatggcggggatctgatgagcttctgtcttctggtgtcattaacggaccttctaccatgaacagctcgacttctgcaggtgtgtatgctaatgggaatgacaacaagaaatttaaaggagatagacctccctgttcgccttcccgtgttctccatcttcgaaaaattccatgtgatgtcaccgaagcagaggtcatatcattaggtctaccatttggcaaagtaactaatcttttgatgttgaaaggaaaaagccaggcctttttagaaatggcttctgaagaagctgctgttactatgataaattattacactcctgttactcctcatcttcgaagtcagcctgtttatatccagtattccaatcaccgagaacttaagactgacaatctgcctaatcaggctagagcccaagctgcactgcaggctgtcagtgcagtccagtcaggaaacttgtcccttcctggagctactgcaaatgaaggcacattgctacctgggcagagccctgtgctccggataattattgaaaacctattttaccctgtcactctggaagttctccatcagatattttctaaatttggcacggtgttgaagattatcacctttacaaagaataatcagtttcaagccttgcttcagtatgccgacccagtgaatgcgcagtatgccaaaatggctctggatggccagaatatctacaatgcgtgctgcactctccgtattgacttctccaagctcaccagccttaatgtgaaatacaataatgacaaaagcagagacttcactcgcttagaccttcctactggtgacggccagccatctcttgaacctcctatggctgctgcttttggtgcaccgggtataatgtcctctccatatgcaggggctgctggctttgccccagccatcgcatttcctcaagcagcaggagtgtatggtgatgtacatcgagtgaagattatgtttaacaagaaagaaaacgccttggtgcagatggcggatgcgagtcaagcccagctagcaatgaaccacctaagtggtcagaggctctatggaaaagtacttcgggctacactgtccaaacatcaagccgtccagctccctagagagggacaggaagaccaaggtctgaccaaggacttcagcaatagtcccctgcatcgctttaaaaagcccggctcaaagaatttccaaaatatcttccctccatcagccacacttcatctttccaacattcctccttctgtcacaatggatgacctgaagaacctgttcacagaagctggatgctcagtgaaggcttttaagttcttccagttggctgccgccagccgtcagggaagtctgagctgtagacctgcagactcggatctctgtctgtctgccttcactgcccgttagattttgtctcaggattacttgattccttctcagcactcaagtgagaacctgattttctctgttaatgcgacttcattacagatagcccacatatttggagtatgagaaagtgggttatttttttatattctgaccctcttacttttttggttgaatgtaaaaagtacatattaatgttgcttcaatgattgtgtcatgtaaaattactttttaatatgaaactgcttttgttaattatttcttcaatgcgtgattggcttttaaaatacagaatttgtcagaggaatcaattttgtccaccccttctcacttttaataatctcagagtggatcatctcatctttttaaaatatctcagtctttactttcagccattaatttgaacattcttttaaaaaaaaaaaagaatgaaggaaagaaaaaaattgtataagctgaaagataattataggttgaagtcaaatcagaattccctcaatacagagcaactattggtaggctaggcagggaaatgctagattgggacgtttcagatgggttaccttcatgttggttgaatagttaggtatgatgattttccagtgggtgttttcccacttacatctgaggtgtattttcacctgaatactgaataagggagggaaaaaattaggactgtctccccaaatttgcttttttttcccctcacacagacattatcttaattttcagtggcattttaaattggattgcttcctttattttgagttgggaactactatgtaatttattaattcatggcactcatatcatccagcataagtgtagcaaaagtttttgagaatagaagggaaatcatactggtgttgaatgtaattctgaagtagggatggcctttaaatatgagagagaacattgaaatccttttcagggatttgtgtagatatgtgtgcgtgtgtatgtgtgtgtataaataagtgtatatacatacatatactcttttaatgttatatatacatgtgcacattacatacattttaatttattgacaaaattaacagtgatttgggaacgtaagatatgcttgttttaaaagagcatgtttgaagccatcagattgtgtctaaaattagctgtagcatatggatgctgtccatatttgagctctttactgtttattatagaggtctacaatatttgtgttggcatagttttaaatatcagggtggtgggaaaattcgatctgtgtatttttattttagcatgcagtattcagtatcttttaagcagtggttaatttgtgctgttgatgccttgctgagttaatctactttatttttcacttttcaaggtatcctgacttttacaaagcatatatattcaggacttagaaaatagcagtacacatttaataatagagttatatatcaagatgttttactttgggatttagatgtgttttgtgacagatgagaatatacaagtcatgcattctcttaattgacaatttgttagaatttcaggattacctggtatccccatagaatgttatgcgatctttgggactaaatactacaagcagctctttgtagcagtgtttgcactgaatgttttagagtcatggttgctgtctttttagttccttctttgtcttttcctactgtggtgattaagggtcctgttgtggttttggaattagcccttatgatccaggcatagtagcacacagctgcaattgaagcactggaggaaactgatggttgtgactttaaacccagcctggactgcagaccatgctccatgctagtcttgctaagatcctgtgtccttccctttccccagttaatctactatcaactttaaagtcttcatgtcatcaagcagagcatttacttgagtatattatcgtgcagttcctcatctagtcccataatgatcttttgtgcctcagtgaatctacttgtaaactccaagcttatctcttagaaaacccagtgtgtactgctatttttagaaccaaaaagcatgactatgattggagcatttttctcagcctttcctttgtcttgatctattgtcaattcgaataaaactgccagacttaaaatactcactatcgtgctaaaacaaacagtttagattgtacataactttgcagtgtaactcagctgtctccttaaggattgtgttagatataagactgtttgcagtccttttttcagagcaaatcctaacaggtacttgtgaattgttttaaaaatagaaaattacagaaatcttaatttggggtgggagcttaaagggagaaaaacaaaacaggaccaaagtttatgtgccttcttcagtagtcttaattgaccttttcctatttgagactaaggtagcactggtattttggttttcaggaaatatctactatatagattaagagactattgtccctcaaactggtcatacaagtgactagttatgactgagttaaaaagtcagctacacttatgccttcagcattatgtgttaccagttgaagagcagaactgctctcggtctttatggtagtcaccgtagctttcgcagcttgtcaggggccttggtgttgatagcagtcataaccgaaagctgctcatagcaaatttcacttcacactgtcagcagaggtttgttggtatgtcctttgtaagaacaggtattttaggtaggaggtttttggttttgtttttgttttggcgtctttaagactatcatcctctagtcttttttgtttcttggttgtcttttgttatttgtttttttccttgccactcattgttacccagatctttaaaaacacatcccatatccaggaagtactaatcaccaagattgctgaccacaccaagttttacactgaagtttcacctcattgctctgaccaaagactgcttgttctggttttaactcaaaggtgaagcattttccctgagctctttcctaaaagatcccatgcagagcggccttgacttttcctttcctattggtgaatagactacttagagaaaatgggagttgaccatgaacagagcgagacagaaggatggacggttgttttcagaactgtatttgaggaaggaatagcacagctagacgcctcgaacattgtctaatgttttacatggtctgttcataaaattcccttttctgtttgtaaggatgttcatctaacagaagaaaatgctgtaaatatttgtaacaacattttttaaaccaggccaaaaagaaaaaaaaaaaaggttttcgggaacaagttaacatataaagtggttttatataaaacagcgattgtcttgtatattttgataagcagcagtaccagatttcatttgtaatacagtttgtggtattggaagaaaaggattctgtgattgtctaagtgaattatgttataaatgcaaagaggagaaaatattaaaaaacgtattttctaactgtgtagtgcatggttaattcaagcttctgtacactacaatattgattccgcttcccttaggtttgtatatttgataactgttccttggaatctcagcctcttttcctaacacatatagcattgtagcatgccttttaataaatgtcatggcatctgtactctct

SEQ ID NO: 289 - protein, 482 aa, Mus musculus
ARQSPHNALLHLGHGWRGSDELLSSGVINGPSTMNSSTSAGVYANGNDNKKFKGDRPPCSPSRVLHLRKIPCDVTEAEVISLGLPFGKVTNLLMLKGKSQAFLEMASEEAAVTMINYYTPVTPHLRSQPVYIQYSNHRELKTDNLPNQARAQAALQAVSAVQSGNLSLPGATANEGTLLPGQSPVLRIIIENLFYPVTLEVLHQIFSKFGTVLKIITFTKNNQFQALLQYADPVNAQYAKMALDGQNIYNACCTLRIDFSKLTSLNVKYNNDKSRDFTRLDLPTGDGQPSLEPPMAAAFGAPGIMSSPYAGAAGFAPAIAFPQAAGVYGDVHRVKIMFNKKENALVQMADASQAQLAMNHLSGQRLYGKVLRATLSKHQAVQLPREGQEDQGLTKDFSNSPLHRFKKPGSKNFQNIFPPSATLHLSNIPPSVTMDDLKNLFTEAGCSVKAFKFFQLAAASRQGSLSCRPADSDLCLSAFTAR

SEQ ID NO: 290 - DNA, 98948 bp, Homo sapiens
atcacagcagccttgatctcctgggctcaagtgatcctcttgtctcagtccttgaacagctggggaccacaggcatgcaccaccacgctcagtgaattgttgttgttattgttattgttgttttgtagatacagggtctcactatgttgcccagcctggtctcgaactcgtggccttaagtgatcctcctgccttagcttccccacttttttttatgtcttaatcacttggttaaggtgattttctgccaggcttttccattgtaaagttaccaattttcttttcgtaatcaatgatttgttggaagatgctttgagactagagtttattctttaacccctaaatatttgagtgtattacctataaacaaagaatttcccattcattactgtgatacagttaacaaaatcaggaaattaatctgaaataggtcctcagtctttttgtttcattacattgactctttttttctttttaaaataaagatgtgggatttcactatgttgcccaggctgaagtgcagtggctactcacaggcacgatcctagagcactgcagcctccaacgtcctgggctctgatgatcctcttgcttcagcctcccatgtagctgggactacaggcataagtcaccacacccggctaattaaaaaaccgttttttttcagagacagggtttagctcttgtccaggctggtctcagactcctggccttaagctatcctgcctcatcctcccaagttgctgggattacaggcctgatacactgtgcctggctagcaaatctgtttcagagtacagttgtccctcagtatctagggggggccaaaatccatgcatactcaagttctccagttggctctgtataggtgaagtctgcctgcatgtataaaaagtcaaccttcatataactgggttttgcatcctgggaatactgtatttttgatcctcatttggactcgggcagttcaaactcactcatgttgttcagggtcaactgtatttccatataacttaactcagttccttctgaatactttaagtcatctctaggttatttataatacgatttaatgctatgtaaatagttgttatgctgtattgcttagggaataatgacaaaaaaagtctgtacatgtttatacagatgcagtttttttccaaatattttcaatctgtgattgtttgaatctacagatgcagaacccatggatacggtgggccaatcgtatattaaaaaaaaaaaaacacattttccaccataactgcaactgccctggcccttaatccggattatcatcacagcttcctaaccagagtccttccctctttgtcttgttaaagactgttcttaacacagcagccagagtgatcctttaaaaaagcaaattgatcttttcactcctgttcaaaactctctttccctcatttcgctcagagtaaggttctttagaatggccgttaaggccctgcatgctatgacacaccttctctctaatctctttacttctccccttgctcattctctttcagccataattgcctccttactgtttttccagaacatgcaaggcattttgtttcctctacctacaacattcttccctcagatatctacatgcttactccttactacttgtaagactttggttaaatgcctttttctcttaagtcgtaccttgctgtcctatttgaaattgaaattcttttcacctctggcactcctgatgctttttctcctactttttaagaagcacttaagactttaggacataatacataatttacttactttgattattatgtttctttgtgcaagattgtaagctccattaaggtaagggcagggatttcgtttgttccctaatcttccccagtggttaaaggcctggcacatagctggtggctcagtaaatatttatcgaatttgttgaatgaatgaatattattgctaacacatttatacatactgaattcaatatgtatgggctatacctgtatggtaagaactgaataaatattcaaatgaatgtctttttgattggatatcatgaattagaaggctttttagaggaattacttgcaggcattaaagaaaatattcaatatgctgtcttcaaaaaaagtgttgatattttgttgttaagatgtccatataaaatgaaggcagtcagaatcattttattgaaactgtgtccaaacagtagtttttaaacattgccacagctgctcattgaaaaaatttcctctacctttaactattcttttttgttcccactgccctagaatctcaacagtggcagtcttggaataaaaatgtcacaaatgaacaatttggtaactattctttagagaatatttagggataatcacactcagtagatgaaaggtgttgatggggccacagtgtatgtgagaatgtgatctcattcaaatgggtcagtcagtagagttaccaatagcaaatgtctttaggtttagatgtgtttatagttacaggaggctatggaaaggtgaatgttaaaaggctaaatgtctaaaacaaaacaaaacccttggagtttcaggtagtgccacgcaatgaatgcagaccccctattgactattgtttattcctttatctctatagttattactcaatttttttttttttttttgagacggagtctctctctgtcgcccaggctggaatgcagtggcacaatctcagctcactgcagcctccacctccctggttgaagcaattcccctgcctcagctactcgagtagctgggattacaggcgtccaccaccacgcccagctaatttttttgtatttttaatagagacggggtttcatcatgttggccagactggtctcaaactcctgacctcaggcagtccgcccgccttggcctcccaaaagtgctgggattacaggagtgagccaccacacccggcctgttacttattttttaagaaaaaaagttttgaacatcgattatatatgaaacattgtagtaggttctgtagaggagtatataaaggtaagtaatcaggagaccataatcaatacatgcatatggtatagtgaaactccatatcaatatcacttttatttctgtttttggaaaaacttagagcagaaccagtatgagttttctgtcctgggaagtgttcacacggggtcactagactatctgttagaaaaaggtaggacttggatatttcagtatttaagatgctattaatttaaaaaaaaaaggtctaggattctggaaaattatgaagtagttttttgatagcctcttttgtatagtcatgtagtatcttgatagattaaaacaaatatcttttcttgaatttcatatgcattttagatacatgaagtttaaccatgaattaatggtttattttcagaatcatccgtacatgttacttcaacgtctttaatgctaaataaaaccaattcctatcaaatttgatgatgaaacacttatttgtgctgtttaattacagtatttctttgctttgttagccccgtgaattatgcatcagcaggcgagagcttcagtaattgatacttgagccagtaaagctgattgtgtgctgacttagccagagagctgacaagtccacagagcaactgctggacttatgtaaatttgctgtgtgtttctaaggacagtctccttagaaacacacagtgttgtttgcagccagcacctgccccgccactcccctatgtcttcacattttgctagttaaggccttcttttgtatacattaatttgtttacccgtggtacagtctttttttcttttggtcgtctgcattcacttgtccaagttttccttccttttaaaaatgtcttcattctgcttgattgtcttccattcttcccttaaaccgtaatctgttatcatagcagtcaaaccttacggaaaattgcatttgagacacttaggatataaatattaagtataattttgagaaatccttttcattttatattgaagtagtctgcaattaaatgcagtgatatgttttcaggagaaagaatttatgtctaggaaagaaaagttttttttttttttgttttgttttttaaataaaaggagtaggtttaacattggccaggtgcagtggctcaagcctgtaattccaacactttgggaatcctaggccagaggatcacttgagcccaggagtttgagaccagcctggacaacgaagtgagaccacatccctacaaaaaataaaaaaaattagctgggcatggtggtgcatgcctctagtcctagctacacaggagaccaaggcaggaggatggcttgagccctgattatgccgctgtactccatcctgggtgatggagcaataccctgtctcaaaaaaagggaatgtttaaagcagggcttccctgggccatactggaagaagaattgtcttatgccacacataaaatacactaacactaacgatagctgatgagctaacaacaacaaaacaccaaaaatatcttaatgttttaagaaagtttatgaatttgcgttgggcggcactcaaagccatcctgtgccgcatgtggcccatgggctgcatgttggacaaggttggtttaaagtaataatacagaactaataactctgttttcctcatcttttacaatgttttacaaagtagtgtgactcttgggatttagccttcataatatcaaaaaagcctttgttttctgtaatttgaaagtgagttcttgggaaaaaacttggctagaaaattgtggttatcagaattattttttatgactaattttcaaatgtaagtttcttttgttctctttgtcttttgtttttcatgttctgaaattattagggggagaaagttaccagcttttaaaagtgtcataattgcttcagaaacgtcttgtttattttatataaagaatgataaaacatttcccggaatgaaactttatgatcttatttatcttttttattttttattttgggacagggtctccctttgtcacccaggccagagtgcagtggcatgatcttagctcacagaacctcgacctcctggctcaatcaatcctcccacctcagcccccaaagtagctgggactacaggtgtgtggtaccatgcccggctaattttttgtgtttttggtagagatgggatctcattctgttgcccaggctggtctcgaactcctgagctcaagtgatccccccaccttggcctcccaaagtgctgggattacaggcgtgagccaccgcgcctggcaaatatcttatattttaattgttcttgatgtgtaataagacaataaaaatagcaattccaacacttcagttgatactagggtcccctttacttatgtgttattttaggcatgttttattcttttcaaaaagctcttcctaatatcattgaaatagaattgaagtagaattatcaaatgtaattgtttattttgaagactttgcaactttcaccatgtccttataaatagagtttatattttgaatgtgacagttaagatgttgcattcatttaactacaaatttggccagcactttgggaggccaaggtgggtggatcacctgaggtcaggagtttgagaccagcctgaccaacatggcaaaaccctgtctctactaaaaatacaaaaattagccgggcatggtggtgtgtgcctgtaatcccagctacttgggaggctgaggcaggagaatcgcttgaacccaggaagcagaggttgcagtgaacccagtagcgccactgcactgcatcctgggtgacagagcaagactctgtctcaaaacaaacaaacaaacaaacaaacaaaaatatatatatatatatatacaaatttaaattaattttctggtttttctgtacttgaatatttgatcatattttcagactactgtttttctttacagatggaagtccaatggtaattcagaggttaagaatagtgttttttttttttgcccaggcacagtggtttaggcctctaatcgcagcactttggaaggtcgaagcgggcaaatagcttgagcccaggagaccagcttgggcaacatggtgaaaccccatctctacaaaataatacaaaaattagctgggcatggtggtgtgcatctgtggtccctgctactcaggaggctgaggtggaaggatcgcttgagcctaggaggttgaggctgcagtgagctgtgatcatgccactgcacttcagcctgggcgacagagtgagaccttgtctcaaaaaaaaagtttaaaaaatattaagcaaattaataattttgttatatttatttaaccatgtgaagaattaggccaactgtgatgttatgagacaaggtccatgcaagactgcccttacatctgacaccaattgcaagtgtaggggattcccgaagctacccacaggttcaataatttgctagaaagactcacagaagtcactgaaagctttttatttatttttatttttatttttattttttgagacagagtctcgctctgtcgcccaggctggagtgcagtggcgcggtctcggctcactgcaagctccgcctcctgggatcatgccattctcctgcctcagccttccgagtagctggaactacaggcgtccgtcaccacgcccggctcattttttgtatttttggtagagacggggttacaccgtgtcagccagggtggtctctatctcctgacctcattatccgcccccctcggcctcccaaagtgctgagattacaggcgtgagccaccgtgcccggctgaaagctcttatactcacagcatggtttgctagaggaaaaggacgcagattaaaatcaagcctagggaagaaatgcctaaggcagggtcctgggaagtactgttgtcgagtggacacattacttccccagcatcagtgtgtggcagtaggcaaggagtattatcaaccagggaaactcactggagccttggcgtttacagtttttgttggaactctattatataggcataaataatttattgttcatgaggctgatttcagtctagtttccagccccttcaggtgtgacccaaagctcctaccctaaatcacattgtcgatctttctggcatggctattccttaccctatgactgtctggtgacccaaggccactaggcagaaaaaaaaaaaaaaaaagtcctttcaggcatgatatttcaaggacttagagattacctctaggaaggaaagggcaaaagccacacctttctttggacaaggtaagttttttactacacaaactgtgggccatattaaaataaggcagtcatttgctaattttaacagtatttgaaaaactcctgtaaaaataaaaatgcttcttagtcatcacctgtagtgcagtagtaactcgaagttaccctacattttgctataggaatttgagatttcttgtagttttatcttttcctcaaaaaagaaaagttgtctgtttcacttctgaatatttatcctgaaaaaatgctatattaaagacaaaacactataatttaaaataggggaatagttaaggatgttgttatagaattttaataatctactaaaaataattgtgatgcagcctgggcaaaatagcaagagtctacaaaaaaataaaaaataagcgatcaatcagtagagtaaagtataataaaaaaaatttttctgtctacaaaaattaaaaaatcagccaggcaaagtgatgcatgcctctagtcctagctacatgggaggccaaggtgtgaggattgcttgacctggaaggttgaggctacagtgagctatgaacatccccctgcagtccagccggagtgacagaacgagactctgtctcacaaaaataaataaatgaataatgacagactaacaacatggagaaagcttatcagttaaaaggataatagagcggagcatagattcatattataactttgtaaaattcatattaagatgaatgatttatcaaaatgaaatatgatccagccatttcacatttatagatttattctgagataactggataagtaggtaaagatgcttaaataaggtgattacagtgaaaatttttccttttttttctctaaacaaatctcatcacagtgttcacaggaaaaattcaaatgcataggcagatacatgctttattctttttctgaaaggttaaccataaatgagactttaataaatgtcccatacaattctgtacaattggactctggtactaaaaatggatacattttttttttcctcctaagacagagtctgactctgttgcccaggctggagtgcagtggtgtaatctcggctcactgcaacctctgcctcctgggttcaagtgattctcgtgcctcagcctcccgagtagctgagattacaggcatgcaccaccatacctggctaatttttgtattcttagcagagacagggtttcactgtgttggccaggctggtcttgaactcccgacctcaagtgatccgcctgccttggcctcccaaagtgctgggattacaggtgtgagccactgtgcccagcctgtagtattgattgattgattgagacggagtctcactctgtcgcccaggctggaatatagtggtgtgatcttggctcactgcaacctctgcctcccaggttcaagtgattctcctgcctcagccttccgagtagctggggctagagttgcacaccaccacacctggctaatttttgtaattttagtagagacggggtttcaccatattggtcaggctggtcctgaactcctgacctcatgatctgcccgcctcagcctcccaaagtgctgggattacaggcgtgagccaccgcgcccagcctgtagtatttattttcaagctgcccatgcgattgtattgattagccaaggcagagggctgttaatcttgcacctgatactctgctataggctctggaagaatataatctagtataaggcacaaataagagacctcaaggtatctgagaactaactttgtgtacatatttgacaaaattatgttattgataattatacatacaggaagaatatatcatgtgagtgaactaacattctggaaccatacacattttaatgttgaaagatgataaaaattaagttgaaccttttcacttgggatagaaaaattctcaaggatgtggtgccattttatctgtgactagtagataggattgggtatgtagcaaagggatagtgcttgaagcaggataatatcataaaaagatgcagaataagtatgatttatttggagaaaattacatgacaggggagtgttactgtgagcaagagatccagattagaaagattgtttcattgccatcacaggacatttagacttgattcagtaaccagtggaataatttcacattaatggttgattggaaatttatttggtaggaaagtaggtaacagtttatcgaatgagaaaaaaatagaaaaaaaacatgagtaacttacttttctccccaaattgaaactgaaatggcatgtgtgcattaagaagaatatagtcaggctgggcgtggtggctcacgcctgtaatcccagaactttaggaggcagaggtgggcagatcacttgaggtcaggagttcgagaccagcctgaccaacagggtgaaaccctgtctctaccaaaaatgcaaaaattagctgggtgttgtgggcggacacctgtaatcccagctgctcaggaggctgagacacgagaatcattggaacctgggaggcggaggttgcagtgagctaagatcgtgtcactgtactccagcctgggtgacagagcaagaccttgtctcccaaaaaaaaaaaaaaaaaaaaaagatgaagaatatagtcagcttttgggattcttagcccttgtctggggcctgtgttaacagtttaacacctcgtctaggtgcctttctggtaatctcaagtgtctctaagataaagtgctttcctgtacatttcttctttccagtttttttatgtcaaaaatatgaaaagagttggttcctcacagcaggtaacttgtttggatggtagaaaggtgtttgcgcttttgacttctcaaatgtttgactttcaagatactgccgtattcttttttctcgtcaatttttcctttaactcttttggtagatttcttatttgcctttcccttgagctgttgtatccctttatagttttgttgtagagagggtattaggtcaatgttttttttcattttacaaaaagctatttgctgtcaattgaaatttgtgtagtttctggtatatgttatctgcgttttgtaatgttcctttcttttctttttgttctgcttatctttgaagggatgccttctggaccactgttgtacagaagcacagtgttgaggatgatctgtaacagcgggctgtggcagggttgaacacaggtgttagtgatgactgttagtgaagacagcaggactctcaagccagtaggaatcctttggctgagaatgaagtacctgttgtcctatattttattttttaattttaattttattaaacttttcaaacaattagagatgcatggcaagttataaagatagtacagaaaggtcctgtgtgcccctcactaagtttcctccagtggttacatcttatataattatagtacaccatcaaaacagaagcattggtattgggacagtgcctgtatatagttctgtttgatcttattgcatatgtagattcacataactaccatcacagtcaagatatagaactaatccatcaccacaaagatctccttatggtaccatttataatcacctaccacctccacccaaccatctctatctcctggcaaccactaatctgttttccatctctataatttttgtcattttgagaatactgtaggtgaaatcatagagcatattatcttttgaggttgctaagtgtatgtttagtttttttgtttgtttttttttttctttttttcagaaaacaccaaactactttccagagtgtctgtaccattttacattgctaccagcaatgtatgagagatctattttttccacatcctggtctgcatttgatattgtaactttttattttaggtgttctgatagttaagtggtagtatcatggtcttaatttttccttgaagtggcttttgatttgcatttccttaatgactaattaggttgagcatcttttcatgtacttactggccttctttggagaaataccttttcaaatccaatgggttgtctttttttattgttgatcttaagggttcttaggtgttctaggtaccagtttcttgtgagatgtgtgacttgtaaatactttcttccattctccatgttgtctttttattctcttgatggtgttctttgaaacacaaaagtttttatatttgacaaagttcagtttatttatttatttattgccattcgtgcttttggttttgataatccattttttttgtttttatttttatttacttagagatggggtctccctatgttgcccacgttggtcttgaactcttgacctcaagtgatcctccctccttggcctcccaagtgctgggaatacaggtgtgagccactgtgcccgggtttttgtaccccatataaatgcaacaatatagcgtgtattctttgtgactttttttttttctttgagacggagtctcgctttgtcgcccaggctggagtgcagtggcgtgatctcggctcactgcaatctctgcctcccgggttcacgccattctcctgcctcagcctcctgaggagctgggactacaggcgcccgccaccacgccaggctgattttttgtatttttagtagagacggggtttcaccgtgttagccaggatggtcttgatctcctgaccttgtgatccgcccgccaaggcctcccaaagtgctgggattacaggcgtgagccaccacgcccggccgtgactgacgttttaggtttgtgagatttatctgtgttatgtggagccgtagttcattctcattgttgtatagtcattgcatgcatttacaaacatttactcagttattctgcagttgatggcatttagttgtttccagtttgacgagtacaaataatgctgctgaagacaatcttatatgtctaggtgcacacaagcaggcaatatcttggggtttatgcatcggagtagactatgtaaggatcctaggatattcatatatttgactttaatagattggatcagacagttttccaagtggtaccaatttacactctcactaaattatacttaactcccatataagagtttttgtcaccccacattattactaacatgatattgtccatctttttaattttacagtatttcattgtggttttaacttgcatttccctgatgaccaatgaggatgcggtcaaatatctttagtttgattggatatggtattagtcatttataaattgtttaaaaaaacatttatttcttgttcacttacaatggtggtagctgttatggagctacacttgttattctgagaatcaggctgaaagagtacctcctatttgagatatgctcttatttcagagggaaagagaaaaaactggcagaaatgactgatttttgaagttactgtttggattaagtataggtcatgtccattcatgttccatttgccaaaggatattacaaaactgtgttgtcaatggggggagggagttatactcttcccactggaggcattgcaagtcacatggccatggatggggatgaataattcttgttcaggaaaaggagagggtacaaatactctggaacagtgacatagtccaccactttgtgagatggctgttaaagtctcttgtcatttttctgttatcttgggtttttcttactgatttctagtgttttgtttttccttttttctttttcttagtacgtgctggatataaaccctttgttggttttacatatcgcagatatcttcttattccatgacttgtctgtttattctcctaatgatgtcttttgttaaataaaattgttaattttaatgttatctaggttatcagtatttttgctttatacttgtgctttttgttattcttgaaaaaatacatttctgcaaatctcgaaagagctaaagtgaccaccttcaagtggtttctaactttatattaacttgatttataggtagaaacatactgatgctaactcatatgtgtggaagatatatctgttagtaatgcatttaaccaaattcctcatatataaaaatcatgttgtgtatgttttaatttttactattaatacatttaaagctgtgaaaatgtgtctttatctgcaggtagccagcaaaccacagtctgttaattatcatatgtagcctgataatatctacatctcagattttattaggaagacctgtgctttaagtgaggccttaatcttgatttttctgggagttgagattttcagttttcttttatcctgcttacttaattccttcttcttattcccagatgtctctataaacttccagtgaaagatccaaagggagtaatttctggatgtttaaatacaggacttgtttaaataattgtatttctattatatagatatattggtggtttgtctttcttcagcaaaggctaaagttgttccctacagaagtggcacctacacttaaacattaaatatgtgctgtagcactattgctgttctaatatttgtaggattgtttggggattaatttttattatccagtgtatcaaaacacttgttcttaaaaattggccaaggtaaaccaatagtactatttaaaataggttggttttaactttgtacatagtatttattgtccttcctgaaagtaatcttttaaatgttggtggtagatcttacattacaatgaaaagacttctctgagttactttttagtgttgccagttcagatttggaagttgatcaaaactcttacctgaaaaaaagagtaaattacttaaacaattgtttaagaaatagtctgcattaaagatcatttggaggattaatggataaaaagttattgattataaagaatttggccagtatggaaatgaagtatattttctacttaaaaaaatacgttggtattgaaaagtcaggattcttagggaggactgtacaaactatttgcatacaaatatatgctacaaaaacaatgtcataatgcaaccccctaaatatggtttggcactttcagatgttatgttttggaaacctgcgtttggttagaaagaatttaaagattatgtccccatttctgtggtggcagttgtgtttatatagttgtggatttgcagtaattttttcttgctatgcagttcatttgattttgtgattcttgaggagttccccctttaatgtcttcatacaaagatgaagtaatattattagcttttaatacttttagtaaatatggaccattatctaaaacttggtttattaaccaaacattggttttgcttttcagcggggatctgatgagcttctttcttctggcatcattaacggaccttttaccatgaatagttctactccttctacaggtgtgtatggtgagttttttttttttttttaatatttgatttctgtgggtttcaaattgtttttttacaatgctcttattttgcttatatcatgttgaagtgccactgttcataacaaaagctaaaatttgtttcggtaaagtactatatactgtttacataggtgaaatcactagttatacctctcaaattttaaggattcatttggatctaatttgatgattcagttttttgattgatgttctttgtgttacataattttgataaaaatactgtcaataaattggtgacccagaactattgagtaaaagagctagatctaaaacttgggttgaagtcaggtgtggtggctcatgcctgtaatccccagcactttgggaggccgaggctggctgatcacctgaggtcaggagttcaagaccagcctggccaacatggcgaaaccccgtctctactaaaaatacaaaaattagctgggtgtgatggcgggaacctgtaatcccagctacttgggaggctgaggcagggagaattgcttgaacctgggaagcggaggtggcagggagccgaaacgtgccattgcacttcagcctgggggacagagcgagactccatctcaaaaacaaaaaacaaaacttgagtgatgatggacttgaatagaagtattaaagtataagacgatacgttttaaaaattgaagtaatttacgtaccataaggtaccacgtgattttaaaataaatgttcttgaaatttagtggccgtaaagtgaattgaaggagtgcagtactggaaagagagtgagcagtgaagaggatttattattattattattatcctttatttggattattgctgtaatcctaataaaggatggtaactggcactgtggcagtggtagtgtgatgaagaaaattgaataacttatagaagataaaattgatagtaattgatgattaattgaatgtttgaataagggatatcaccattgatttccaggttttgaacttggacttagataattgggtagatgaatggtaatgaatggttgtgccattcatttctattcgaatgtaggaagaacagagttggacgacacaggttcagatttgtatatattgagtttgagtttcctttggaacatccaaatggaaatgacagataggcagtgggtccctggtctcaacatcgtgaaagaaatttgatagtatcatacacagttgacaactgaagccatggacatggagagtttcagagaagggagggtttctttatccagatgtttttggagttgtagggaggtggggatgaatggacctccttttccagaccaggagcttatatggtgtttgggaccatgggaacatagatgttcgggaaagtgaacaagtatagagacagaatgaaaagaactggatctaccaagctcattctagcttattttaatgtaactattaataataattctttttaaaaatgaaagcgttaaagcatacaggatactagaacaatggtacgaaattgtgacagcctcaggcaaactaggacttaacagtcattctatttaggtgttgttattaaaaagttaacatctgattctgtcacctaacactaaaattctgtttaggtgttgttttaaaaaattctcttagcttaatgtgggcatgtctttttccatgtcagctttaaattatttcatcgaattcaggggcgtccaatcttttagcttccctgacccacattggaagaattctcttgggccacacataaaatacgctaacattaatgatagctgatgagctaaaaaaccattgcaaaacagtctcacaacgttttaagaaagtttacgaatttgttttgggccgcattcaaagctgtcctgggctgcatgctgtgcacaggctgcatgttggacaagcttgatctagttctaaaacaaagaatccttcttccccgaacctttacctacaatatcttagggattctgataagaattatgttagagttatatgttaatgtgaaatgttgatcattttttggtattatctttccatttgggattatgacctatgattccatgtttttaggttctattttatgtcctttgacaattttgaaaaagttccacacttttccatataaatcacatagttttcttttaaaatgtatcttaggaattaatggcagagattgtttattgtgtaccccaatgctattcttttttttttttttttttttttaccaacagaacctcaatttttatctgacacattgctacccagatgaaactgctactcttctgttcttccttatagctagatgtggtcatgtaattaagtcttgacaaggtataagtggaagtgtaatatgaaacttttagggcatctctacatgggtacactgtttttccttttttttttttcctccaatcttattgcctgtgggtgttccagcttcttagataatgatgggaatgacaggcatctgtaacagagacagctagagcctgataacattgtcaccattccagatctggaattcctacatttagacttttcatgtgagcaagagattaacttcttttttttttttttttcttttgagactgagtattgctctgtctcgcccaggctggagtgcagtggcgcagtctctgcttactgtaaccaccgcctcctgggttcaagagattctcctgcctcggcctctgagtacctgggattataggcgcctgccaccgtgccgggctaatttttgtatttttagtagagacagggtttcaccatgttggccaggttgggctcgaactcctgacctcgagtgatccacctgcattggcctcccagagtgctgggattacaggcgtgagcctgagattaacttcttaagtaactattacttcaaatattgttatatacagctaaacttaatttagtatttttgctattattgaatgggaatttttttttcctgttttcatttttagctggatactgctagtacagagaagacctattgatttttgaatatttattttatgtatacttactttaactaaaatgtcttagtaattttttattagtcttttgaattttggaattattcaatgatgtgtcttcaaataaagataatttcgagtatataaatatatggattgttttgttaacttgttatgtattcactggaacctccataaatgagttgaataacagtggtaatttgtgattatctttgtcttgttcttaattgcaatggaggtggctttattatttaatcttttaatataatgtttgctgttgggattttttgttttgttttgtttttgaaacagggtcttggtctgttttctagcctggagtccagtggcacaaacacggctcactgcagcctcaacctcctgggttcaggcagtcctctcacctcagcctctcaagtagctgggactacaggcatgtgccaccacacccagctaattttttattttctgtagagatggggccttactatgttgtccataggctggtctcaaactcctgggctcaatcaatcaatcctccttccttggcctcctaaagtgctgggattacaggcatgagccactgtaccttgccaggttttgataataatccttcatcatactttaatcggttccttccttttctattttacttagtttttattatcaatggctataaatgttaccatcatcttttgtgcttctgttaattgtgagatttggtctccattaattttttgatgtagtgaaatacaatttcctgatgttgacccattattgcatgcctggaataaaccaacttggtcgtggggtattttgatatgctatattcagttataggttagatggctaatagaaccgtaatacagacctaaaaatacagatttaagtttatttctaagttcttctgaagtctgggtaagtagtcaggggcttacttagtttcttgaattgtgttggggaccagactttttctcttttgttgttcttttatcctcaacacgactaccttctcaagatagaaaatagtactctctttccatcatacccacaggaagggtaacaaggacagttgaagctgaactttttcctccatcttgggccataatgatgagacttacacactaagggtgagagttgagaagtggaggctgagtccattgtagggacaagactgagaagttgcacttttttctcattctgttagctagaacttcgtcacattgacacaccagcttcaagggggcgagggtgaagggtctaggaaattggtctttattctggtgtgtcctgtctaatcataattgagggagttctattactttacaagggaaggagaatagagatattgaaggggacactcaatcacatatgcattcaaccacatatgtactgtattttgtgtatgtttataattttcacagctatattaataaaatatttcttcattgctttctttttgtactctaattggttagtattactgttaccataacattatgacatacatataccatataatcagcatccagagcaagaaacaggccattgctaatactcacaggaatccttctttcctttttcattcatttcctccttccaagtgtattcattagcttgacttctaacatcataagttagttttttgtgtttttaaactttatatgaataagccaataaatatagtatatcgtccttcctgtctgggttctttcattcaacattatgtttgtgagagtaacttgtgttgtgtattgccccaatccctttcgttcttctcatttctatatagtattttattgtatcagtggatatttgaattatttccattttatatgtagtgttgctatgaatattccctttttgtgtgtttcaccgtgtttgcttgtgtgccctctatctctcattttggtcaaaaatacaaaatttaccatcttgtacatttttgagtatacagtgtagtaatgttaactataggaacattgttgtacaacagatcgctagaagtttttcatcttaacaaaactgaaactctgtccatttagcaacaactcttccttttctcttctagcccattctgctttctgtttccaagagtttggctattttagatacctcatataagtggaatcatgcaacatttttctttttgtgactggcttatttcacttagcatagtgtcctcaaggttcatttatgttgcagcaaatggaagggtttcccttttttgtagggtgaataattgtaggtatataccacattttatttatccattcatctgtccatgggcatttaggttgcttccacctcttagctattgtgctattgtgagtaacgctgcagtgaacatggtgtgcagatatctctttgagatcctgtttttaattctttggtatataccagaagtgagattgctggatcatgtggtaattctgttttttattattttgaggaaccatcatactgtgtttcatagtggctgcaccattattcccaccagtggtacacaggggtttcagtttttccacatccttgtgaatacttattttttgggttttaaattttttcaaataatggccatcctaacagatgtgaggtgatatgtggttttgatttgtatttccctgatgattagtaatgctgaatatcttttcttgtgcttgttggctattcgtatatcttcttcagagaaatgtctattcaagtcctttacctattttttgttttgttttactaattttaaaattttctctctaataagcactgtccccagacttcaatttgcccattttttgattggattgtttttgttgttgagttgtagtagctctttatgtattctgattattaacccccatcacgtatgtagtttatgatttctttctcccatttctttcattgtctttttactctgttatttccgttgctgtgcagagggttttgagtttgatattagccccatttgttcatattttcttttgttgcttgtgcatttggtgttatatccaagaaatctgccaaatccactgtcatgaagctttccccctttgtctcttataggtcttttatagtttcaggtcttatgtctaggcctttaattcattttgagttaattttttttcatgtggtgtaaagtaagagtccaatttcattctttataaatgtggatatacattttaccagcaccatatgttgaagaaactgttcttttcctatcgtgtagccttggcatctttgttgaagatcatttgaacgtgtaagtgagagtttatttctgggttctctaatctgttccattggtctatatgtttgtctttatgtcagtaacatactgtttgaattactatagctttgtaatgtgtagaagttaggaaatgtgaggccttcggctttgtttttctcaagattgctttggcgatttgggatcctttgtgttctatatgaatgtcaggattttttttttttttcctgcaaaaatgccattgggattttgataaggattgcattgatcctgtagatcactttgaatattatggacatttaaacaatttcaagtcttccaatccatgaacatggatgtgttttcttttttttttggagacagagacagaattgtgctcttgttgcccagtctggagtgcaatggcacaatcttggctcactgcaacctccgcctcccaggttgaagtgattatcctgcctcagcctcccaagtagctgggactacaggcgcccgccaccatgcccagctaatttttgtatttttagtagaagtggggtttcaccttgttggccaggctggtctcaaactcctgacctcaggtgatccgctcaccttggcctcccaaggtgctgggattataggtgtgagccactgtgcccggccacatttatggatattcttgacaaatctttttgtggacacatgtgtgcattttacttggtatgtgtctagaagtggaattattgggtcctaggatatgcaggtgcttatctttagtagagtctactaattttcaaaagtgattttatactcttaccagaaatatgtcagtttagttattccagaactttgccaacacttgattgtgtgtgtgtgtgtgtgtgtgtgtgtgtgtgtgtgtatatatatatatatatatattttttttttttttttaaagacagagtctgactttgtcacccaggctggaatgcagtggcgtggtctcggctcactgcaacctccgcctcctgggttcaagcgattcatgtgcctcaggctcctgagtagctgggattacaggcacgtgccactacacatggctaatttttatatttttattagagacagggttttaccatgttggccaggctggtctcgaactcttgacctcaagtaatcccaccttagcttcccaaagtgctggtaatacaggtgtgagccaccatgcctggccgatattgtgtatttttaattttagttgttctggtaagcatatattgatagcttattgtgacttttgtttgcataaatattaatgaaatcgattatattttcatatgcttactgatcatttggatatttttaatgaagtggctactgagatcttttgcctattcttctattgggttgtttgctttttctctttaacttgttttttatatattctgaatatgaatactttgttatacgtgtatgcagataccctctgacactataatttacaaatttatacttgatggcttttgttaaacagaaattgttctttttcatgtagaatacttcatgtttttcccttaatggctaccattttttgcatcttattagaaatgttcttcaattgtctgcaaattgattaatgttaacatttctttctcagcttaagaagtcttttcttttgaaaccattgtatgtataattattgatgtcttatgaagctgaatgttaaagaaatctaattgatttacaaataaaaatgatatgggttaataatattcctaagcaggatgccactgctaacaaaccgaataatttgtatttttatatatatgtatatatacacacacacaaaataagtattatatgtgtgtagatgtaatcacataatcacgtaatcacagctcactacagcctcgacctcccaggctcaagagatcctcccaccccagcctctcaagtagctgggaccatgggcacatgccaccacatccagctaatttttaaatttttttgtagagtctgggtctccctgtgttccccaggatggcctcaaacttctgggctcaagcaattctcctgccttggcctcccaaagtgttgggattataggtgtgagccacggcgcctggccccctggtacttctgttgaccaaaatacttataaactgttaatgtgcttgtttggtttgcaaatagctaggttttttttttgtcttcttgaaattccttttatcaaataaaacttaaatggcctctttttaaagaactcagtattaaatttggctgcaaagatgatataagcaatgtagaagacagaaatttattttcatcacgttcaacaaattctgaagtagtcagtgctctaaggtatatggtgtctattttcagatttagcaaatgatcctggaggttattggagctcgtacaaaaagaagagaaaaagagaaaagaaaagaacataccccctccttataaagacacttaagggaaaagcagcgcgtatcatttttgtttacatcctgtttacttagtctcacagccacacctagctacttaggaagctaagaatgtagtccttttttctgataggcacgtgcttagctaaaaataggtgggtttacgtagaaaacaaacgttggaaaacaaatttgcattctctgccactggtattgaaggctatgatttaataataaacactagtttctctgatcagttaatttgcgtacttggcttttcatagcaagaaatgcgggttgctttaaataaaaccatatgaagaattgtaaacactaagctccgtacttgataaataactcttaaatccatcaaattattaagcaatagcttaaagctgctctaagaattagtaagtttaaagaaaactcacctgcagtcttaatgctaatccatatacattttgtgatttaatttttctaatttgtgaaagatctgtagatttctgctttcaaccatgatagagtaactgggactggacttactggtagttgtttttagacagtggagaacaagtacaacaggattgtgctctcagaagggaaacaattgaggtaatgctattgtcaccctagttttctttctagactgtgggggttgggggaaccaagcagacatggcacaattgctgagttgaagaaacagattgaagtttgggaaggttgagttacctgggaggtatgggagcagagtatgaaagagaagggcctgtgtagaaaaagtgcttcagaaataatacctttgaatctgttgtttgaatattattaagccacatatgcacagtacatatgcctgtgaggtcaggcaaagaacaaccagagagctataagcttaactttccaggactcacacaggcctgggagagatatttgagtgatagccaactacaacagagagtccttgttgaatacttgaagcacactcaagggcacctgacaccagaggagacatggactgaactagctccagcatgaaggcaaatccaaatctaccctaatgaaacttaaaaacaaactccaaaacagtgtagctaatctgaaagtaacttatgtttttctaaaaatgaagtctaacactttaaaagaaaaataacaaatataacaaaacaacagaataacaaattctggtgctcctaatgtggagcatccaattgccagacatgttaagaaccaaaaaaaagtgacccataaacaagtgaaaaattaatcaacagaaacaaacctagaaaattacagagatgatggaattatcagctgtgcactttgaaacagttactaaaagtatgttcaagtatttaaaggaaaatatgagcataggaaggagaaaaaatcaaatagaacttacagagattaaaaataagacacctgaaaaaaatacatgatggcattcatagcacattgtattctacaaaagaaaacatcagtgaatttgaagatagcaaaagaaactgaagcacacagacagaaaaaactgaaggctgggcgtggtggctcacccctgtaatcctagcactttgggaggccgaggcgggtggatcacctgaggtcaggagtttgagaccagcctgaccaacatggtgaaaccccttctctactaaaaatacaaaaattagccgggcgtggtggtgtgcaccggtaatctcagctgcttgggaggctgaggtaggagaattgcttgaacccccgggggcggaggttgcagtgagccgagatcgtaccacttcactccagcctgggcaaaaaagcaagactctgtctcaaaaaaaaaaaaaaaacaaaaaactgaaaaagaagtgaacagagccttagtaacttctggacaaaatcaagcagtctaaacacacatatgtataactgaagttgctgaaaaaaatggttggggcagggagcagaaatacatctcaagaaattatcctaaatcttcatatatgtggaaaacataaacccacttatcaagaagttcagtgaaacttaagcaggataaacacaacggaaaccacacccaggcttatcataattaaattgctgaaaaccaggaatgcagagtaaatcttaaaagtagccagagctgggcaggggtggggattggtggagacggatgaggggggaccacttttccttcaaaagaataaagattagaatgaggagagagatttcttacttgatacagtgcaagccagaagacaatgaagcatcattagagtgctggaaaaaaaaatcaaactggaattctatatggaatttaaaaatgaagttaaaatcttctttcaggcacacaagagctgagagcatttgttagcagcagacttccatttcatgaaatggtaaaggaaatactttaaacatgaggaaaatgataccagttagaaacttgagttttatacagcatgataaatatgtgaatatgtgacttttccctcctttttttgttaatttaaaggattattgactgcttaaagtaagataatacatttttggcggttatgacatatgagaaaagcaaaatatacaacagtaccacaaaggatagcttgagggaaagagacgtatactttggaaggttcttacagtgtactgaggtgttttaatattatttgaaggtactctgtgataaattaaagatgtatattgtctactccacaggagtcacttaaaaaaaagtaaaaagggatagcatataatgtaaatgaaatagaataccaaaaaataaaatccaaaggaagccgggaaacaagggaaaaaaggaataaaaaataaatgggacaaatagaaaaaaaatgacaagatggtgggcttttaaacccaaccacgttaataattatatgaagtgggaatgcaataaaaaattcaattaaaagattgtttagataaaaggaagactgagttacttgatgtgtataagaaacccattttaaatatgaaatctcaggtaaaaagccaaaggttgggaaagaaaatatatgcaaacactaatcataaaaatgctggagtagttagctgtactaatatcaggaaaagttgactttgggcaaaagaatattaccagggataaagagagacatttcataatgataaagaggtcaatttattgagtagacataatctaaatatagatctgtttaatctaattacctagtttcaaaacacgtaaagtgaaaactaatagaacaaaacagaaatagataaatcttcaagtatatttagagatagcactctgctgtcagtcattgatggtatagtagacagaaaatcagtaaaggtatagaacaggggttggcaagttcttacctgtgggccaaatccatcccattgcccactttcaaatttcccatgagctaagagtggtttttaaaatttaaaatcgtgaaaaatactaaaggataagattaaatggcacacgaaactttcatgaaattcaaatttctgtgtctatacataaaattgtatttgaacacagttatattatttgtttatagctgctttcatgccgtaactgcacagttgagtagttctgacagagatcctgtgacccacaacgtctgaaatatttttgtgcccctttaagaaaaagttggtagatccctaatatagaaatttttaaccagcttgatctaattgacagtatagaacagttttcccaacaccagaataatacactttattttcaagtttatataaagtagtcaccaattgtattagtcctttctcacactgctgtaaagaactgcctggataattataaagaaaagaggtttaattgtgtcacagttcatgtggctggggaggcctcaggaaacttacaatcatggcagaaggggaagcaggcaaagtcttattacatggcagcaggcgagagagagtgagtgtgaaggaggaactgccaatcgcttacataaccatcatgttgtgagaacttgcttcctatcacaagaagagcatggggggaaccacccccataatccatccatctcccaccaggtctccccctcaacacatgggaatcatgatgattacaattccagatgagatttggtggaaacacagagtgaaaccatattattctgccccggcccctcccaaatttcacatcctttttccatttcaaaaccaatcatgcctcccaacaatcccccaaagtcttaattcattccaacataacccaaaagtcccaagtccaaagtctaatctgagacaaggcaagtcccttctgcctatgagcctataaaatcaaaagcaagttagttacttcgaagatacaacgggggtacaggcattggatgaatgctcccattccaaatgggagaaagtgatcaaaacgcaagggccataggctcctaagcaggttcaaaatccagtggggcagtcattaaatcttgtttttgttgttgttgttttgttttttgttttctgttttgttttttgagacggattcttgctctgttgcccaggctggaatgcagtggcacgatcttggcaaactgcagcctacgcctcctaggttcaagtgattctcccacctcagcctcctgagtagttgggactacaggtgcacatcaccatgcttggctgatttttgtgctattagcagacttggggttttgtcatgttggccaggctggtctcgaactcccagcctcaagtgatctgcctgcctcggcttccccaagtgctgagattataggtgtgagccaccatgtctagccagtcattaaatcttaaggctccaaaataatctcctttgactccacatctcacatctagggcatgcttttgcaaagagtgagcttccaaggctttgggcatctccgccccggtggctttgcagggttcagcccctgtggctgtgttgaatgccagcagctggtgttgagtacctgtggcttttccaggcgcatggtgcaagctgtcaatggatctaccattctgagatctggaggacagtggcgctcttctcacagctccactaggtgcagtgcctcagcagggactatatgtacgggctccaaccccacatttcccttctgcactgccctagtagagcttctctatgagggctccacccctgcagcagaattctgcctggacatccaggtatttccatacatcctctgaaatgtaggtggaggttccccaaattcaactcttgtcttctgctcacctgcagacccaacaccacatggaagctatcaaggcttagggcttgcaccctctgaagcaaccagtgagctgtaccttggccccttttagccactcctggagctagagcagctgggatgcagggcaccaagttccaaggctgcacagagcagcagggcccaggccagcccgtgaaaccgttgttttctcttaggcctccaggtctgtgatgggaggggatgctgtgaggatctctgacatgccctggagacattttccatatcgtcttggcaattaacatttgactactggttacttatgcatatttctgcagccagcttgaatttctccccagaaaatggatttttcttttctaccacatggtcaggctgtgaattttccaaacctttatgctctatcacctattgaacactttgctatttagaaatttcttctgccagataccctaaatcatctgagttcagagttccacagatctctagcatggggcaaaatgctgccagtctctttgctaaagcattgcaagagtgtccttggttccagttcccagtgagttccttatctctatctgagactacctcagcctggacttcattgtccataccactatcagcattttggtcaaaagtattcaacaagtctctaggaagttccaaagtttcccacatcttcctgtcttctgagccctccaaactgttccaacctctgcccattacccagttccaaagtcacttccacattttcaggtatctttatagcagtatcccactctaccagtaccaatttactgtattagtctgttctcacactgctataaagagctgctgagactggataatttataaagaaaagaggtttaattgactcatagtttcacatggcaggcgaggcctcaggaaatttacaatcatggcagaaggggaagcaggcaagtctcacatggtggcaggttagagtgagtgtgaatgagaaactctcaaacacttatacaaccatcagatcttgcgagaactccctcactatcacaagaacagcatgggggaaaccacccccatgatccagtcacctcccaccaggtccctccctcgacacatcaggactatgggattacaattctagatgagatttgggtggggacacagccaaaccatatcaccaagataggcaggctgtatccgggtcctaaaataagtttagtcctttaaacagtgattaaaatcataaaaattatctgacttcattagaattctattagaaatcaaaacaagatcttcaaatatctggaggaaaaatttcccaaatagtaaaaaaaaaaataaaaataaacttaacccattgatcaaagaagttgtcacaagggatattcgaagctactttgaacagaaataaaatgaaaccgtaacttaatgaaatttgtggggttccactagagttgttcttagaaggaaatatgtagttttaaatgtttatattagaaaagaaaaaatgtctaaagtgaatcatctaggcttccagttataactagaataaaaagaacatgttaaaccctacaagtagatagaaaagaggaaatattaaagatgaaagcaaaagtcagtgacagaaaaaactagagaaaaattaatgaaaccagtagttgtttatgtggtaaataaaattagtaataatacctctaagtagactcaaaaaaaaggaaagacacaaattgccagtatcaagaatgattctacagtcattaaaagggtattattattgacttaatgtttgtatcctcccagaattggtatgttgaagccctaactcgctatgtgatggtatttagagctgggacctttgggaaataatgtttagattacatgatgaaggtgggtggtgccctcatgaggggattggattagactacttaagagacactagagagcttgcttgcatgtcctctctccttgctgtgtgaggacactgaaaagtcagccagcaaataggcagctgtttgtaagacaggaagacccctcaccagaaatgcttgatcttgggcttttaacctccataaatttttcttgtttaagccacccaatctgtagtattttgtgtggtagccttaactgactaagtagattcagtgaatattatgaaattttaagctaataaatttgacacttcagatgaagtgcacaaattctttgaaagacacaaattcccaaactgatacaaaagcaatagaaaactcagatagtcatatagctgtttaaaaaatcaaattagttattgaaaactacagtcccatatggctttattgatgaagtctatcagacatataaggaataaataataccaatcctacacagactgtacagaatataaaggaggtgggaacactttccactttttcttatgaggccagtattatgctgctgcaggaaaagaaaactacagattaatatccttcatgaatattgacataaaaatgtttagcaagatattaaattaaaatcaggggtttttgcttgtggtagcagtgtgagagcagagtacaagctgcagcggtggaagtcatggcaggacaagcatttagtaaatttcttctgtttgagtattggttgaaaagagtagaacgaaaaccataggcattatgcttacagaaaattctcaaggaaaagtattgtaagcaatagttggtagctgttggattgggctctgaaggaaagaatggagagattcagccagttagcatgaaagttggagataaagttgtactcacaaaatgtggaggactaaagtaattctaaatgatagagattatgcattaataattttcattagagaacggggtcttgctatgttgcccaggctggtctcaaactcttcctcaagtgatcttcccatctcagtctcctgagtagctgagactacaggtacttgccactgtgcccagcaacaaggattttttcttatttagacattcttggaaagtatatagactgaaataaatcgtcattgaaatggcatcaatatgaagctgcccatcccactgaaatctttcatcatggaaataattctttcattatttctgaaataatgaagttctgaaatatttcattatgtaaatgttgtatctctcttataacaaactagtgatctctaaactaaaaaaaaatcactatatatatatatatgcacacacacacacacacatacacacacagacacacacgtatgaagagtgaggaaaaaaatcatggtacatgtgtcatgaccaagtagggtttctacaaagtgcttacatttgaaaatcagtgtgacagaatacaaggtaaaatctgctcaccttaagagatctggagaaggcatttgaaagaattcaactccttttgtgataaaccaaattgttagccaactgggaatagaagggaacattttcaacctgataaaggtatgaaactacagcttagcattattatattcaatagtgtaagataatgcttttcccctaatatcaagaacgaggcaaggatgcctagtcttattgattctattcaacattttgcagacagaaaatcctggctagttcagtaaagctgtaaaaaaaaaataataaataaacagcagcccaggcacggtggctcatgcctgtaatcccagcacttaggaaggccaaggtgggcgcattacctgaggtcaggagttcgagaccagcctggccaacttggtgaaaccacgtgtctactaaaaatacaaaaattagctgggcgtggtggtgtgcacctataatcccagctagggaggctgaggcaggagaatttcttgatcctgggaggcgggggttgcagtgagccgattgcatcactgcactccagcctgggtgacagagcaagactccatctataaataaataaataaataaatggcatataaatttgagagtaagaaaactgtgtatgtagaaatactaaagaatttagcaaggctgtaggatataagatcaagatatcaaagtcagttgtatttctgtatattatcaattattaattatgacaaaaaatttaaagtgttactgatccattaaaaattatgaagtacttagggataaaggtgtcaaaatatgtgtgagaccattacactgaaaactacagaactttactgagagaaatttaaaaagatctaaataaatgcagaaatgtcatgatgtttatggtttagatgactcaaaaaaatgttaagatgtgaattctccccaaataggtacctcatttcaagaatggtgataaagctgtagtaatctgtagggttcagattgcctggggtgggggttgggggtttggtagggaggactaactgcaaagggatactagggaactttttgggatgtcttgatttttgtggtggttatatggagtgtatttgtcaaaactcatcaaaccctgcatttaaaatgtgggtggatgtcttattctatctaaagtaaaccctcataaagttgatttttaaaaaatgaatccatgtttcgcaagtagttttcctgacagattcttctagttttgaggtgggaatattatgaatttttaaaaaccctcttccacaaagctctttggaagcgtgactgatatgtagtgggcattttgtagtttttaatgtatagtttagtaaaatacaacacgatttatacaagcaaagtattttgaatgcttatttttgtattaagatttttgaaaactgtccttttgtacagaaaataattatttaaatttatgtgtccaatacatttgaatttccttgtttcctattggcttttaaatcatggccatacaattgcttgtaatggtatacattcttcatcttcagattatttatcaaatctttacatataaccctttcccagtcacctaaatgagtcgttcttagattttgagatttcatatagtaataatatgttcagttaatttggggcaaattcttaattatggcaaataaggacatcaagtgcaaaaaatcactgtcatttacaattaccattttgattgggaaaaaatagaacataatttccaagcaaaacagttgttcttaagaaatgctagacgtattattgattacagtgtactagatgttgtgctgagcatttaaaatatattgaaaagaacaaattaaaatttcaaaatattcttgttatacccgttttacaggagtagaatctgaggcttagtaacgttaaataacttgctcagaacaggatatctgatttcatagctctgcgctcttaacatagcccaggtattttataatacggaacaattaacaccctaaaatggtgatttataattgcacatttcttggtaaaagtttgtcatcttaggtctttatttgatagtgcagcacgaatgggagcttgggtaacttgttcggtattcgcattttctcaaacatagaatacctctgttaaagaaacagctttcttagtgttctttcattcttgttggaatattctgggtaaactgataggagcttcatgcctttagaaagtttctccagtccttttctccagtcctgtaactccttatgctggttgagcaaggccacgttggtggtggtattgtttagctctctatgcctgcagggagggtgccaaaaagacattccctgttcaactctcgcccccgtccaggactctgatgtttgttgttttactctagtgacagtgttatcatttgttattctcaatccatgtaagcctttgtaaatttacattgtcagtgtcaagtcacttacctttttctaggagtagtaagacactttgaaatttttgtggtttaaaaaaagaaattacctttacactttagtttgggtatttgtgagactcaaatgaggcagtgtaagtgaaaacagtttgaaagttagaagtgaaatgacattttaggtatttggtgcctgtttaggtatttggtgcctgtttaggtttttggagcagaataatgacatgatatacattatgttatgttatgttatgttatatgttatgttatgttatgttatgttatgttatgttatgttatgttatgttatgttacgttattttgagacagagtctcaaaatttgagacagggagtgcaagtggtgcaatctcggctcactgcagtctcctcctcctgggttcaagtgactctcttgcctcagcctcccaagtagctggattacaggcatacgccagcacatcctgctaatttttttgtttgtttgtttgtttggttttttttggtagagatggggttttgccctgttgcccaggctggtctcgaactcctgactgcaggtgatcagcccacctcagcctcccaaagtgctgggattacaggcgtgaatcactgtgccgggcctgatacactattttagttaacgttgatatgatactggatccccagaatatgggaagcagggagagtgaaattagagtaagggagagctgaagtgggggcaagatcagggtgaggttggtgactttgagagtggaaatgaaagaatataatcagtagtcattttggagggaaaattagtatttcttggtgattgataagggagaggaggagatggaatctcttgccttccagattaattaatccgataaacatttgtgtgccaattattttccataatctgacataggcatttgctatataaaggtacgcagacctgtatgggcctctaggtattgttagtcatttaggtctggggaggatgctgcttgcattcatgaacatagagaatttgggagcaagtgctagtttgggtattaagtcaacctatctagttgtaaacaagttgagttctgtgccacagatatggatggatacgaaatatagctatattagtttttatttggtcctcatgaaatttgtttagggttacagacatttgattgtaaagtttcattagtgtttagagaaatgatatttttaggcatttggaaagattatgtttttctccgagtagtggcaaatagggtatttagtgatcaaacaacattgaatgaaacttttagcttttaagtaatttgtatttagtcttttggttctatttctggaagaaaaacttttctgaatcttacttgcataaacttaagtgttccttacaggcttgtcaattctagttattctcagtattgaaacaataggatttaaataaatttagcttagataatgaatttttttactttacagcagtaattctccaacttcagggtaaatagaatctcctggagggcttgttaaagcaggtcgttgggttccactcctggagcttctgcttcagtaggtctgggtggggttggaaatttccattttcagcaaggtggtacttaatgttaagaattattgttatataataaggaataagattatcataggaaaccacagtttagcttctaaaaaataaagactattagcacccaagaaataaactttattttaataaatatacaattcaaatccatatctccttaggatgtgataaataccagatttttatcatagtctttcctgaaattttatttatttagcaatagactaaattagaaaaatgtccttaaaatacattaaaggcatcataaatagtgttctctagtcataagaaaaagttgagtatttagaggtatttgaaataatgtaattcatttacccttatacttttccttgaagttaaaaatcagacttcagttttaaaaaatttaatacccacagtgaaaaaccaaaagcacctgtttattaaaaggtagttggttttgttttctactctccttttccacctacccccatcagccccacgtttccctgaagttcaaaacccaaaactcatttaggattaaatgtgacaatatgattaatgtagtatgtcaacccaaattagttgcagtaatttaaaaaagaatcttatgttttttagctaatgggaatgacagcaagaaatttaaacgagatagacctccctgttcgccttcccgtgttctccatcttcgaaaaattccatgtgatgtcaccgaagcagagatcatatcattaggtctaccatttggcaaagtaactaatcttttgatgttgaaaggaaaaagccaggtatgtaatatttaaagattgacaaagagtgattatctccagatgttagtattactgataatttttattttcttgagcttttctgtatttttaaaatttcatactatgaacataagttagttttaaaagtagatttttttgggggggtgtaacaggaagcaacaaacagtagtaacacaggaaacaggatttctcttatccattgacttatgttttttcttcttaagacacaaattttatatttttttaaatttgtttttaattttatttatattttgtattacacagtggtttatcaaatgtcctgtgattagcagaaaacactgataggatataaattatacctcatttggcaaattaaagaacagttaagttttcaaaaatctagataaaaatgtatagtattgtcggccgggtgcagtggctcacgcctgtaatcccagcactttgggaggccgaggtgggcggatcacctgaggtcaggagttcgagatcagcctgggcaacatggtgaaaccccgtctctactaaaaatacaaaattagccgggtgaggtgtcacatgcctgtaatcccagctacttgggaggctgaggcaggagaatcgcttgaacctgggaggtggaggatgcagtgagccgagatggtgccattgcactccagcctatgcaacaagagtaaatctcatctcaccaaaaaaaaaaataaaaagtatagtattgtcaaaagacaaaatcacaacacatttaaacatgatttgattggcttctatttgtgattctagaaccgagcaacacttcattctttaaaatagaatgaatattccaccgggcaagacagaacagttggtttttataaggtgggaacaaggaagtgacaattgttcaaaaagtgaatttgttaacattgggttattgcattttacttttctagtaagtgtcaaagcagtagggacttattgtgctgattcagataggccacgctctttctgattggttgctgtgaatctcctgttttcaggagaaactggtttgtttggggatttacctgctttactttgcatgagtgactccattttaatttgaactggtctgctggggtgtagtgcaggaggctagtccaaaataatgtcctctcaaaaagtctaacagtttattttaggtatagaattaatatgtggcttctttcataattcagaagagactgtaaagagtcttcatttgagaaggtaacaggttattcttaagatgaataaggaaacttgtttctgtggtgaccatgacaaaaaatataatacttgtcatgttgattttaataattgtatgtcctcttgttccaactcagaccccactggaatgaattctttagttctttgcaagtttttggctgtcctaaaaatcttttatactgtttattactgtaaagaagaggacaacaaatctaggccctaggtattttgtagtacattgtgatgtattactgtgtttcatctgcttttgataaataataggtttaagaaacacatggtaaatacatttataaataaatagattagtaagcattgggcatgaaagaggttggatgatgatgtctgagttccctatatttagtaaatcacttatttaatatcctcttaaattcacatgaggttactaagatctggagaagttaagtaacatgccttaatatttggcccttgttgtatttccacatttgtcttaaatcctttggagaccgtgcatccctgccagttagatcgttattttaacacaattgctactactgagaatagtatggtttgcatgatttgaacagagaccacatggccatgtctaatggctaattgcctgtgaaaggctgagcaggcaacatcataattttctttgtctctgctactgattctgggtttatttttatcggtaagctaactgtaagtgttatgttaattgcttgtgttttgatcacaaatcctgtttagaaaatatctttttagtaaatgcacttaagcaggagattctgatttgagtcactagatctacttgttgagtgataacttttctcagggcatttggaggatggagtgtcaggggccaaatggggattctttttcccagccttcctctgggtagtgacttttggctgtctctccactctgtactatgaaaattggactttttgactagatacttaaataaaatgtaaataattactggactctaagtggaagcaattattttagcacatgaaattttcggttctgtatacttaaaggaaatcctgtgacaagaatcatattccagatatattgtttagcttttcctttatgtgactgatgttagaaattgagtatgttcttaacatttagaaaggagtttgcagaaatatgcccatacagtgaatattattgtttacaaattgtctgttgaaagatgatttaaaaacagttagaaacaagctagttgccatagctgtttttcctaccttgatcatttttatcctgttgtcttagaaaaattagaaaaaatatattactgacacaagtggataatggcttcaaagtacatcacggacatttttacctttaaatagtataaatgacttgaagtcagttttgctcttttaagatcgtgcaatttttatttatttggggagttttatttgtttattgtgggttgatttgtgatgtttcatccactgtcacatggctaacatcactgtttcatagagcattggtagttcatttggagcatttcattggttcacttgttacatttggttggtacagttatacatcatgtttaacatctgtccagttaatatggcttttctagactttatgtggaaacatttgacaaataaggtaactgaaaacaaatagtttgatttagagatacttgccatttcctgtgttcagtaaattttgttggtaacaaatgcatattttataaattgtaaatgttttatacataagttgaaatggttgatatatgcttgctaattaaatgctcttgtgcctggtcttggtggcacttgcctcaaggattgcttgagtctgggcattctgggctgtagtgtactaagccgatctggtatccacactaagtttggcatcagtatggtccaggctgcataaggaggggtgaaccggcccagaccagaaccagagcaggtcagaactcctgtgctgatcagtagtgggatcgtgcctgtgaataggcactgcatttcagcccaggcaacatatcaagacccctatctgttaaaaaaatggatggatggatagatggatggatggatgaataaataaatatgttcttctgtagtaaaaaaagaattgaattgtctaactagaaatttgtgttgatttggatcaggagtggttcctgcgttttaaatttgagatgttcttaccagtattttgaggactcagaacggttaatgtctatagtttataactaatcattaaaatagggcgacaaaggctgggcacagtggttcatgcctgtaatcccaccactttgggaggctgaggcaggaggattacttgagctcaggagttcaagacccagcctgggcagtatagtgagacctcattgctacaaaaattgtaaaaaattagccaagtgtggcggcacccacctgtagtcccagccacttgggaggctgagatgggaggattgcttgagcccaggaagtggacgttgcagtgagctgagatcacgccactgcggtccagtgtagtgagactctgtctcaaaaaaaaaataaaaaataaaaagagtgagatgggggacaaaatctaccaccttaaagctttgtaagtatcttattcctgttaagaggaaactatgtatactataaaatataaatgtcaaggggcttttgccagctcagtttttcctgagtcattcttcaggtatctactattagtacagtgactacagatatcaagtcacttgaatgacttaaatcaatattgactcagggtaggaagttctcagatttccataatttgaataattgatcctttgtcccttatttttaaaaaatattctgtatttgaagattataaactattttctttttctttttcttttttttctttcttgaagcggagtcttgctctgttgcccaggctggagtacactggagttcactggtgtgatcttgacctcactgcaacttctgcctcccaggttcaagtgatactgctgcctcagcctcttgagaacctaggattacaggcacctgccaccacacctggctaattttttgtgtgtgattttagtagagaaggggttacaccacattggctaggctggtctcaaactcctaacctcaagtgatctgcccgttgcagcctcccaaagtattgggatcataggcgtgagccactacgcctgtctttattttatgataaaggttgaatatccctaatctgaaaatgaggtgctctaaatctgaaactttttgagcaccataacagtcaaaggaaatgctcactggagcattttggattccagatttttgaattagggatgctcagctagtaagtatctaaggcaaatattaaatatttcaaaatctgaaatctaaaacacttctgttcctaagcattttggataagggatactcagactgtgcctcagaattaaatatgacatatatgtgcatgtctatgttttaatgaatgcctcagtacttaaaaaggaacctaaagctgagcatggtggctcttgcctgtaatcccagcacttttggaggctgaggtgggcagatcacttgaggtcaggagttcaagaccagcctggccaacatggtgaagccccttctctactaaaaatacaaaaataagccgggtgtggtggcgtgcacctgtaatcccagctactcgggaggctgaggttgcagtgagccgaggattgcttgaacccaggaggcagaggttgcagtgagccaagatcacgctactgctctccagcctgggctacagagcaagactcctactcaaaaaacaaacaaatacaaaaaaaggaacctaagccctgggaacactaaagccatgtgagtctgagttgggggcagttggtggtagtggtgggtaatatggtaaggagatcactgaaaaattttcttcacaatgttttttgagggttgaaggatagagagagggtgtggaatggggagaattcttagtaacttaagataatgctgtctgtcaatgctacacgcatggtttcccattattttagactggaatttcagatgcctttttaaggaatgcttaattatgattcttatcttgggaaacctttaaaaaattaaaaatgcttcgtatgtttattaaaaaaattcaaaagcgtagattattttaagtaaaacttgatattccccaaatagcactcttttctggccagtttagtgtgattccatacatacaagtaaatgtgacatgaagatgtagataccatgttgatatgtgtgtgcacgtgtgtgtatgtatataaacatgtaaaatacaggaaatacctttacatatttatgtgtaaccttttttcaaaatgtaacatgggtgttaattggaagcatttgaaacattgagtacggagaaggatttggtgacgcctgtaatcccagcattctgggaggccgactggggtggatcgcttgaggtcaggagttcaagaccagccttcatggcgactccctgtctctactataaacccaaaaattagccgggatcgtggtatcatgcgcttgtaatcccagccacttgtgaggctgaagcaggagaatcatttgaacccaggaggcggagggtatagtgagccgagatgacgccactgcactccagcctgggtgacagagtgagactgtgtctcaaaaaaaaaaaaaagaagatttggaattggaaaattgccacttaattaactggttttatgtggttcttggtttttttcttgtttcttcctagaaacacttaaaaaggcaaatctaaagtgtgcaccatcatgtgagtagaaggcgaaagatttataccatctgaagaaaaaccagagtattgatcaccattttacaaggatgcttttcagaggctgagtttaatagttttattctgaaaaatcccatacagtccaattaacaggaattaaaaatgatctcaaataaaaatcatctcatgttagagctacaaagagacttaaagatcctgttaggcagtgcttcatgttttagatgaggaaactaaggctcagaggtgttaatgagtaaggtgtcatagccaggcatagattttaatcaagttccctttctaccatatcatgctagttctcatttcttgctatcacatatgttggtaaagtatgagataataaaactcttactgaagaaaagtgaatgctctattaattttattcataaatggctgtttttaaaaagggtaaaaggagaataaaccattttgccccatctctgtttaagactctgggtattattagtgtttctcaatgttttttcctctgtttttttctttctcctcccctaaagacggtttttagcctttttaccccctaattgcccccattaaattttgtatctgtttatgtattgtagccttttagcatcaattttttttttttttttttttttgagacagagtttcgctcagtcacccaggctggagtgcaatggcgcgatctcggctcactgcaacctccgcctcctgggttcaagtgattctcctgccttagcctcctgagtagctgggattacaggcacccgacaatcattcctggctaatttttatagttttagtagagacagggtttcactgtgttggccaggctggccttgaactcctgacctcgggtgatccacctgcctcagcctcccaaagtgttgggattacaggcctgagccactgtgcccagccttagcctcactgtttttaatgataaacttaaatcacagccgctgaaagcatccgtttacaatggtgatgtacacatttattttcatctttttaattatttctggattttaaaagaaacagaaataaaaggaaaaccgaaaactgcataaaatcccttaatcaactggcagttaaatccttttttttttttttttttttttgagacggtgtcttactcctgttacccatgctgcagtgcagtcatgcaaacatggatcactgcaccctcaacctcccaggcttgagcagtcctcctactcagcccctccctcacccccccaccccaagtagctgggaccacagccatgtgccaccatgccccgctaatttttaaaattttttgtagagatgggttctcgctgtgttgcacaggctgctgttgaactcctgggctcaagcagtcctcccaccttgtcttcccaaagtagctggaattacagttgtgaaccaccacgcctggcttctcaagttcttcagtgaacccaactttttagatgtttttaattaacgtccatgatattttgaagcaaaggtgtttttttgtttttccctccccttgggggaaatgtcattttacttgagagtgcatgggtttagagcaagctagaatggcaaaatatatcttaactgtctttcaaaaagatgagctttaactttaccttcttgtgtttattgcaggctttcttagaaatggcttctgaggaagctgccgttactatggtgaattattacactcctattactcctcaccttcgaagccagcctgtttatattcagtattccaatcacagagaacttaagactgacaatctacctaatcaagctgtaagtattaaagatgtttttaaaaataggtatgggaacacatggtatgataacttacatactttacagatgaagaaaaattatgtgcttttattcattttaggatactttactagtcataattgtatatgtaaattcttccccccaattcttaagaataagaaagcagtgccatttagaaatagaagttaattttttctcttgaaactgttttcacagtaaaaaaggagaaaaaatatttattgttatgtacatcttaaaatctcagatctgaaaggaacttaatcattcatttcaatcatctttttacagactctaacaaaagcattgagaaattgagtgaattaagtaatggaatttaacaccttaataaaaaatttttagaattgtttattaaatgatttttgactcctcaagatgaatgtgaaatgtagcatagcaatatttcttacccatttttctgttattttgatgtagcacacgttgagtcttttgtgtcttcccatgttgatttttaagtggttaaaaatagtataataatttgaagttatttaaggacagaaaatctttatacacaaagtaaatacattttaagaaggtggtttttggccgggcgcggtttgggaggccgaggcgggtggattgtgaggtcaggagatcgagaccatcctggctaacacagtgaaaccccgtctgtactaaaaatacaaaaaaaattagccgggcgtggtggcggtcatctgtagtcccagctactcaggaggctgagacaggggaatggcgtgagcctgggaggcggagcttgcggtgagccgagaccgtgccactgcactccagcctgggtgagagcgagactctgtctcaaaaaaaaaaaaaaaaagaaagtgggtttttttaaaattatgattttaagggcatgtttggcctctgtattcttgctctaggcaaagaactcctccagctctctgattttgtgttgaaaggcagtataatgttagctggtgagatttgttttccacattgtttgaaacagcgacatttactgcatataatccttaacttattttaggcaatattaatggcatgtaataaactatataagcttacaataaatacaatattagatgaacagaatagactttttaaaatgaaaaattgtcattacaagttgtacataggatacatgcttttggtacaccattcaatcaagaaaagtaaaagagaaaagaaccaaaaccaatccagttacccagagataactaataactagtggtaatattcggtgtgtattcagatgtctatatatctaattttacacaaaatgttttgaaatctttttttgtgtaatgttatggacatgggtttattacaacaaatatagcattacctcatcagctttaaatgactataatactcccttttataggagaattataattcgtccaatttctttttgatatacactgaagttgtttccagtgtatattccaatgcagcatattccaatccaatacaatgtatattgccgtggaagacaatgtgtattccaatgtatatgtatgaaattgctgggacacagcatgtacatattttaaattttggtatatgttgcatgattgctttctgtagagattatgtgcttagagtgccaccaatataatggatgagcaaatgagtaataatatcttatgttttacttttatttgataatttgtaaaatacttatactgatttctgttagtgccattttccccattttttattgtagtaaaatatacatgacataaaatttaccatttcagccatttttaaatgtacagtttaatggcattaagtacactcacattgttgtatagtcaccaccacacttagtctctagatgccatttcccatcacctcaaactgaaacactctatccattatacagtaactccctattccttcctccctcccacctctggcaactaccattctaccttcagtctctatgaatttttaaatacatggtcaaagctcttaggatgtcataatacaatcttttctgacttcagtaccatgctcagaaagatctagtacaccaagattaaaaaaagaatctacatatgttttcttctaatacttctgtgttgtagttgttcttatttctattaggaattttttggatgtaggaatgagggtaagggttcagtcttttttttactccaagagaccagtttctcctgcattattcttgaataactcatttattatctactaatgtgaaacttgtcctttgtcatatattagttttctacacacactctatgcctgctgatcatatgtacacacactcatgcacagtctcgtctaacatgcttatacgttctgcttgcatgtcttgttctaccctcatgtgtgtgctgctcacatgctatgcattctatgtttaacctttactaccttttgaattccaaaagcttggattccatttccacgtctgtgccctaaggcttaattttttgttgttgttgttttttgtttgtttttggagacagaattttgctctttgtccaggatggagtgaagtggcactatctcggctcactgcaacctctgctcccatcccccaccccccgcccgccgggttcaagcgattctcctgtcttagcctcacgagtagctgggagtataggtgctagccaccacgcccagctaatttttgtatttttagtagagacagggtttttccatggtggccaggctggtctggaactcctgaggtcaggtgatccacccgcctctgtctcccaaagtgctaggattatgggcgtgagccactgcacccggctcctaagacttaatgtattgcagagcaagatcttatttcttactcttttttcagaaattaactgattaatatatcttgcgtatttcttcagataaattttggaattattttggtaactcctgtcccccaaaaaacacacttggaattgggttgatgttgtaagttaatttgagataattaattatgcacattaattatattactctgattcttttaagaagaaagttatattttgtttgttttcttttatgtctttcagtagagtttttaattttccttcatgtaaatcctgcagttttctcattagtgtgattcctaaatatgttactataaaccttgaagggaaaaaacaatttaataaatcttaaaagattagattattccaaagagaaagtgagaaatcccagttgcttggcaaccaaagccagcctaaatgacctagtttattctgagatagccttcatttcttcccaatactttttccatcttgttgcttttgtacaacttttatgcattgatgtttgataaaatgcaataattttttaaaaattcaaagtcctacatcaaacctaacgtccaacttgcagatacctgtttgatatttttaaagtactgtagtatctttttattctgacattcccagaaagctgatagatgagtgtttcattcctttttgttctctgaatagcaagctatcccaaaatatgcactttacttttccagtttatgattgtacttgccagaaggtcaggtgaatattaagtgttttgtttccttgatttaaactaaagtcacaactgtaaaatttaggtcatattctgagatacagcatttgagaaatggtcgtgttaataggagtcattattgtatgcagcttttcttgaccttgtggatgaaagtttataaatctgccatgagatgaccatagaaggattttctctaaaaaacaatcaaacttaacacttaagatctgtgcatttttattgtatgttaattttcttcttctcaatctgagaaataccttctttacattttccaggcattttaaaattttacatgaagtatacatttctccttatcccacattaaatttgttttcctgatcatactactgctattatttcctttattaatttaactattccaaagagtttgttacccaaacatttaaaaattatttcccataataggaattctgctccttcataatttttagcatcagacacacttttttttttttgagacagcaccttgctctgtggccccaaagtaataatagttgctttaaattttgagacaatcacaaacttagaaaaaagtttccattatggtacaaaggagttttgatttcttgaggcttttgagaataagatgccactctggtccttctttcctgtccaatatttttagcctgcatttcctacaaacaagaacattcttctatcaaccagaatacaacagtcaacatcagcaagttatcattgatacataagttccctccattcctcataccccatttatgttttgctaatggacccaataatatttgtttatagcaaaaggattcagttagaatcacatttccatttaattgtaatgtctttttagtctcctttagggcctttcataaccttgacactgttgaaaattataggcaatttattttcaagaatgtccctcagtttgagtttgtctgatgtttccttgtgattcaattcagagtatctgtctttgacagaacatcacagaagtaatgctcttttcattgcattataaaatttccatttgttgtgttagtaatgatgggctctttgatcacttgattagggtggtgtttgccagccttctccactataaagttgttacttgggggaaaagtagtattttgtgggcaggtactttaagactatgtaaatacactgttccttatcagctgttgatttatatcggtatggactaaaggtttcctatgttatttgatggattttctgtttttaacagttgttattattttgatacacagattgtcctagatttggccagtgcaggccccttcaagctggtttctatgtccttttggaatatccctatcattctttgaacatttccttgcattctgatcaacgctccctccccctgccccaaaacaaaaatattttatactcttcttgtgatttctgggccccagttctggaatcagctattcttttagagtgccttggtctcttttagtggagaatatttagaagtttgtcttgactacccttgtttgggtgtaaacatcccatgccatagtctttaatgttgctttcatatttcttcccccattgtctttaaaaaattaggaaataaaaattacatccagattttctccttttatccatgtgtttttattcttcaagtaaatttaagcaccttttaaaaatactgtgtcattgtggtatgcagggaggtgtttgactgttgactgattacaaatttaggatatgtatctccagacggagtagataaatcttgttttacttaactacattgcttcatactgttttatgtcaactaaattttaggattcatataatgcgtctgtataatcaaaagttctcattttgggttgttctatagcgagcccaagctgcactgcaggctgtcagtgccgtccaatcaggaagcctggccctttctggaggtccttccaatgaaggcacagtcctacctgggcagagccctgtgcttcgaataattattgaaaacctcttttaccctgttaccctggaagttcttcatcaggtaaggaggaataaatacccttaagaaagttaagttaaatatggcctctgaaacttttgatgttttatatctaagttgtttagcttattggttttgttgatatatttgtttaaataatgaaaaaaacttcatctaatttcatagaaattagaggtaattttttgacagcctcctttttctaacttgaatacataattaaaaagggtgtaaaaagttttgattttttttttcttgtaggtaatcatgaaaataaagcatagaatattgtgaaaagtccaggtagtagttgttccttagaaagtaatgtcaccgttgagtacaactaatttatttctggacagcttcttacctttgagtatttctgatttaaaaattctaaagggaaagtgttcaataagtcttcatgtgtaatatgaatataccatgttaaatattgactgatgcccaacctaagcttcatacactacccattgctatatctaagttgtcttgataaaagaaatcatggcaagtaatatgtagaatttaagaattgaaggttacttagtttcacaattttgtagtgaataaatccaaaacccaaataattgataagtatagaatattgtagagcgtaattgaagagccaattagaattgaagcttcctgatgtaatttcccatgttttgtttttgaatggttgttacatttttaactaatacttcatatatacatatcctaagaatgtaatatacagttatctggtaatctgtgtatataaatatttgacatatagccccaaaatttagtcagcttttgtcctctttagctatatgttgatttcatttcattacacttagcccacatattaaaatactgcaacacttcccttgcttattttcatttgacagagtcatgcctttggatttgtagtatgtgcagagtcatagaggtgtgtgtgtgcttgtatatgtaagaattgaaatacatcttactctaggctcacattttacgaataaagaagctagggcccttagaagttcgtttactttcccacagtccttataccaattggcgatagagctcagacacatttctcagtaaagtgctgtgccatgcatgtatatattaaaacatgccattgagtaggcgtactgggtttcccctttgatagttttctgagtaccatttttaaaacatatgcatttgtgaagcatgtcctaaacaggattctagcaatggtatccagagccacggttgctctctgaaagggttcagctgttgcttaagtgattggtttcattgttcttgtggattttcttctcttctgtttatcccggaaagtggcattgaagactaatgtgatctttagcagtgtttgttccggggttgctactgtaacattgtagctattgcttttataaaagatgttcttatgcctatgtcccaacactgccatcagccagcagcaagtttagctacagtcatgtggtcctgtcttataatttcatttatcatctccctaaccacagtaacaaattttgtttttccctcaagagatcatggtgaccttcaggtgaagaggactaattctgagtgtcctcagtagcaagtgctggggtaggacactcagcctttcagttatagcactcacttttttaaccctcttttccagtgctattgaaataaaaccaactccttatgaaggcccccaaatgcagacttctcccccatctctttatcttcattacctaacactcttctggttatttagcacctgtcttttctggcactgtctctctctccctacctcccttccctattcccctgcttagttctgtccttagtccatttctgtcttgtatttcttaggccgggaacactgtttacccaggtagtcacctggcaggatcgacatcattgaactctcagctcaaatgttacctcctcagggagcctgaatctaattacattaaacaagccctctcccctggcattctatcccatcagccaactaagagccagtctggcatagcagttacagatacagggtctagaggtagtttgaatcctgactctactgcctctatagccttgggcaagtaacttaccccttctatttttgttttctttataatgaagatgatgttctctctcattttttattgcgaggattatatgagttaatacatttaaagtactcattaaatagaacagggcctgatacatattaagtgcccaagaaggggttgggtgtgggggctcatgcctgtaatcccaacactttgagaggccaaggcgggtggatgacttgaggtcaggagttcaactccagcctggccaacatggtgaaaccctatctcttctaaaaatataaaaaattagccgggtgtgctggcatgtatctgtagttccacctattctggaggctgaggcaggagaatcacttgtacccaggaggctgagattgcagtgagctgagaccacctgggcagcagagcaagactccatctaagtgcccaagaagtattagctctaatgatcaaatgctagtaaagagcaatgtaagaaactagttctttctcttgtagtcttgtgggtaagacactaatttcataaataatggcataagatgtggtgaatattatggtaggggaatatacagaagtatggagttggttgtacctgttataactatttaacgaattattttattatattctttgctgaaaattggtcctggctcaactgctatctaacatctatagaaactaatgttcctttagctcatggtaagggaattgagagtgactgaaatgggattgatgctattttagatgaaggaagttagggaaagtctttgcaatatgatatctgagcagaggcttataggatgtgaagatataagttatatgtgtatgtggagaaataatgatccagtccaaaagaacagcaatgtaaggtgcctaaggtggaagtatgcttgttgtgttcaagtatcagaaagaaggctggtgtcactggaatagagagagtaagaaagccctatgcgagagggcattagagcagtggtgatgcaaagcttttataatttcttatattgggtaagatgggaaacctttggaggattttgaatggaacagtgagattatatcatttatgttttagcagaatcactcttgttgctatattaagaataaactggccaggtgtggtggctcacgcctgtaatcccagcactttgggaggctgaggccaatggatcatctgagctcaggtgttcaagaccagcctgggcaacatggcaaaaccccatctgtaccaaaaatacaaaatattagtcaagggtggtggcacacacatgtagtcccagctactcaggaggctaaggtgggaggatagcttgagcccgggaggtggaggttgcattgaaccaagattgtaccactgcattccagcctggatgacagagtgaaaccctgcctccccatcctccaaaaaaataagctgtatagggttaagtggaggctcttgtcctacttcaagtgagagatgatggtggcctgggtgagggcataggcactggaagtggtgattatggatttttttaaaattagagatagggtcttgctatgttacccagactggccttaaataaactcctgggctcaagagatccttccaccctatgacaagctggggctatagttacgggccacctacacaggcttctgtggatatattttgaaagatttgctgatggattgattagatgtggttctgaagagaaagggagtaatcaagaatgcctcccagattttggacctgagcctctggtaaaatggagctaagatgtaaagactgaggtaagtaaataatagtaataataaaaagacaaagacaaaaaaagatttggggcaggggttggaggtaggcaggaatcaggagtttgatttgaacatgttaacttaagaatacctattagatattcaagtgggagatgataaatgggaattaagtctggattcaggaaagaattcaggctggagatttgggaaccttcagcgtaggtgtggtaattaaagccattggactggatgacatcatctcagagtatttgtagatagaattcatcaactgattcattatgtaaatgctcagtcctgcatactaaaaagtgtcattgtgcatgaaagaagtagctcataacgatgttctcatgtaatccattacttctgagtactgttatacatgggaatggtttttgagtgtccaatagataaatctcttctggacaaaggaccaatctttttgaattgtaataaagataaataacttacaaaagctaggcattatggtactaaataaaagaatcctagtaatatgaaattctggttcttaaatcatgttatttcattggctacaaaaactattataaacaagttgtggccagtgtgcttgatactaaaaaaaaattctaatgtgaatacactttttttttttttttttttttttgagatggagtctcactcttatagcccaggctggagtgtggtggtgcaatcatggctcactgcaacctccgcctcccgggttaaagcaattctcctgcctcagccttctgagtagctgggattacaggcgcccaccaccacacctggctaatttttgtacttttagtggaggagggatttcgccatgttggccaggctggtctcgaactcctgacctcaggtgatctgcccaccttggcctcccaaagtgctgggattacaggcatgagccactgcgcctcgccatgaatacactttttacaagtgaatactagtggacattttcagtttctgacaaattctacctttataaaaaatcactctgaagatgaattttatcagaatttgatctttagtatcttcttagtcctgtgttacagtctgaaaatattaaaatacacaggaggtatatagagttgagtatttgtccatatttttgacagcaaaatatattagggaaacagagtaaaagaccttataattcataaaaatagattcatatatatatcaaaccttcctgaattttaatttttgataccaaatctgtttaaaatttgctattttgataattatgaaagggtgttaaaaatcacacctcaggcattcctagattccctgatgttggtgcccagttactttattcagaagtatcatatcgttttttgtagctcctctatcagtgaatacaatccaggggactagagtgctattgctggttagcccattcaggcaagttctattctcttagcacattcagataaaaaccacacagcaaaacaccaagctgtcccaggatgtgctttaggccattgttgaagttaaatgagaaaaggaatgtaaacattaacaaaatctgaaaggtgagtggaaattaggttttatagcataatttagtataaaaattttccaaatgttagagcaaattatgtgttttcctactccttcactaatgatatattttacatcaagaatatttattattttttgaaattgctgacttcccttggggtgaaaataagtatttttttaaaaagaaaaaatgaaagctttaaaaaaagggaaaaaaaattacatattgccagctgggtgcagtagctcaggcctataatcccagtactttgggaggctaaggtaggagaatcgtgtgaggtcaggagtttgagaccagcctgggtaaggtagcgagaccccatctctaaaaaaatttaaaaattagccatgcatggtggtatgtacctgtagtactctggagacgaaagcaggaggattgcttgagcccaggagttcaaggttatagtgaactatgatggcgccactgcacaccattacgggtgacagggtgaccccatctcttaaaaaggaaaaaaaaattgcatattgctataattctccaaccaggtctagatataattctttatcaattaataataagcattttagtctatatctcttacatgtcaggaattgtgcttaatgatgcagaaatgattaagacaaggtatattccttcaaggagccttcagtctaatgaaaggagacagttatataaataaatatatagtacagtagaagtacaacagcaagatagataaatatatatatatatatgtatatatatatatatatatattttgttttttttttttttgagacggagtttctctcttgttgcccaggttggagtgcaatggcccgatttcagctcactgcaacctccacctcccagattcaagcgattctcctgcctcagcctcctgagtagctgggattacaggcatgcaccaccatgcctggctaatttttgtatttttagtagagatggggtttcaccatgttggccaccctggtcttgaactcctgacttcaggtgacccacctgtctcagcctcccaaagtgctgggattacaggcgtgagccactgtgcccagctgataaatatttatataaaaccaagaaatagatacaactcaagaaaaataattctatagggatttgggggaggctgagaattttatggtggcattgttccctgagctgagttttggaaaagataaatgaaggcttactagctgttaaaacacatttctaggaaaacaaaaaatcctcatatatgggcctagaggtctgaaatcacttggtaaatttggagaactataggcaactacatattgttgatgtaaatagagtagtgttatacaagaagtgtcaggaagtgaggtttgagagataaaccagggcaagagtgttatgttatatgaaggagcttggattttaccctgtatataaaggggaggtagtaaaggattttcagtacgggaaaatataatctgccttataatttagaacgccacctgggctgtagtaatgaagaagggaggtcagacaatttgttatattacacccccaaccttttttttaaagtctaacgttactcctttattgagagaaaacattgagttgctgcatgtataatacatacattgattcatgtcttgccataagtgattcaagtggcaaaatatatataacatgaattttactgttttaactatttttaattgtatagttcagtgacattaagtatattcacattgtttttcaaccatcaccaaataccatgtttccagaatttttttcatcttcccaaactgaaactccctttacccattaaacggaactctttattcatctactctcctagcccccagtaatcaccagtctattttcggtctctgtgagtttgactacaccttaggttcctcatgtaagtggaactatgcagtatgtgtgcttttgtgactggcatatttcacctggcatgatgtcttgaaggttcacccatattcagaatttttctcctttttgaggctgagtaatattcagttgtatgtatatagcatattttatttatccatttattcattgatgaacactttggttgcttcctgttttggctattttgtgtaatgctgcgatacacatgggtatatgcatatctctttgagtccctgttttcaattttttggctatatacctagaaatagaattgctggatcatatggtaattctatttttaattttttaaggaaaggtcatactttttccatagtggctgtaacattttacatttctaccaacagtgcacaggggttgcattttcttcatatcctccccaatattttatgggttttaaaaaattttataactatcctaatggaagttaggtgatatgtagttttgatttgcatttttctaatgattagtgatattgagcatctttttgtgggcttattggctatttgattagcttctttggagaaatgtcgattgaagtcctttgcctatttttgggttgcattgtttgtattgtcgttgagttgcatgagttctttatctgttctggatcttaacccattatcatatacatgatttatttcactctgttgatagtttcctttgatgcacaaaagtttttaattttgaggtagtccagtttatctatttttcattcattacctgtgctttagaatattctttctttcatgtttttttaaccactagactaccagggaaggatagttattcttgagcatactttttgagaattaaaaagcagggccaggtatggtggctcacacctgtaatcccagcacttcggaaggccaagatgggaggataacttgagctcaggagtttgagaccagcctggccaacatagtgagacctcatctctataaaaccttaaaaataaaaaattagccagatgtggtgtagtcccagctacttgggaggctgagatgggaggatcgcatgagcctgggaggtggagcctacagtgagccatgattgtaccatagtggttggtaacagcaaaatcttaccagcatagggaatacttaacttttttaatctcaaaagcagaacaaattcttgttttaagattcaaatttaaaatggagtgaatattagttcattttcacactgctataaagatactccctgagactgggtaatttataaacaaaagaggtttaattgactcacagttctgcatggctggggaggcttcaggaaacttacagtcatggcagaaggcgaaggggaagccaggaccttcttcacatggtggcaggagagagagagtgcgcaggggaaactgccccttttaaacaatcagatctcttgagaactccctatcacgagaacaacaaaggggaaactgtccctatgatccagtcacctcccaccaggtctctcttttgacatgtggggaatcacaatttgagatgagatttgggtggtgacacagagccaaaccatatcaacagagtaaaactaaatatgttgttgttttatcccccctatttagtccttcagaaatgagttactattaatagtaaccctggccgtgaaccctgtgatgctgaggtagcacacgtattgtgaggatattggtgtcaggaagccttcccctcactcttttcttctcaaaagacacttcagaaaggccttctttggccaccactcttgcactgtctcatcttgcattctggttcgtgctcaccccttcccttcttttatttttattcgtaagacttctaaaaatcaccagatattaggatatttgtcatttgtttattgtctgcatgtgggcatagacttttgtctctgttttgtttactgctgtctttccaaatatttggtgaattaatagagcagcctctagttgaacatcttctagtggctacagaaatctcaaaaagtagatgattcttcacagggtgaaatagttggtccatgactcccacttttattcatatgctttgtaacacatctcataccattgattattgtagtctcctattttaatactgtaccatttatatatcccataaaataggctagttatttaagtgcctgttgtgtaccgggcgttgttgtaagatagtcatgggtattgaaatgttaatgttttaggcttaagtcattttggtaccaaagttttcaagagaaaattttcatttaaaaggatttatgaacaagttgtatttataaagatacatcagtttaatacttttcttttacatttaacctaatgtgaactgttttccagatattttctaaatttggcacagtcttgaagattatcacctttacaaagaataatcagtttcaagccttgcttcagtatgctgacccagtaaatgcacattatgccaaaatggtaattatgatctttgtttcatttttcaattgttaatcactccagtgataccttctcttgtgccccactttaccatgtgtttttaaaaaaattgtggcaaaatatacatgtttaccattttagtcgttttaaagtgtatgattccatgttttttttttctaagctaaaaatcattactacttcatatgaaacggtctcaaatctcctatcacctctcacatctctgagacgcaggtcctgtttgtcatgtttaaagtctagaattgaacacagtactcctcacataagctgactaatagagccatcattaccctcgtgctttcatttacttctcccatccaagtactaaccaggcccgaccctgcttaacttctgagatcagatgagatcaggtgcattcagggtggtatggctgtagaccatttacttctgttaaatcagtcagagattgatttcaccatttttgcagctgtattcaatgtttattcctgttgagctctaaattggtggagatactaaatcttaggaaatatgctgctatcaattcgtgttgtctttttttttttagtacacgaaaacctattttgacaagaataaaacttgacattcagttcgattatcttagacatacctcttgttgatatctatccctgactctaatttcatcttgtagcagtttttgctagtcatttctactttttggtcaaagatgaggactatggcttgtggtacttttgtgtaccacacagtgtctggcactcaattgggagtatagcctttatatttgctgtaccctgaacatgcatatattattttgtacctttacgatggcatacttgtcaattaccattattataaatcaggatatatatatatatgttttatttttatgtgatttgctttctggtatctatttttataaattcaagcatttgtgaaagtcgttaagtggccacaaatacccttaggtaaatttttattcttgcaaaggaaggggttgctaatctttggttacaactgactccacattttcctcagtttattattcaaagtattacaaagtaaatttacaagagaaaaaaataagtggtaggtaatattttatgtattgtggctctgacaagtaccatttacaaaagctttgtttcatcctaacaaagcttacacatcctagtataatgtgaattatactaaaatgaattaaagtggaatgtaaaatcagagtatcttaaaacttttgatataggcaaaataatcataataatagtgaacatttctatgatagacagtagttttccaatcttttacatttctcctctcttatttgatcttaccacagacaagataaatattatcagtcttattttacagatgaaagctgagacttagagattttctttttctctcttaggctcatagttaatgactgtgaggtaaaagtaaacccaagactttggctttttagtcagtgctttctgccttacacctgattgccactctttgtcaaagtagaggcttcttggttatcagtgttgttgtcttgccaaaaccagtccctttcttacatgctttaggctctggatggccagaatatctataatgcatgctgcactctgcgcattgacttctccaagctcaccagccttaatgtgaaatataataatgacaaaagcagagacttcactcgcttagaccttcctactggtgatggccagccatcccttgaaccccctatggctgctgcttttggtgagtagttcttttttgggtcacaaagcaagttttctgaagttacaagtttcatttattaagccatgtatgtttataagcctttttcttctcgagttctctcaggatttataaaggaaagcaagaatcctagaacaaagtatacccattaattaaatattaatattaggaggttctgttagttgacagatgaatatctgaaattgagttacaaatttattttctaacattgatattactcattctttaaaagccacaaaccatttgcttcaaattagtagtcttattaacattaacttaaatatgctagtttatagccataataattttgccatatatgctcttgagaaaaatacttttccttttttaagtagtgatattttatatcaagcttaaattaatagtatgatcttttattcaaagaagaggatttattttgttttgtttcctaaacttcagaacttccagctgtatcttaagcttgtgtgaagttgcattttgcattagtaaaaatacagccttctaaattgtctctgcaaattgtagctttgaagagcctccctcttttatttaaagtaaacctcttaaggaaaaagcaatggatggcccagtttgaatatcttattaggttagtatatgctacttttggtttcacagttctcaaaagtgtggtttattacttaaagtattactaccttttgtgattgatttttccttttccaaataacaccgtaaaatattgctaattgggactttaagtagtatttagttcatcatgttttataggtgagaaaattaaaagaattaagacaatcaaattataaaattaagacaaccaaatgattgtccaaacccttctgaaaaatagttcattattttaaagtaaaagcttttttattatttttaatttaaaaagccaagggaatgattcaatgcatctttctaatattgataaaatgtctgttttgggttctttgaccaaatttttgtgttttgtatttgttaccagcccctaacttacttatctgatttggcagtgacaaaggtcttttgtcattaccattttaataacaaatgatagaaatatttggtgcaaaaaaaaaaatactggggcaaattaaagtttgccaaaactcagctatcaaatttaagaattcacttattctaataattgattatatactcttggtgcaattaatgttctgtattatgagaggaggacattttaaaaatatgttaagaattttgatttctgaatataaaatatcagaatgttcatatcctttctcattaatgttattagtaaatccttagtcactgcaaaataatgtctacatcctgaaaaagtgattcatcagagagagaacaatgcactttatatattgtgtgaaagtttctctactttgcctatcactagtatttgacacagtttcactattcacttcttttttcttttggcctctgaaacaccactctccttactttcttcctacttcactggctgttctttctcttttaaaggtttctctttacagtttctagggctgagtcataagcactatgtccttacttttagtgacatttgttatacctatagaaaagcttataaaacacgtaagtatataaacacccatgtgactaccacccaggttaagaaataaaatatttatacatactgaagaagcaccccgtgtacctttcttcatcacttttgttcactctccttcccccaagataaccacagtcccaaatttgataattattctcttgcttttctgttttcctgttgtttttttaccactcattatatatccctaaatgcaacttaaaaattttttaaagcattcaatactttaaagcattagaaaaattttaaagctgtatttagaaccttacataaatggactcatgctggttttcttctgtgactttatttgccctgtatgtctttggtgattcatccatattcatacatgtggctgttgctcattcattctcagtacggtcaagtctgtagtatcccattggaagaataatagatcatggtttgtttatccattttattgttgataaatagtttggttgttttagtttgatgctactatgaacattctttcctgctggacaagagttttctctaagaagtacataggaaaggaattgttgggtcatagagaacatatttcttcagtttcattacataatgccagttttcaaagtgattgcaccagtttataactgcattgtgagattaaaataatttttttaagccatctcctactgaaaggagtgaggttaaaaaaaattttattttagtgtgtggtaaatggtatcttaacatagttttcacttgcattttcctaattactaatgaggttggacatatttttattatttatcctctcatacattttgttttatttatttatttattacacgaataagttctttagtggtgatttctgagatttcggtgcacccatcacccaagcagtgtacactgtacccagtgtgtagtcttttacctctcgcccccatccctgtgcaattcttttgtctgtttttgtgttttatttctcctttttttcttacttagttgtaggaattcattatgtattccagatactagtccattgtttgttatatgggttgcaaatagtttctcccagttttggcttgttgatttattctcttaatgatacttttacgttgtcaagtttgtttcttatttcctttacatttgtgcttttttgtgtgtcttatttaagaaatcctttgtgatataaggtcataaatatatttacttatattctaaagtttatggtgttttagtaataatttaaactttgcaattaaattttgtctgaaattaagttgcaagagtagtacaaagaacttctgggtatctgttattcagattgccctattgttaatatcatgccatatttacttagatcatctgagtatttatgtgtatgtatgtatatacatatataatatatacactacctatatttgtgtatgcatgtgtgtgtatatttattttctcccacctccaaaccacttgagtaagttgcagatatgatgtccctttatgtctaaattaatcattgtgtatttactaagagcaaggacattcttactaaatacagtttaattatcaaagttaggaaattaacatctatacagtcctttaatccatagactttttgttttgagatagtctttctctgtcttcgaggctagagtgcagtggcgtgatcatagctcattgtagccttgaccttgggctcaagcgatcctcctgccttagcctccaaagtagctagactgtaggtgaacaacactaaatctggctttttctttttttttttttgtcattttttttgtggagatggagtcttgttgtttcaaccaggctagtctcaaactcctgggctcaagtgatcctcccacctcagcctcccaaagtgccagttgtgaaaataatgtcttttatgacagaaccttttctggtaaagatccaaacaagtatcgggctaatttatttgtcatgtctctttcgagtcatttaattcagaacacttctttattctgtgtctttcataactattgttatttatttatttatttatttatttatttatttatttatttattattgaaacagggacttaatctgttgcccaggctgaagtgcagtgatgtgatcacagctaactgcaacctcaacctccagggctcaagtgatccttgtacctcagcctcctgggttcaagtgatccttgtacctcagcctcctgggtgtctgggactacagtcactcaccatcatacccggctaatttttatttttactttcttgtagagacagagtctcactgtgttgcccaggttggactgttggatttttaaagagtctagggaggatattttttgtagaatgtctttcaatatagatgtctgggttttcctcatcattgtatacatttttgagcagaaatactgcagaaataattttgtgtctttcctacttcattacattaggagacacatgatgttaatttatcctttttcttgtggtgttagctttgatcacttattaaagtggtcttgcagatttcttccctgtaatgttactattcttccctttgtaacgaatttactgattgagatgataaataccctgttcttaccacttttcaccttttctttttctttttctttttttttttttgagacagagtctcgctctgttgcccaggctggagtgcagtggtgtgatctcggctcactgctagctccgcctcccgggttcacaccatactcctgcctcaacctcctgagtagctgggactacaggtgcccgccactatgcccggctaattttttgtatttttagtaggatggactttcaccgtgttagccaggatggtctcaatctcctgacctcgtgatccgcccgcctcagcctcccgaagtgctgggattacaggcgtgagccaccgcgcctgtcctaccttttatttttcacatctgttgccaaaattatttgttactgtgatggtttccatgagataatttgctaattccatcatttcttctacctttattagctagcattttattataaagaatgtttttcttggctgggtgcggtggcttacatctgtaatctctgcactttgggaggccgaggcgggtggatcaattgaggtcgggagttcaagaccatcctggccaacatggtgaaaccctgtctctactaaaaatacaaaaattagctaggcgtggtggcacgtgactgtagtcccagctactaggggggctgaggcaggaaaattgcttgaacctgggaggtggaggctgcagtgaaccaagatcccgctactgtactccagtctgggcgacagagcaagactccatctcaaaaaaaaaaaatgtttttcttgactgagcacagtggctcacacctgtaatcccagcactttgagaggatgaggtttcttatcatcactttcattcatttatttcatgtcagtaaggactcatagattcttattttattctacagggtataatttcctactttcgtttttcattttatgttcaaattacccctgatttggccagtaggagcccgttcacactggctctgtggccttttgacatgccaccctcataattggagcactccctttctttctagcactagatattccagatcttctttacccaacctggcactggaatcagccatttcttcaatgagccctggtttcttttaggggaaaatggtatttaaaaatcaatacctaaacattagatgtgctcattgacaatagggcatgactaaatggacatgactaggacatgtgtctatgtttgcttcataaatatatgtttctgtgtgtgtgtgtgtgttttaaaaaacaaattttaactgaaaatcctgattcctgtccagcaccctttacatattggtaactcttcaagaataagaaatgtgattcctattagcctcaacatgtttacttatttgctcaatcttagattacacagaagtggtttcggaattgcaaacacatactactaactttagtttttgtttgtttgtgtttttgaggcagagtctcgctctgcccaggctggaatgcagtggtacaatctgggctcgctgcagcctttgcctcctgggttcaagcagttctcatgcctcagcctgcgagtagctgggactacagatgtgcaccactacacccggctaatttttttgtattttttgtagagacagggttttgccatgttggccaggctggtcttgaactcctgacctcaagtgatctgcccgcctcggcctcccaaagtgctgggattacaggtatgagctactgtgcccggctgagcttagtacttacaagacttgtttttctgggcattgctacaatggtctagttgtctccttttgtcattaccagaagtttgaatctctgctaaagtcttttttatcttgttcttcttcaagactatcttggcaattcttgaccatttgtatttcttaagcattttaagatcagcttgttgagttccaaaaaaaaaagcagcagcagtagctattggggttttgattgggattacattgaatttacaaatgagttgaagataattgacatcattacaatagaatcttccagtctttgaacattgtgcatctgtccattcatttggactttttttatttttttattttttgagacagggttttgctcagtcgcctaggctgaagtgcagtggtgcactcatggttcactgcagcctcgacctccaggctcaggcagtcctcccacctcagcctcctgagtagccaggaccacaggcacacatcaccatgctctgctaattaaaaaaaaaatttttttgtagaggtagggtccctctgtattacctagattggtctaaaactcctggtctcaagtgatcctccaaactctgcttcccaaagcactaggattaccagcgtgagccactgcagcctggatgtttgttcatgtctctcagtaaagttgggtgacttttctccttaaagatttgcacattttttgttgcacttattcctgagaacttttttttttttttttttgagacagagtctcactctgttgcccaggctggagtgcagtgtcatgatctcggctcactataacctctgcctcccaggtccaagcaattctcttgcctcagcctcccgaagctgggactacaggcgcatgccaccatggtttttgtatttttagtagagatggggtttcatcgtcttagctaggatggtcttgatctcctgacctcgtgatccacctgtctcggcctcccaaagtgttgggattacaggtgtgagccactgtgccctgctattcctgagaacttcttacttttacttttattttacatggcatagtgtggtgtctaagaaccatactttttgtattctgattctggacctattatttatgagctgtgtaatcttgggcaagttacttaactactctgcatttctctttctttctatgtgtaatgtgtaacagttcttaactggtagggttgtgaagattaaatgtgctcatgtacatgaagagtttaaaatgatacctaacataagcccaatgtaagtttgaagtatcattactgttttgttttctaactgttggtaatacagaagtacaacattattatctcttgatttcataactcagaaaccctgataaactcttatgaattccagtaatttgcccgtggattctttttacatttcagtacacatagtcatatcatctacagataatgtcagtttatatcctttcttctaatccctggggctttttttattttttgagacagagtctcgatctgttgcccaggttggagtgcagttgcacaatcttggctcactgcaacctctgcctcccgggttcaagcaattctcatgcctcggcctcctgagtagctgggattacaggtgcctgccaccacgtctagctaattttttgaatttttagtagagatggggtttcaccgtgttggccagcctggtctcaaatgcctcacctcaagtgatccacccaccttggtcccccaaaatactggtattacagacgtgagccacctcgcctggcctaatccctgggactttaattctttttcttgtttaactaagatagaccaaacttctaaaattaatatagaaatgggaaaagaaagcatttagagtagagctgctgaaaactgttttttttttttttttttaagctgtaagacttaatatagagctgcagtaatcaagccagtttggtaatgtcagaaggatagatatatagattaatggagcatattagagaggctagaaatagatccacagatgtggtcaattgattttcaacaaagttgccaatctaatccactagggaaagggaaagtctttcaacaagtcggttttgtataagtggatattggtattggggataaaaagtattaaccattatcctgtccatactgacaaattaaattgaaatggatcttagtcctgtatgtaaaatttgttgcgtggacctgtagttccagctattcaggaggccgaggttgaaggatcacttgagcccaggagttctgggctatagtgctccgtgctgatcagatgtctacacttaagttcggcatcaatatcgtgacttcccaggagaggaggtccacaaggttgcctaaggaaggatgaactggtccaggtcagaaacagaggaggtcaaaactcccatgtagatcagtagtggtagtgtgcctgtgaatagccactgcactccagcctgggcaacatagcaagaccctgtctcttaaaaacaaatacacttatacctataaaatttccagaagaagacataggagaaaatctttgtaacttggagatatgcaaagtttattagaccacagaaagcacaaaccataaaaggaaataatttacatattgtaaattattttagtgctccgctgcttgaaagataaaaccaaaaggcaaacattactcactccaagttggcaaaacctctggctcctacctagcctggtgatctgtgaaatttaaaaatgttgctgggtgcagtggccagcacacctgtagttcctgttacatgggaggctgaggcaggaggattgtttgagctgaggcttgagtgtgctctaatcaagcctgtgaatagctgctgtactccatttcgggcaacacagtcagaccccatctctaaaaaatatataaataaattaattaaaatgtgatttaatattaggtgttaattaaacacaaatgttcatagcagttttatttataatagccaaaatctagaagtattctactaacagttgaatagataaaagtggtccttctatgcaatcaagtactattcagcaataaaaaggaataaagtagtgataaaggcaaagggattatgctgaacaagagaagccagacagaagggaacacctattctataattctgtttgtatatatttctataaaatgcaaactaatctatagtgtgagaaagatcagtggttgcctgaggacaaggtttggagagagggagattgcagagggacatgagaaaattttcaggaatgatgggaatatttgttatcttgattgtgatgataatttcacatgctttaaatatacagtcatgtattgcttaaccacagggatacgttctgagaaacgtgtcattaggtggttttgttgtgtacttaaacaaacatagatgttatagcctactaaacacctagactgtatggcatgttaccataatgtatactataggcagctataacatatggtaagtatttgtgtatctaaacatagaaagggtacagtaaaaatacagtataaaagatcaaaatggtacacctgtatagggcacttcctatgagtagaggttgcaggactggaagtaatatttttatttccttaataataaattagccttagcttgcccaggcatggtggctcaccctgtaatcccagcactttgggaggccaaggcaggtggatcacttgaggtccagagtttgagaccagcctggccaacatgatgaaaccccatctgtactaaaaatacaaaaattagctgggtgtggtgtagggcttctgtaatcccagctacttgggaggctgaggcaggagaattgcttgaacccaggaggcggagtctgcagtgagcccagattgtgccactgcactccagcctgggcgacaaagtgagactccatttaaaaaaataataataaaataaaaaacaaacaaataaataaaataaccttagcttactacaactttctaacttcataaactcttaattttatttttaacttttgactctttcgtaataatacttaccttgaaacacaagcacattgtgtagaaaatatttttgtttacaagctgttcaaaaatattttttcttcgtagccttattctgtaaacttttttctattaaacttttttcaacttttagttttttgttaaaaactaagacacatacacacgttagcctaggcctacacaaggtcaggattgtcaatatcactgtcttctacttctacatcttgtcccactggaaggtcttcagggacagtaaacatgcatgaagctgtcatctcctataatgacaatactttcttatggaatacctcctgaaggacctgcttgaagctgttttacggttaagttttaagaaaaaaaaaaacaagtaggagtacactctaaaataacaataaaaagtatagtatagtatatactatataataaaagtatagtatgtatataaaccaataacataattctttattatcaagtattatatactgtacacaattttattttctgtacttttatagagttttattccagcatcactacaaacatatgaggaatatgttgcactacagtgttacaatggctataacattactgggcaataggaatttttcagttccattataatcatatgggaccaccattgtatatgtggatcattgaccgctccgctgcacatgacagtatatcaaaactcatcacattgtacatagatagatatacataatatagtacatacacatgtatatatgtacattgtattctatataagttagaaaataaattaagtcaaatcattttactctaatgctgactaccctccaaaggtttctgtttcttttggagtggatgcccccatctttacattggattacaaggccctataccatcttttttctttttgacaaatctttttttgtgctcccctacttcatccttctacccctcaatactgaaatccctattgtttgtcaaacatattaggtgtgttccaacctccagatcgttccacttgttatttcttctgcctggagtacttttctcccaggtacactgagagagatttttctcatctgccttctttgacctgtcttgtcaaggtcttcctcagaattctcctgatcgatccttccttgcctccctccctccctccctccctccctccctccctccctccctccctcccttcctcccttcctcccttccttccttccttttcttcttcctcctctcccctcccctccctctcttcttttcttttcttttttcctctctcttctttctttcaacagatctctctcactctgttacccaggctggagtgcagtggtgcaaccatgcctcactgcagcctggaactcctgggctcaagcaatccttccacctcagcctcctgagtagctgggaatacaggcagataccaccatgcctggctaatttcaaagtttttatagagaggcggggtctcactatgttttccaggcttctcttgaactcgtggcctgaagtgacccacccaccttggcctcctaaagtgctgggattctaggtgtgagtcactatgcccagcctgtttttttccatagtaattgtcaccttacatgccatacaattaacttattgcgtattctgtgtattgtttattctgtttttaatctctcaaacttcaccagggcagacttggggagtaggatgcctattcagtttactaatatttcctaattctggaagcaaaataaccatgcaaacaatatttgctgaataaatgtttattattctgttttttccactactggtttgaagtttagcactgcttctgtttttatctagatttttaactttcaaacattttaccaaaatctaatgttaattaatagctgtaccttttcttacataatagaagaaattaggacacttggactccttttgcctcctccttacctgtgatgttattatatttttatgttatttgactttagtcttggcaatttgttattattgttttgtacaatcagtgattaaaccatatataactctttaggcttttcattccttcttgcaactcagacatgccatctgaaaacacttatattctgcctgaggatcctttttagtatttcacttaggaaaggtctatggtaacatatttgaagtttttatttgccccaaaatatctttctttttttaatcaattttaagagttatttttgctgagtataaagttctaggttgacaggtattttttctttcagcgtattaaagataccattctgtggtattctgatgtccattgttgctcttagaaagtcagttgtcaagctaactgctgctctgttttttctggctgttctttagggattttcctttttggtgtcctttttcttttgtgtactttcaatatgatgtattcatttaaggatttatttttattctaattggagctcattgggcttcttgagtcagtggattgtttgttatttttagtggttctagaaattatcctttcatatattcccccttaacactatttctctcctgcctttctggagctttgattagacatgttatacccccatactgtcctcagtgtgtaaaacttaacttttctttctgagctgcatttggaataattcttaggacctaactttcagttcactgatgacgctcttcagcttggtttaattgtcgttaaatctgtcctataattttagatcttagcaattgtggctttcatttctagaaattttatttggttcatttttaaaaagtgtctcctgtactacagattttttttgtatgtcttttttcaaacatactatttaaatcttcatctgcttaatttagtatctcagattttttgcaattttctttctgcttagatatttctgactttttgggtttttttgtgggggagggtggggatgagttattcactttacttggagaattaattatgattgtcctttgaggctcaggattaaggtgtttgttcctccagagagaatttgcttgcctgcagcattaaaggctctacgttcaggatcatttcaacctaaatttatagcttgattttcctttggacttccaagaaatgtaaatttggactgtaaatttttgtgaaagcttccttttggttagaacttttcaggggacttttctcccttctctgctggtcacaaagcaaaccttccttgtagtcttttgaagatgggaggaatagtagatagggtaggttattttcagcttatattaataggttaatgcagtgagagtatcctgttgacttctcactgtgggctaaccctgggatttgcttctggcctgctaccccatgagctgatcaaaccaaagctcagtgtcacagggttagagtttgggcctagttactccttataatctcggcaacttttaggttttttaaagaaagtctttatacttgttcattgagcgtttttctgcagtaaggttagtttatgttaattattctccaatttagacattaagcttgtttctttaggattttgctatttcaaataacactgtgataaactgatttcatgggttaaaatgttatcttatgtattaattcgtattgccttggttgctatcatggtggtacattttccaaatgtgaagaatccgttcttattcggatctgaaacatttttcttaaaggtttgtgtaattgcctcattctgaaatgaagatatgaatccactgtctaacaggttactttgctatatgatgtttctgtttctgctcatttagggagtgtggattatatagacacttgaaaaatgtgtgttttgtcaaattttagcaaatgttcttattaatcttattttacatggaaacagttattcaaatttggtcttgatgattgtttgccagtccttttatgtatttctatttaatgttctatgatagttatctcaaaatctttcctcatttctctcaaatctactgcttgctagagctctctctgctcaccccttctgtagccatctgtgttagccactttgctgtcctttacaactactccccctcatcagtggttgatagaaattaatgtttatttctctcccatgcctcggcagctgtgaataagctcttgcagccatcctccacttgccttttttatctagggcccacgctaaagatccactcctttttgagacatggcattcttggggcagagagtcgagaataagggagcagatataaacccttaatgccatttaaaggctctgtgtagaagtaacatgtgaacatgtgtcatttccaccagtattctttgggaaaaacatgacatgatcaagcccagtgtgaactgcatggaaatatgtgctcttccacctaaaggcattgcaagtcatgtttggccagttatatagaagggggcaagtgaatatttggcaacaataatacaatatccaccgtatctctccttattgtttaactttgtttttagcctttctagtgtagatgttcataattgcttgtgtctatcttgaggcctctttgtgaagtcttcctttgtgcctttaatacagtgttttctgttgtaaaaatgaatcattttacctatgatcttgagcttgcttgtgtgtaagtttagcaaagacaaaatcttgtctgctttgttcagactcctcactagaatgcttagctcatgatatgctctcaacatgtatttgttaaatggatttcactctcccttcttacttcatcagttattctgtcagttactctcattttttgaatctcagtgtcaattctctgtgctaattctatccctgcagtctcttgtgacggtattttcttgaattactataattagttacatatttaataaattatattaaataattctttttaatgaagaaaataaaattatatgagtttttaactcctggaaaatagagcctacatacttgtgcctataaatacagtcatctccctatcattgaaaaagcaaactcccccctttgaggtttgcagtccaacctctcactacttctgtaatactgttgttttacctttttcatttctcattctctgtgccctatattgaaggtcctccctatcccccttttgaaactattcctctagattctgaggtactataattccttgtttctttcctgtttctagggctagtctcttcctcttttctgtaggatattccctttccttctgttgcttaagtgtacctatacccccaggctgtatctttagccttcttcatttcttgtcttgtgctctttttaagtggagctctcatttgtatggctttcacatttatttctacacaggtaattcacaaatttatgtgtttacttacaataatctgagtttgcgcccttatttccacttttggccatttctttttgaatatctcatcatcatcttaaatttgatgttcccccaaaccaaattaatcatttgtctgctaaaactgactctccattggaactcccgtttttgttgatgatatacagtcaacaggcttcttaaaggaaagagaagaccagcatttgtttagcatttagtacacactaagtactgtgcttcttcaattacataatatctggctcaggttttacctccagtgaaaacttctctgaccagtcacagtgaatcctctgtgatcacttcttactccaattgtaatatatttgaatttgtacctttcgaccctcatcatgaatctcctataattcgtacttttagtttgtaagcctctcaaaggcaaggattttaactcatttttttttaaatcagcatagttaccccacagatacagatttaataacatttagtaagtaactgatttttcattatgaaatattgctctaaataagagaaagaatctcaggctagtccaaaactaaatcatagctaaactgtactcttggtccttgaacccaattgaaaagggttagcctttggaagtggcagaggctctttttatacgttaaagatcacttgttgaacagatctttactccgtaacagaatctctttgttagtaatatactttcatagagccattttatattgctttgataacgatatttatagaaggtagtgtgtttactttagcttctctttcccattaggtgcaccgggtataatttcttcaccatatgcaggggctgctggatttgccccagccattggatttcctcaagctacaggtgattcttttaagttggatttgaaatgacttttaatgaagttgtatattttctaggaacttaccaagatgaagaatgttatcatatttgaagaatttaccataaagcattatgcatatcagctgtagaagtgtagtgatttgtatgatatatagcttccttgttatttacaaattattctctctggtcctatttttaattccagtaatcagtatgtgttctgcatcatttatgtttgcttttggcacaaataactataggctaactacattaaataaccttagatttgcctttccagttgttatataaaatgtataagctgctctgtctttactgataaacttatcaattatgtgttgaacagacctgtcttatctttgggccttcaatgcctttgacagtactcaacaaataatatgcagtcatactatacattcactattcatctttggaaaaccttttgtcattaatgggttttgaagattacgatagaggggtatgcatgctgtttatttcaggggatatatattttgtctctttagctaatggaggtaattaagagataggagttgattaatacgttgataatgattcccattattttcaaaacagtaaacaaaatgaatttgattataatttaaggaaaagagaaaatgttactttatggttttatctctggtgtctaaagaaaacactgaggttggtgattaggggaatgacagagtttggtaagcctactccacatatttccaacttaaactgattcatgactttaactacattttaaattgcaacatagctgctttctggcagtaatctttatattctaacctttgaattctgggaattttaactactctctctctctctttttttttgttgttgttgtgagacagatagctcactctgttgcccaggctggaatgcagtggtgcaatcttgtcttactgcaacctccacttcctgggttcaaatgattctcatgcctcagccttctgagtagctgggactagaagtgcatgtcaccacgcccagctaatttttgtatttttagtagaggtggggtttcgccatgttggctaggctggtctcaaactcctggcctcaagcgattagcctgcctcagcctcccaaagtgctgggattaaagggtgagccactgcacctggccaataactactctctttttgatggagaggatggagttaacagaaagagtgatatgaaggttgaggttttaaattttaccatcttggtggtttttagtatatcttaacatatgtttaattaagtgaatattctacctattgtgttaaaaacatagtttatttatttgaagctcctcaaggtttaacaattggtggacattttgatatgttttccctcattttggatatttcttttagatatactctatatataaatattaattaatattaagaaagatgaaaagtgaataaaagagggcttctgacttgataagacttttaagctgatagaagatacacacacacacacacacacacacacacacacacacacacacaccctacagtgtagctcaactgtgctcttagctcatgaataacagacatacaaacagcaaaagttatgcaaaagtcagggttggactggaggggcatgggaatatgtcatgtgaaggctattgatttcgtgcagtagtattcagcctgagaatgtggtctgcacagttttaaaattcagcagtatggatgatggtagttatgaccttcttagattatcaagcagaataggctgaatgtaaaatatattataatttaattacatgatttgtggtgaagtggtcagactgtttattttaaagagtcattaaattaaggaattggttcattttgcataaactagaggttttaccttagacaggttttaagctgagaacacaaaatagtgggaaagtgtgctgttttaagtatagtgtcagtattctgctgttactgagctttcaggatttccatagtacctagagaagtagagagctcagaacatttctgctacaaaagaatattgaattctgtaaatatctattttggtcagaataatatttaatatagcattttatacagtcacaaaatgtttttcccatataaaatgtcatatagcactacctagcatgcatgtttttgactttctgctgaaggactttaaaaaaatacatatctgattttatggtagaagtcagtatgaaaagcatatacacttgatagaagggtgttaggatatatctattgtaagaaacagagggagtgtttgtagttgatagaccctctgaaaagcctaatagcgttaggcccagtgagttcagttactctgcagagtactgtgtggataatagagcactaagtatagtaatgtcaatagatgaggagctcagcttgcagacagactctgtagggcagaaaactggccttcagtatctttatggtagccttgacacattttctttctgtagttttcctttcctctttatttacttaaattgtatcaagtgttacagttcttcaaataattagaatatgaaatgcttttggtatttttaaaaggtctatcagttccagctgttcctggagctcttggtcctctcacaatcacctcttctgctgtcactggaaggatggccattcctggggctagtggtataccaggaaattctgttctactcgtcacaaatctcaatcctgatgtgagttgaaaagtattatatgtaaatagtctttcaggagaaggtatagtagcacttttttctttctttcttttcttttcttctcttctcttctcttctcttctcttctcttctcttctcttctcttctctcttctcttctcttctcttctcttctcttctcttctcttctcttctcttctcttcttttcttttcagaaaggattttactctgttactcaggcttcagtgtggtgctgcattcactcactgtgacctctgcttcctgggctcaagtgatcctcccacctcaggctctcaggtagctaggattacaggtgcccactaccacgcctggctaatttttttttttaattcttttgtaaaaacaggatcttgctatgttgcccaggctggtctcaagctcctgggctcaagcgacacacacctcagcctcccaaagtgctgggattacaggtgtgagccaccatgcctagccatggtagcttctgatccagggttgtattcaaattaaaatgcttaagtttgttttaagaacttctattaaaattcatcactagtatatacggaagaagcatataaaaccatgctttaaaataaaatcaactgccattacagtataaataaacttattttcaatttttacttaaattgtcagacacttaactttgtgttaccctttacagcttatcacaccacatgggctttttatcctatttggtaagttcatttttgctattttattattgtctacaggtgtgaattgagcacatttcacttttttagtaatatgtattgattacttctgtgtgccaagtattgtgctgacactgaggataaaacagtgaataagacttagtaagtaattacagtgatgatttatagtatgggaaatataggttttgtaaagggagtgtaacgcagggagacctaacctagcagagggactcaatagaaatgatagttaagctgacttgttcaacatgagtaagaatcagccaggcagaaagggagggcaatgtcttcacaggggaggggagaggggagagatgggtcctggtgcatggaagtgaaggaagcccagtggtgagcataggcaagcataatggagacctggtgaaggtggacagctgcgtagggtcaaaatcgtgaagagctgttaaaagctttgttaaggaatttggtttttacctaagaacaatcggaagccattgaataattttaaggcaagagagtggtataatgcgattcaggttttaaaaatagtctccaaactttcgaacagcatagaaatatgagaacaatgaaataagcaatatttactattttaaagatttttattaaggacagtttatttttccataaaacatgattaacatctaatgagcagtatgattaatatgctttgatattactaaaaatccttgttttcattttgattcagtaatccaagggtagattatttcactacttgattttaatggttgtcatagctgaagaagataaatcataaatatatataatctaaatgcaggggtttcattgttgctgtacttcaataattatttcattatttttttcatgtaatccaccaatttttgtcatgttttatctagaaaagttagattttttccccgtaaatcagtggatcttgaaaactgttgtgtttgaatatgtctgacaaatagagttaaaactcactgatatgcttcatttgtaagatttttaaaataagatagaaaactgcttccaaattttttgaatgtgatagttttagagacagggtctcactgtttcccaggctggagtgcagtggtgtgatcatagctcactgtagtctcaaactcttgggctcaagcagtcgtcctccctcagccttccaagtagctgggattataagtgcaagccacaacaccaggctgataggttttttttaatggaattttttcagatgtaatttacaaccatacagtttacctgctttgggtttacaactcaagatttttgtaaattcacagttgtgtggccatcaccacagtccaattttagaaaattttcaacgcccgagagaaattcctcatgctcatatgcagtcactataaaagtttttattaatgattgatgcatgtaattttcagtaataaaatcaagtattaataatacattttaatatgactcttttctagccaaagcatgtttcataccaaaagtagttaatttctcactcatttaaaaaatggctgggtgcagcagctcatgcctgtaatcccaacactttgggaggccaaggcaggaggatcagattgtttgagaccaacctgggccagatagtgagaccccatctctacaaaaaataaacacccacattttgcaaaacaaatggtatatgtttagtttttaaagaatagttacatcaccatcgtgttatttctgagaaaggtagcaaattcggaatacttgtctccattttaaatttttaaagtgccattagtatgataatgatgtaactattgaaagatttttttttttttttttgagacagggtcttattctgttgcccaggctggagtgcggtggcacaatcttggctcactgcaacctctacctcccaggttcaagcaattttcccacctcagcctcccgagtagctgggactacaggtgtgcgccaccaggcctgactaatttttgtattttttggtagagacggggtttccccatgttggccaggctggtctcgaattcctgacctcaagtgatccacccacctcggcctcccaaagtgctgggattataggtgtgagccactgtgccctgctgaaagatcttatttttataatattgatgatactctgtagcacataaactgaaatatattgtaatacactggatgaaaaaatcgagtgagactggaattgacttcgtagaacctgttggctttaattttatctatatattaaaaattcaaaaactgtagttttttaatattggtttatataaatagattagtatagataagagtttgattattatctttccataccccagtgaatcactttacccatcctttaggatatgggacccactttggggaacactagggtagaaaaatcgagggtaataagatgagttaggatcaattaggttgtcctgattgtccgagtgtgaaatggtgttgatagctttgatggtagcgaggattgggagaggtggacaaatatgagagatatttagaccatagaatcaatgggtgctggtgattgattgggtgggtgtcagggtttgaggaaaggaagaagtcaaaagatgactcccaggtttctggctggagcaactgtgtgaatgatggtatttatctacagctttagtgagcactgggagtggggagaggaaaggggggatgaatcattttgggacataataagtttagagtgttgatgggacatccaagtgaaaaagagtaagtacatgaatagatctggaactttggaagagataaaaatttgcaggtgtatgtatggaattgccaagggagagtaagaaatgccttctttaagtatattagtaaaattaattaaacacaacacaatcagacgttaaacacagtgttttgttttgttttaattaggagtctatggtgatgtacatcgagtgaagattatgtttaataagaaagaaaatgccttggttcagatggcggatgcaaatcaagctcagctaggtactaatgattaataattattaataataatgtgaacttgccccttttgtgtgtgaattttccttcaaaatacagctagtaggaatatgattttacaaaagaacacctccttgtgataatgccttcattattatttgcatctgtctatatgttaaggttaaaaaatattcatcactcttctaagtctgaagttcatttgtctacgtgaacatattgttaatttctagagctttgaccctagggtttttccgttaagtttaataagcatgatttgttttatttcatttttttaatttattttccttccaaattaagttttctgtaaccactgagtggcttaaaagtttgggcaaactttgtaatgatgatacaagaaagggttcatggcttcactgttataaaagctgtaaagtattactcaaaatttcttataaaaatgccttgcttgagataaaactaatatattcagtaaccatttcatgaatacttactatgttccaggcactctgaaacttcatagcactctgctcagaaaatattttttgtttgttttaaattgcttttcttatagtgaaatgaagtcatttaatatatttccttgagggtttttggattttgaaacccttttcaccctcaaactgataatacagttttaaataactacataaaaataatttatggtaatgttgtcagatactactgagaaatctatcctaatactcaaactttaaaattttcttcccatgcactagcaatgaaccatctaagtggtcagagactttatgggaaagtgcttcgtgctacactgtccaaacatcaagcagtacagcttcctcgagagggacaagaagaccaaggtctgactaaggatttcagcaatagtcctttgcatcgctttaaaaagccgggctctaaaaacttccagaatatctttccaccatcagccactctgcatctttccaacattccgtatgtacctaataagttattaatcacttagatgatgaataatctacaatatgtgatgtaggagaggttaaaacttctgaaattgttctaacctagcagttgtcctggtcaacagtttctgataagacaatttatttgccatcatgccttcagaaggttatctccaatcctacactctaaaatagaaagatacctgttttaaaattttctttccaaatagagaattcacaactagttatttttcagtgatcaaaggtcataaaaaaaattctaggcagaagtattccattggcacgtatttgtccatctgtttgtagaagtaatgactcttacgttaaccaatatgacaaaatcaaattgtgtatctaagaatttggtaaaaatggatttcatactttttatctacaagctgtaaagccatagatatggtaattacttaaaagctaaacgttattttcctgtagccactgtacaggtctctttattaaccagtgttgtatgtgtgctttagttatcttcaaactcagggattgacaacctgtagcctatggctgtttttgtatggcctatgagctaagaatgatttttacattttaaaatggaagcaaaatattttgtgatgtgagaaaattatataaaattcaaaattcgccttttataaagtttcgtgtaatatagctgtacccattcacttacgtgttacttatggctgctcttgagttacaacagcaaagctgattagttgcagcagagacaatatggcccatacagcctaagatatttactgtctggccctttaaagaaaatatctggctatctctgtcctaattgttgaagtccttagtctacaaaaatggcagttttgttcatggactttggaaattgttaaaacaaaaaaatggcagttttgtataatttgaactaatacataaaagggactataagctttggaaaagagataaaagctgtgggggatgtgtgtgtatgtgtgtaaaaatttaaaaacttgagggtatagagaggggtgaagtctggaacattattgagaatgagaatgggaagtgaatagtaatagagaataattactcagaagaatgctgaatatccggcctccctgctggtctccagttaggctgcatggagaaaccttgaatccaagtggggcagtggatcaaacctcataccagccgggaaactggtagagtcaaggaaaaaaaaaaaaagtagattaaaagtagatgacatggaccgagaaatttagcagctcattactgtggagtgtagggtaaatggacaacaattagatactgaggcaggcacctgtcatcattagcttttaatttttttaaattaatatatttttttttgagacagggtctccctctgttgcccaggctgtagtgcagtggtgtgatctcagctcactgcatcctctgcctcccaatctcaagtgatcttcccacctcagctttccaagtagctgggactacaggtgtcggcatgcccagctaattttttgtatttttttgtagagacagggttttaccatttgcccaggcagatctctaacttctgagctcaagcaatctgcctcccaaagtgttgggattagagacgtgaacgactgtgcccagctctgttgttagctttttaaatataccacatcacgcaggagctgggctccagttgcaacctacataggacatgtaggaagaagaagaaaggatattaatattcttccaagttctgggtactgtactggtgctttacacatgttgcctcatttaatctccacaacaaccttttttaaaaaaactgtgataaaatacacataatttaaaaattacagttttaactatttttaagtgtacagtccagtatacattcacattaattgctttacacattattgtgcgaccgtcacctctgtccatctgtagaacgttttcatcatcccaaactgaaactctgtacccattaagcagtaaccacctttttcctcctaactcccagctcctggtatccactattctatgttgttgttggcattattatccataataacctttgaagtaaggtattttcattgtattaatgaaactgagacttaggttaaaaaatttactcaaagtgatatacaagtgagtgaggaatagaaagtgaacccaggtctgtcttcctacagagctaatgattgttctgctatactgtccttgttggcagttgtgagatgaatctacttttagtcagttgactgtcacgtgatagaccactatattagttatgtatggctgtataacagaccaccccagacttcacagcttaacacagtagtaaatgtttattatctcatattgttactgtgagtcaggaatctagaagtggcttagctgggtggctttggctgagtctgtcataaggttgtaatcacgatgcaaggcaaggatgtggtcatctgaaggttttaactggagatagaggatccatttccaaaatggcttagtcatgtgcctgtttgttgaccgaaggccccagttccttgtcatgaggacttctccatagtgtcttcacggtgtccttccaaagctaatgattcaggagaggacatagtagaaaccacaatgtctctcagcttcaaaagtcacacattgtcatttctacagtatccaaagtgtttacagaggatacctgtgctttctatgggaggggaataaacaagggcatgaatatgagcaggcaagagtaattgggggccaccttagaggctgacagccacatacacacattcagaattaccctgcaaacagttgaaaatatggaactccagactgtagcagacaagtcagagctaggaaactttggaagtactacagttgattactaaagccagtggtatgactaataagaataaatatagattccaggcacagctgcattaaaagaaaaaagaatatagaaagatttttcttgccctttatatacctgcacatgtcttctgcaaggattgagacaaaattccattgcttgacgatacatgtcagtttttgaacatctttcagggaacttccaaatcaagtctttgtcatatggcttaataattctgtttgaaatgtactctagagatttgatgattgcaagagttaatctgcttcacttgagaatgcggcccaggtagttgactccctctgatgttttcacagcccttctgttacagtggatgatctgaagaaccttttcatagaagctggatgttcagtgaaggcttttaaattctttcagtaagtctttgctttcaagaaatacattaaaattatttaatatggtatgcaaattttaaaggtagttcagtgaagtcttctggtggaggaaggagtttggaagcaaaattcattctaaatactttctgtatttcttataccattttcaggaaagatcgcaaaatggcgctcattcaattgggatctgtggaagaagcaattcaggccctcattgagcttcataaccatgaccttggagaaaatcaccacctcagagtttccttctcaaaatctacaatctgacttttctgtgaatttttctcctaaaactggaccataatttcagtaaaaccttcagacatagactgaagcagctcaagaccaattttgcctctttcacaaaaataactctgagtttgatattcaagtatattttaaaaatcaagggattttttttttttgtattccccctgcccccgccagtcaaaggtttcttttccctttttaccatggtttctacaaaaataaccttcaggaaaaagaaaatcaggaaaaaaattttttttcaataatcttattccctatattaaattagatttgaagaggattaacgttgttttagtttgggtccagatcagccttatacaacatttctaaactcatttgtacttttaaaaaatttaaacacagacttctaaaattacttgatgtaagtaatttaaatcacttatgaccaagttattaaccttatgaatcagaagtctgacccttgtaggaaattatattcacatataaagtacatcagatctttgccatatattgatggttattatgcataaacacattgagttgtgttggaagcagatttataaacctgcatgttttctttgaatgatttctttttttcactgtaagacactcctttaaataatgcctatctttaactttttaagactatttggaaaaatgcagtgtctcagctgtccccagggaaattaagtggaattcaactaagatctgttaataagatgtcagaataactaataattttattaggaaaaaatcatgttttaaatttcaaaatgacacttatttgtcaagtaatatgatcttggaaaattttaaagaaaaataatcctacttataaactacttttttataattgttttcagaaaaaaagtttacagtcttaaggaaaatattcaggtctatcatatggtttgacagattttttaaaagttatttttggtaaggtcttcttttagaaaaaaattaatctcaagggttttttgtaccactataatctctaatacttactcagaattactgtgtatttacttaatttcttattatgtgccttattatgtgcttaagatacaataggttagagtttaatctaaatatcttgaaagctatattgtgggcttggtaagcattttgttttttctttctctgttttggtaaggatttaaaatttttttcattgcaattttaagtggttttcaataagtaatagtttttatcaaatttttggtgcttggtgcagagacggtgtggggaagggtgaatggttttgggaataattcagtgcacacctgtaggcctctttacattgtgactgataggggttattgcatatcaatttggggctgtagagtgcaatctcagtttcatctttttcacccatcagaatttgtctcaggattacttggtttttctcagtcctcaagcgagaacttgcttttctttgttaatgtgactttcattactgagtacccacgtatttggagtatgagaaggtgggttatttctcatactctgtccctctctttttcattgaatgtaagagtacattttaatgttgcttcagtgattgtataatgtaaaattgtttctttttaataagaaactttgctattatttcttcaattgttgatcagaattttttaaagcagaatttgtcaaaagggtcatttttttgtctaccccttttacacttttcagattctcaaagtgtctcatctcaacttttaaaagaataaagaatatcttgctgggcatggtggtgtgcgcctgtgcgcctgtagtcccagctacaggctgagcctgtaggcaggaggctacaggcaggaggatcacttgagcccaggagttcaaggctgcagtgcgctatgatcacatttgtgaatagccacttcactccagccctggaacatagtgtgaccccttctcttaaaagtaaaaattaagaaaatctcaatctctttgctgtattccagtgattaatttgaacatagggaggtttttacagaagaaattttaccaaaaaatagagactgcaagagatgatacagattgtttaaaaagcagaattcactcaccactgagcaacacttagttggtagaatagaaaggagggatactaagttaagacttttcaaatggatcagtttggctgaatagatagatatactcatgtatgtagttgtgggagtttttagttttttgtttttttacttatgaaataagttttgacctagacacaaggggtatatgaaggaggaaaaaaatttctttgcaaaatctcccaaaacttgcttttttttcccttccacacaggcactattataattttcagtgccatgttaaattggattatttcatttactttaagttaggaattactgtgtaatttattaattcatgattctcataacattcagcataagtgtagcaaagttgctaataacggaaggggatcatagtggtgttgaatgtaactttgaagtagggaatggccttttaagtctgagagagaacatttgaatccttttcagggatttgtgtaggggtgtgtttgtgtgtgtgtgtgaatgtgtgtgtgtgtagataagtgtatatacataaatacactcttctaaagttgtatatacatatgcacattacatacattttaatttattgacaaaattaaccaaattaagatttggagatgtgggatgttcttgttttaaaatagcatgtttgaaaccatcagtttgtgtctaaaattagctgtagcacatggatgttgtccatattaagctatttgctgtttgaattatagaggtctacagtatttgtgttggcatagtttttgtaaaaaaaagattaaaaaatatcaggatggtggaaaaactagatctgtgtatctctgttttggcatgcatttattcagtatcttctagcaatggtttttctctgttgatctaccgtagtatcctatttttaagtttattttatttttaaggagtattgtcatcacttttcaaggtgtcttgacttctacacaaagtatatatattcaggactttaaaaaatagcagtacacatttaacagtagcgaattacaccaaaatgatttactttgagatttgaataatttgcatagcagtaaaatgtgttttgtgtaacatacaaatagaaaaatgacccagtatcttaattgatacttactggagagtatcagaattacccagcagctcttacagaatgccataaattctttaagactaaatattgaaatcaattatttgaagtaatgtttctgatttactgttaaaagttgctgagctcagtttttggagatatcatttatgcctgcctgttcccttatgacagtgaggccttctttggctccacctagtatgataatcatgggttctgttttagttgatgagaagtggctcctatgaatgcctctgctcaatttctttttattttactttattttatttttaggggtctcgccaactcctgggctcaagtgattctcctgcttccacctccccacagtgctgggattacaggcatgagccaccacgcctggctctctgttcttttcagtgtctccgtgccatcagtcagcagtgcttacatgtttagcatattgtcatgcagtttctcttctgttcccacgagatatttttggacaaaaaattgacaaaagtacatgtgtttttccccacctatcccttagaaaacctaatgtgtactgctatttttaaaaccaaaaagagacagcgtgacgatgcgtaaagcatttttcttagcctttcctttgtcttgatctgttaatgagaacaaaactgccagactcaaaatactctactattgtgctgaaagaaatacaatttagattgcacaaaatttgaaaatataactcagctgtcttttaaaagagttgtgttgttatctacaagactattagcagtcttttttcagagcaaattttaacagctagttgtgagtggtttaaaatatagaaaattattaaaatcttagtttgaggggttttatagtgggagaaaaaacaggaccaaagtttatgtgccttcttcagtagtcttaattgaccttttcttcctatttgagactaaagtagtatcagtattctggttttcaggaaatatgtactatatagttttaaaagaatgttgtcccaccaactattcatccaagcaaagaattgtaactataaataaagtctcagttacacttttgcctttatcacataatattcattgtagagcattgtgcaggtccaagaatagagctgctcaaaatctttgtggtagtttccttagtttttgtaacctgaggcatatgttccagagaacagggatatttgtctggtccagtgaccttggtgatcatagtcataattgaaagatgcctatggcatgcttaaatcagcattgtcaactgatttgttgttgtattattttcacttcttggatctatgtagtagttgtaataacaaatatttaaatagctatttttttgatgccattaaaaaaatcatactctggccttttttcccccttactgttgtttcccagatcttttaaaaattcatcccatatccagaaagtaccagttataaagattgctgaccaagcaaagttttgcatcaaagtgtcacctcattgctctgaccaaagactgactgttgtggttttaactcctctctgtaaagcattttgcattttccccaagctcctttctgaaagaagaaccagtgcagagcggcctttactttcaatttctactgctgaatagactacttagagaaaatgtgagtttcagtgtgaacagaatggattaggatgacgagtttgatgggcattttcagtactgtatctaagaaaaaaaaaatagcacagctaggagcctctgacattgtctggtgttttacgtggtctgttcatcaaaattccccttttcagtttttaagaatgttcgtctaacagaagaaaatgctgtaaatatttgtaacaacattttttttaacaaggccaaaaaagaaaaaaaggtttttgggaacaaatgaacttataaagtggttttatataaaacatcaattgtcttgtatattttggataagcagcagtaccagctttcatttgtaacagtctgtggcattggaaaaaaaggagtctgtgattgttgaagtgaattatgttataaatgcaaagagaagataaaatattaaaaaacatattttctaaatgcgtagtgcatggttaattcaagcttctgtacactacagtatattccattttcgttcagtttgtatatttgctgactattacttgatatctctaatctcttttcctaacaaatatagcattgtagcatgccttttaataaatgtcatgacatctgtactctcttaaaatttttctgtgttcttgtctgtactttgggtttccctttgtcttacctgtaattctaatgatgtcctattttcttttcttttccatagccatccatctaaacgtgtcatggttagtgaatagtgagcacatattcaaacaatgttcaaaatgggaaaaacacaaaatctattaactgtctctgtcttcatttaggaataattctcgttttgaggagcaaagtgctttcctaatcttcctatgatgcaccttctctggcactgccccgtaatgcaggggcatggcggcatgctttcttgcttgcacactcactctcctttttctttctctctttctccccatatgtgcagtgccaaactacagttggaacactatttccagttttgttcagtatttggcttccctacggcattagtatacatacactttgagacacaaggtgtgatctcaaaccaaatttgtgtcctctttaaaaaggtagcacagatactagctgatgctacattccttttccttagacaaacgttttacttctcagatctttaaagaattgttggattgcagaagtctagacttagcgttcattgtatattttagtctcctggaagtgggaatttattttgaatggaatagaaaattaggtaatcactactaatctttgctggcttacctgtaaaatctgtggtctccataaatactgggaaaataaataggtatttttacatgaggcatttttatcaggaaaagataaaataactgtatgactatattaggcttttataaactcgattgactgtgaaatgcttatttactcagcagaggggttataaccatcattaagtcatgtcagtgacccaagagaccacctagttcaatttccagttaacagcaaggaagcccaggtctctgtgacttggtccagtgcactctattgcacccaggtgttgcagtttcagacttccaagtgctgctaaggttatgatcttgaagatctgtacacagtattggagtgcttatgttttctcctaaaagccacatgatcatacctcactgcaacgtaaagacattgagtaagtggtgagaatgtttctgatgaagggtaaaaatgccttatctacttctgaaaaattttttaatgtcgtttcacattttaaatttcagaaaactaacaaaaaatgtagttactgtttgtatgagtttgctaggactgccataaaaaagtcccacagactaggtggcttagacaccagaaatgagtttctcacagttcatggaggctcgcaggccacgatcaaggtgtcagcagtgttgatttcttccaatgcctttccttggtttgtagatagctgtcttttccttgcgccttctacaagctcgctcttctgagtgtgtccatgtcctaatctcttcttataaggacatcagtcaaagatgagggcttactcatattatctcattttaccctaattccttaaagagtctgtctctgaatgtggttacattctgcgattctggggattaggacttcaacgtaggaatttgggaagggggacacaaaattcagccccatagcactgttttattcattcagttcaccgagtactgattgtaccagcacttgagctaggtgttgggaaaaatatagagttaagcacgtggtgacttaccttttagaaatgtgtaatgtagtagatatgtcagcctaaatccacaaattaaacacgttacttttgaactcctgccttcaataggaatccccaaaaatggatcatgaggcctctctgaggcacttctcagaatacatatggctataactatcctacagctagttgtgaatatgtaggaatatagaccctgccataatttgtcctttttactcttagagataaatagccatatcagagcaatgattatttctaagacaaatgccattacttaaaagaacaattgtagaaataagaggacatcgtcagacaagctgtgcccagtatttaatgtctaacatttgtgataaatgaactgggatgctgggttaggtatagttaggagtgatagacctatttgtagtcttactgtttctacatcaaagctttttttcctgttgtctatttcaacctataatgggaattcatcactttcctttgtgtgttttttatcaaaacagtttatgctgaagtgataaaactctagtaataattttgctggaattaccacattctggagccactgggttctgatgtagagtttccaactctactagtataaagaaaccagaaaagtaatgattctaatgttcctagcagattcataatgtctatttttttatttttctttctgtttttgttttgttttgagacagagtctcactgtgttgcccaggctgaagcagcctcaaactcctgggctcaagccttccttctgcctcaggctcccaagtaagtgggactacaggtatgtgcctggctaagttttttactttttacttttgtagaaactgggtctcactttgttccttaggctagtcttgaagtcttgggctcgagcgatcctcccttctcagattacagtaggaagcactgggattacaggggtgagccactgtgcccagccttctcaatttttttacccctatatttgttctaaggatatagacagggtaacaggaaaaactcaatatttcttttggaataaattgccctctaatcacttgataagcatctctatcattattctgtgcctaaaattagagaattatctgctcagtccttattcctgcagaatacaaatgtcacattctaacctgttaagagattgtcttcaaaataaaactgttattaactacattaatgttagacaaagtacactttagggcaaaaggcattattagggatagatttcataatgatagagttctatagtagaatatagtaatgcaactgaacaaaatgaagctcattccactgcatggaagaatctcacagatgtgatgctgaacaaaggaagccacgtacaaacactatataattttatgtacatcaagttcagaaacaggatagttacctttgggaaggaggtaactgaaagagtatgaggaggggtttctggtatctggttaatgtactttgtaccagttacccaggagtgtttcaaaaattattataattgagcaaggagctagcaaccaattcttttcttaagtcagcagattattctagccaataagtaaggccctcttataaagaacccaagataccatggactgagtttcaacatgaaactcttacatgtgcatatattgcattgtcctgaccacggcatatctacaggaaaaatatttcactgaccaaaaaaaaacaaacaaaaaaacatgttttcaagtaaattttacccttccgaacagttttacatccaactagattcagaaagatttaattaatgtgttttagttttggttttgccactgtaactgatctggtgagctgtttgacatctaacccctaatatatttcccttttattttttgagacagggtctcactgtgttggcaaggctgagtgcagtggggccatcaatagctcactgcagccaacctcccagactcaaagcagtcatcccatctcagcctcccaagtagctgggactataggcacccaccaccacacccagctaattttttattttttgtagagacgagttctcactatgttgctcaggctagtcttgaactcccggacacaagtgatcctcccccctcagcctcttgaaatgctgagataacaggagtatgccactgcatctggcctcctaatatattttatcaaaagaagccagaaagacctacctagatctctagcatcctaagagaagactttataaaagttaagattttttttttttgagacggagtcttgctccattgcccaggctggagtgcagtggcacaatcttggcttactacaacctctgcctccctggttcaagcaattctcctgcctcaccctcccaagtagcttggattacaggcatgagccaccacgcccagctaatttttgtattttttagtagaaacagggtttcaccatgttggccagggtggtcttgaactcctgacctcaagtgatccacctgccttggcctcccaaagtgctaggattacaggcatgagccaccacctggccaaaaattaagatttgtaatacacaagtattactatgatgaactcccatttacccagtacccaactgcaactagtggccaattttgtttaatctgttctttaccccactcctaggattacttttagtttttcatttttattttttgagacagagtctctcgttgcccaggctggagtgcagtggtgtggtcttggctcactgcagcctccacctcctgggttcaagcaattctgccgcagcgtcctgagtagctggcatgcaccaccacacctggctatcctaggatttcttttaaatcccagtcatcatataatttcatctgtaaacatttcagtatagaagtccatacattgcagttgataaaggcttttacaggttccctctccatccttttttttttgtaatttatttgttgaagaaacagctctttgaattttgccaattacatgtaaatcgagaagagctcattcagattctgttttctctcttctttctccctgcctccccttcccccctaccttttttttttttcgtaagaatacttcattgatagcgttggatacttccataatgtggcttttcttttgatggcagtatccattgatcattgcctagatccattaatttttagggactgcaagatggtaaagctataattctaattccttttgcttgtattagttggatttcttctatataagagaaacccccatatcagctatttcattactttgaggtacagcttctgtagaaaggcaaaataaatgcttgggttttttttg

SEQ ID NO: 291 - DNA, 2036 bp, Homo sapiens
tttttttatgtcaaaaatatgaaaagagttggttcctcacagcagcggggatctgatgagcttctttcttctggcatcattaacggaccttttaccatgaatagttctactccttctacagctaatgggaatgacagcaagaaatttaaacgagatagacctccctgttcgccttcccgtgttctccatcttcgaaaaattccatgtgatgtcaccgaagcagagatcatatcattaggtctaccatttggcaaagtaactaatcttttgatgttgaaaggaaaaagccaggctttcttagaaatggcttctgaggaagctgccgttactatggtgaattattacactcctattactcctcaccttcgaagccagcctgtttatattcagtattccaatcacagagaacttaagactgacaatctacctaatcaagctcgagcccaagctgcactgcaggctgtcagtgccgtccaatcaggaagcctggccctttctggaggtccttccaatgaaggcacagtcctacctgggcagagccctgtgcttcgaataattattgaaaacctcttttaccctgttaccctggaagttcttcatcagatattttctaaatttggcacagtcttgaagattatcacctttacaaagaataatcagtttcaagccttgcttcagtatgctgacccagtaaatgcacattatgccaaaatggctctggatggccagaatatctataatgcatgctgcactctgcgcattgacttctccaagctcaccagccttaatgtgaaatataataatgacaaaagcagagacttcactcgcttagaccttcctactggtgatggccagccatcccttgaaccccctatggctgctgcttttggtgcaccgggtataatttcttcaccatatgcaggggctgctggatttgccccagccattggatttcctcaagctacaggtctatcagttccagctgttcctggagctcttggtcctctcacaatcacctcttctgctgtcactggaaggatggccattcctggggctagtggtataccaggaaattctgttctactcgtcacaaatctcaatcctgatcttatcacaccacatgggctttttatcctatttggagtctatggtgatgtacatcgagtgaagattatgtttaataagaaagaaaatgccttggttcagatggcggatgcaaatcaagctcagctagcaatgaaccatctaagtggtcagagactttatgggaaagtgcttcgtgctacactgtccaaacatcaagcagtacagcttcctcgagagggacaagaagaccaaggtctgactaaggatttcagcaatagtcctttgcatcgctttaaaaagccgggctctaaaaacttccagaatatctttccaccatcagccactctgcatctttccaacattcccccttctgttacagtggatgatctgaagaaccttttcatagaagctggatgttcagtgaaggcttttaaattctttcagaaagatcgcaaaatggcgctcattcaattgggatctgtggaagaagcaattcaggccctcattgagcttcataaccatgaccttggagaaaatcaccacctcagagtttccttctcaaaatctacaatctgacttttctgtgaatttttctcctaaaactggaccataatttcagtaaaaccttcagacatagactgaagcagctcaagaccaattttgcctctttcacaaaaataactctgagtttgatattcaagtatattttaaaaatcaagggattttttttttttgtattccccctgcccccgccagtcaaaggtttcttttccctttttaccatggtttctacaaaaataaccttcaggaaaaagaaaatcaggaaaaaaattttttttcaataatcttattccctatattaaattagatttgaagaggattaacgttgttttagtttgggtccagatcagccttatacaacatttctaaactcatttgtacttttaaaa

SEQ ID NO: 292 - protein, 521 aa, Homo sapiens
MNSSTPSTANGNDSKKFKRDRPPCSPSRVLHLRKIPCDVTEAEIISLGLPFGKVTNLLMLKGKSQAFLEMASEEAAVTMVNYYTPITPHLRSQPVYIQYSNHRELKTDNLPNQARAQAALQAVSAVQSGSLALSGGPSNEGTVLPGQSPVLRIIIENLFYPVTLEVLHQIFSKFGTVLKIITFTKNNQFQALLQYADPVNAHYAKMALDGQNIYNACCTLRIDFSKLTSLNVKYNNDKSRDFTRLDLPTGDGQPSLEPPMAAAFGAPGIISSPYAGAAGFAPAIGFPQATGLSVPAVPGALGPLTITSSAVTGRMAIPGASGIPGNSVLLVTNLNPDLITPHGLFILFGVYGDVHRVKIMFNKKENALVQMADANQAQLAMNHLSGQRLYGKVLRATLSKHQAVQLPREGQEDQGLTKDFSNSPLHRFKKPGSKNFQNIFPPSATLHLSNIPPSVTVDDLKNLFIEAGCSVKAFKFFQKDRKMALIQLGSVEEAIQALIELHNHDLGENHHLRVSFSKSTI

SEQ ID NO: 293 - DNA, 37169 bp, Mus musculus
  misc_feature (1)...(37169): n = A,T,C or G
catttgctcagaactctgtaggcgaacattgcaaacgcagagtgaacttctattgcttactagatcacttggtagatgagtaaagttgacttgcttcgccttttccaaataaaagtgggtgacttaggaaactgtttgctaatactaataacaatgacagcctgcctctaacttccttccttcttctctctctctccttctcttctttctctcctaagatcggacctatgacctaatgcatcttgatgcaattgctctactattgaacagtattctcagagccttgtccctgcttgttttttgcttaggtttttgtaactttctgtttttcagttggagtttccctacattttcaaagctgccttgagcttgctctgtaacccagacagggcttggatttgcaatcctcctgctttgccttccatgtagattgaattcttaacctgtgccagtaaacatggcttacatttctgagcacaccgtatcttctagattaacaataaaagttcttcagacatgttagtctgcaaggtgggtctgatgacccccattttacaccagtaatcaagactcggaaaggttcagttcttttgtccaggtatttgatgaatgggggaattggcgttcaactctaatttagcatctccagacagaagttctgcgtgtgctgtccttctgtggagaaggaggggagacagatgtaggtgagaaaaaaaggaggggtgacagagcgaagggattaaggggatgaaagcctttcccagtgaatgcatttaccttaaaaacttggaggaaagggtgacggaaggaaaaccaaacaagcagaggtgacaagaggggtccagggaggaagagtttgccctgtggcttaatggaggatgccttcctgctgcctcccttgcatgcacctaagattttaggatacagatgtttgggagatgtgagtcttagagccactaaaaggaccccgacggctgagagatgaggagaaccatcaggcctaaactaactccttctgagagtcaaggtgcgtgtggctcacttgctcagtttccttcacttagtgtctctgagctccttttctgtgatgggctctgagctaggtgctgattagagatgagcaaaaccatcccctgtttacagtaaacataaagcctgctagaaaatacactgcagccttcaacatctggagatttaacgtatttgaaaccgttctttatcccccggaagtgagctctaggtcagtgttccagtctcagaggaactctgaggagctttttacaaatgtaactgccaaggctgtgtggccaaggatcccagattcatctggggagcagcctaggcactgggagtttagaagctccatgggtggggctctttagagaagtggatgcttacaagactgggcaaggagaatgcaagatgagacaggaacaactcgtggtaagcaatgaagtgcttaaaataggatgagggcctgaaagtagcagagcatcttgggttggattttggaatggaaacagttgttcgtgggagaactggcaaaatccaaatcaagtctgggattttgtgtgtgtgtgtgtgtgtgtgtgtgtgtgtgtggtcattgaaccacagcgtcccttagttttgataactgtgtcatttggaatgggtagatctagagttattattttaaagtctattgacaaggctgggtgtggtgatgcatgtatttaaacccagcactcagaagcagaggctggtggatctctgattttgaagccaggaaaggctacttagatcctgtctcaaaaaaaaaaaaaaaagcaaaaacaaaacaaaaaacaaccccaaatcaaagcaaattgacaagaggaaaaaaatggaaaggggggcggggaagtgccaagaaccaaacggacacaagaatcaacctgaaagagtttccataagccaacagtggaacaaccgaataacaaatgaagtaatagtagcattggggtttaactataacatgaaggcagtacctaggagtctattttatctacgtaaatcactggaaacatagccaacagtggaggactgcctcttccttacggaagaatcccagttcagtcaaaagagactcagattacagctgtagtgattgctgaaagagctacctaccaacacctgccaaaattaatgtatgacaggctgaaaggaatttacatactctcacatgtctctcccagcacatttattaactttaacaggtaaattggtagcttcacagatcaagattaacatctgataattacacatattgatactgtgtcctgtgcgtacaaggcaaactcgtataaacattttgcaatcggttgcttgggcttgtcctggtttggggcatgtagaaagatggaaatgagtgcctacagcaaaaatgcacagtagactttgcctgggagttttggtgtatctcatggaagagggccaagtggagcatattaggccttggggacatctttgttgcatcaaggtacacgtcctcacttagccggagaaactattcacggcctcagaccagactccactcactgtgtttggacttcatagggcaggcagtggttgaggacataacagcgtatggggagccaggggtcttactatgaggtcataggccaagagatgctgcagcctaactggatccagtggcttaccaatgttgtcctgaacatctccttcggggtgcagccacgtaactgagacctgtctccagctaacacgacaaaagggacaacctaagactgatctcccagccgccctcaggaaactaggatgggggaggggggcttcactggtctttgagaaattcgtgaaggatactgaaggaactgggcttggtacaccatcctgtcgctgtaatgggatgtaatggcaataaaacaaacaacccttaataacttcaccgaagcctggtgaaaacagacagacccaaattgagaccaaatctataaaacaaccaacccagttgctcctcagaaatgtcaaggtcataaaagacaaagacagagtgagaacggtctgggggacacttaactagatgtgacagctacatggggaatccggggctagttcctggaagaaagaaaagcaagcacagagggagaaaactgggagaactgattagagactgaccgtagccggtgaccctgcagttatatcttggtcttacttcacagtcatgctgtggctgtggatgcgtggaaggatggatgagggtctacagaggctccctctgctattatgcagctgctctcaaaggctgaaataatttccaaatgaactgtctgctgagttacaggagcacctcatgttgttagcatcactgtatcccttctggaggttggaggggccaatctgtttccttgccaccctgagcctctagcaagtcctttggttccttgctcctttggttccttgctcacagcccccatccatgatctacatgttagcctttgtaacattcaccctttgtaagcaatcacctattgaaaaacacttgggcccattccagttcaatttcaagcattcatatgcacatcttatatagcaaaatttccatttctctaagataaatgctcaagatcacaactgctaagtcagatagtaattgcatgcttagttttaaaagaaactgctaagccttttttttttttttttttcagaatcaatgtgccaatttacaattctaccagcagtgtatgagggctcgatcttctctgtccttgccaggatttcgttttaaaactttaactacacagctatgccatccagatagctgtgaggtgctatctcgtgttgatttgcatttcctctatagcaaatgatttaaacatctttaaacaaaattttacttacatgtatgggtgtttgggctacatgtgcccttggatcccctggagctggagttacagtggttgtgagctgctgtgtgggtgttgagaattgaacctgggttctctgggaaagcagtcagtgctcttaaccactgagccatcatgcctactctgatttaaatatcttttcatgcacttgtttgctatctgtatatttcctttggtaaaatgactcttcatgccttttcattttactgttcagctgtttgatttcctactgttaagttttgagtgttctttatgtattctaggcaggcatcctttgtgagataggttaagatccactttgcattcattattatataacatgtgaggtttacttcccctgcacataccaagctttcccactagtgcttgttttagaggctccctagtcctctactgaatctattgtgtctttgtcaaatcaaacttgaacatacttgagtggatttgtttctgagctctttattttctccttttgatctgtgtatctatatctttggttataccacacagttcaaccttttatatatatatatatatatatatatatatatatatatatatatatacacacacacacatatatatatataatgaggtcactatcactgtcttcagacacaccagaagagggcatcagatcccattacagatggttgtgagccaccatgtggttgctgggaattgaattcagaacctctggaagagcagccagtgctcttaccctctgagccatctttcctgtcccatatacagccttaattactgtcagtgttggaatgtgtggattggtcctttcactcttactctttaaaaaaaaaaaaaagagtacccatgtgaaggtctgagaacagttttgtggggttgatcttctctcacctttacataggttctagggatccaacagaggttaccatcttgtcatctctcaaactctttcagacttgttttagttggggctgtcgaaaagaaaggaatgcttaacattcacaaggttctgggttcaaatcccagccgcaacatatatataaagtacacacacagatgcacatacatatacacaaattcacacagcacatagatattcacatagacaaacacaggtacatacacagatatacacaccatacagtgacagatagacagatacagagatgcacacacacacatacatacatacaaatacatacacatgcatacatacatacatacacaagtacacatatacacaaaccacatagacacacaaatacacctacacacaaatatacacaccacaccaacacacaaatacacagatgcacacacatacatacaaatattcatacacacaaatacacccattacatagacacacacaaacagacatatgtacacaacacatatagacacatagacacacagatgcacagacagacacacacatacatagacatacacaccacacaaaacacatacataaacacatagagttttaattagtctagttccataatctttcctttctttttcttgtcctttttttttcttttaaagtaaagagacaggtctgtaacagcctggcttctttctagcttaatctttataccgactatagcctccctactgctgagattatagatgtgagtggccatgcttaactagttccatagcctggggatggcagagggctttgctgtgagtttgagatcaggccaagctacatataagttccaggccagccttgactccatagtgagaattggtctcaaaagaataaaatcacatcatttgaagagaaatgtatggaactgtaaatcattatgttgagtagactcagacaaatgccattttttctagtgtgcagaatctaggttggttcatctattcgttgtgagtaataagacatgaaggtgaagagtggctttttgtgaaggaaaatggaccactggaagcaaggagggagacaggaagagatggtgaggatggtcaagaatgtgctgtgcacaattgagagttttgtgaaggatgtccttttgtacaatgaacataaactaatgacaaaatcagaagcagaaaaaaagaaagcaaaaataaagaagttaggcctggaaggccaagaagtctccctgcgggtgttcccgggtctttttctcccaagtagagcgagtgcgttaaagatgaagtgaaggtccattgtcagagtcccatcgcaagacaccagccaggtgttctcaggagcatcccttctcccgcatattcacagggcttgatgcctgataacaaatagcaggtgccaatctagaggcagaaacagaaaagtcccaggtaaagaccctagctgctgatattctgaatgccatgtcattgagactaccactgtgacttgtagtggcaaaggagtcaagctctgagtactgaaagagcatgtgcaaaggagaggaatggttgcagaggtccagactgtacccaaagccgagtagtacatataaggctgagcttcgggctctctggaggccatatcagtgcaggtgcacctttgctggccattttttttgttctgtgccaactgtagtactaccgtgcacgtactctagacacactgccttcatcctgtgcctgggatgggctcgtgggcttgcagtctttccaaggtggagtctctgagctgttttgatacccttctttgctagattatctccatagtaaacctgagtcagagcttcccacttggctgcagatgccccattgaccttagtggtcactaattaatgtgtcctggtgcccaagcatggcaaagagatgtgatgagaaactggtgagagcctgagtgaattttccatgaagaagtgggaggctcaggtttatgcggttgcataagataacctattccaagggctgagtcgaggcctgaatccaggtcaatttggcatcaagattatcatctagactctataaggaactcattagcaagtcagcaaataaactgattgaaaatggacagtagaattaactagacagttcttaaacctacatgataccgatgacctagaagtacgtgaagcaatatgcaacatcattaagcatcccagagaggcaaaataaaagtaaaataagatatcacctcaccccaaactggggatgtagctcagtagaacacttccctaggatgtgtaaactcgtgggattttatccccaggaccataataaaagtgattttcaataaaaacttaaaaataacaagccaaaagctggggtacactattactgagaatgtaagctattataatccttatggaaagcagtgtggaggttccttaaaatgctcaaagtgaagccatcctaagactgagctatcccactactgggtatacattacatccaaaggaaaatttaaaaactgtgctgagacatctgctgcactgtttatagaagccacgatgtgacctaaatgcccatcaactaagatgtagaggaattttacttcagcaacatggctgctctggcaaggaatcatatccaaagatatgatctgtccagaatgcaaacacaccctgggttataatatgatctggctggaatacagacacaccctgagtacacacctttaattccaaacaatggagataaggttagtttgtagaagaaagcagccatgcttgaaagtgatctatcgaggtgattatcaaagagttgatgtagtgtatgtttagaatggaatgataattgaggggcagacaaagtgtggagtcagagaaagatttgacagaatgaatccgagatagaatacgcccaacttacatgagaaccgcagaggaagagaggctacgtaagaacagtaagagagagagaaaaaaaggagggttgatgggtagtagttgatgggtagtgtgtgtgtgtgtgcgtgtgcgtgtatgggtgtgtgtgtgtgtgtgtgtgtgtgtgtgtggcaattttactgggacagttttacagaaacaggctacagagagaacaagctagacacaggtgaagacagagaatgagaaggagtcagaagattaggacatattgtcaaagttaatatgaggccaggcagaacaattctgccagaagccaagagaagctggattgaatcagtcagcttgaaaaattagattgaaggaggctagaagctttcaggtctaggcatagtgatagaacagagaaggaaatgctctgggatcagctgggcagagctcagctgaaaataaaatcgacatttacactgatacatggataaaaatacctatacacaatggcatactgtttggccataaaaggctgacggagatgatcaggaagatattacgttaagtgaaataaacaaggcacagaaagacaaacagcacacagtctcattcataggtggactatcagagagttgatctagtgtatctttagaataacaatggcagctagaggctggagagagtagtggttacagagagcacctggtgtctgtgacataaggaactagtccttcacagtccggagggtgtaacatcacccacactgcaccctctccaggccatcctatgaccagtactagtcatacataggagagagagagagagagagagagagagagagagagagagagagagagaggtgattatcatggtggagttgcaaatagacatccagtttcactcctttggaaacagctccacatctggctggcttccagtctttcagtttctcatcaatgttcttccagccatatttctttgtttactaacaaaggacctgtcccacatgttaaaagacccccataagctctgtggtaagatgaaagtcccgagactcccatgttctggcctggcgagcttgtttccagatttttctgtgctgccctttcatctccatacagacaagagacaaacctcaaacaggagatcggtcagcagttattaagttacagttagataacagagcttattctcctgtcctgttacatagtagagtaatttgagaggaaaaaatgttttccaaaaggcccacaagataggatatttgaaagcctttaatcaaaaagaaataaatgataagtgtttgaaataggcttgcttttttatttgaaataacacattgtattcatgtggcaaaacaccacatagttacccacaaatataatgggtacattttttatacgttcattaaaataaatagggccagtgagatggctcactgaataaaggtactattgtgaaagcctgctgacccatatttgaacctgattcccattggtggaataaaccctaaagttgtactctgatgtctatatatacaccatggaatatgcatccacactcatatacatacttatcacacatacacactaataataaataaattacgtaaaaaaaaaaccctatcatgctggacagtggtggtacatgcctttaatcccagcactctggaggcagagcaggtagatctctgagtttgagaccaacctgatctacagagtgagttatagggtagttaagagaaaccctgtcttgaaaataaaagtgctcttgaacaaataacatgcctctgtttgtttgtttgtttgtttgtttgtttaatgagggaaataatggttcttttactcattgaggtcatgaaaagctgggcatagtggcaaacaccttcaatcccagcactcaggaggcagagacacgtggctctctgagtttgaggccaggctggtctacggagtgagttttaggacaacaagatctacacaaagagaccctgtttcaaacaaacaaacagaagaagaggaggaagaggaggaggaagaggaggaggaagaggaagagaacgaaatgaagtgggataatcctgtaacaatctggcaatggcctatatagagtataagcaatatccactaaagcttagctattattattactacaaatatgtcctgttgtcacaaaggcacaagtgtgataaaattacagtcactgttgatgaacctgtaagacttttcatctaaagctatgttagctctcgctgtcgctcagaggtcagcttctctacttaatttcgtcccagatgcagtgtccgttttacctgcccctcagaacctctctgtacagtcaaccaacatgaagcatctcttgatgtggaacccagtgacccagccgggggagacggtgctctattgtgtggagtatcaggggtgagtctggtttgttttttgcttaatagtttttcttcctcagatagcacttctgagaaagacagtccctccttctctactccaggaggttttgaggctcaagaatagatgttttacccagtccaccccttagtgttaatgggtttgagagacccaaatacatttaggtgcacctgttttcaacagtaagaaaattgatgagtttggtcctcagctgggacagacaaatccagagagctaggcccttggaggtgtaggaggccatagtttccttgacatatttggataaaaagtctaaataagtcttgaccctaaagttcagctgacccaggggtgggtgaacttggatctagtttttttcccagatgtccaggctctagcagttgctgagaagtgactgacagagttagtgctcaacatattgcattagcaatggtaagacccaaggttaacctgtaaactcacctctccaatgaccaggtaacttcctagatgttaggagctacaattcttggaaaataacaaggccacatgggaaaacatggtggccatatgggtttgtccttaaaagcctctgcaacatgcgtcttgaggccactcagtggggaattccagggagttgtcttgaccaaagtccaccctggtcaagtgtttaattaaagcttgcttcaaatttggctcagaattgggaaactggtttttctcttggggaatcccagtattaacacaacaagcacaaacagagccctacatgtgtagagacatgcttctagggtcagggatacaaagatgcaatttatagatacagggaaactagtgtctagaggaagagagaactaaataccctgggtgtgccctcgtcagtgttgcagccactagctcctagtacctatttaggtttaacctaaattgaaacatgttgctgagtccccttctccctttttcatatgctctatagccacaagtggccagtgacaaacacccccccccccactcccaacaacattgactcaaaaacatttcagtcatcacaaagagttctattgggcagcagagttgggagccaaatgcagagatttgagtcctgataggaagctgtgaaggctgatgcaaaggagttgagtgtgcagctcctttgtcttaggtggtggcctctgtaggaggtgataccctagctgtgagatagcagaggcagaactcttgaggcagtgaacatctcggttgaggccgtaggcaaagacatcaccagcattttgaaggagtgagcagcaggtcagtagggcaggagaagcagcatccctagagggcaggatgggagaaggccagtgtctcacaggaagtcatcagggagagaaacgtcacagtctgccgagtgtgcagtgtttgcggatggaatctcctcggcagaatatggagcatgggaagccacagtgtggcaaggcatggtggcagctgagatgggaatggtgacagtggatgtagagagacagggacagatagagactaatgctaaggtttctgaggagtaaaggagaatggtggtcagggtgggaagggagtagagaatctggggctggggagagaatgcatgttctactgacgcacgaaagcataatgacagcaattttgaccatcttctggtctgcctcaaagggtgtgctgtgactctgccttctcctccttgccagggagtacgagagcctgtacatgagccacatctggatccccagcagtcaatgctcaccgaccaaaagtctggagtgtgatgtcaccgatgacataaccgccacagtgccatataacttcagggtcaaggccatgctgggctcacagacttcagcctggagcaacctggagcacccctttaaccgaaatgcaagtaaggcacaaatcctcctgccctcataggaactaccttcagcgtcaaaataactggtgtacttataaacacaaaatcttactgacatatttttaaattgctgactgtctcacttactgtctctctccttcctcacgttgggagtcagtcctgattgtcctgttagggtccacgggtatggacattccagcatgggcactgggattcttattctaatcgtgcctctgtagatctttcccatctgaagccttgttaaccccatactgctgagagcagcttcgttgtttaaaaacatctgtacatttaacagctactagaaacatttcctttctgtggtcactggcaaataacttttctattgtaactataactggaaagtgattgaaagggaagaagagagtccaggtaagtggccaagggcaagccatggctatcgtgtaaaaagacctgtgtgtttgggatgcgatgagggctggatgggcaatgtggcagatgaagcagctggccctatggtaaagtttgttcaagtcaggagatgggagcaatggaaggagacagggtctgagccatgtctttcttacagaacaaatactatggccactgagaggaaagtgacctggagtagggtaagagcagaggaagaacaagaggggacctgatagctttcagctaagccaagacggtttctggtctctagagtatcagagaaggtacgagggcatggaggaattcaggagacatggctgcatttaaaatggacagagcttggggatcggctaatgagggatgggttggggagacataatctagcttcttacctgggttgtgagagtcctatctaaagcagagaacccgaaaggagcaacagatctcgagggacaggagaccctctcctctcctctctctatattatttggagctgagttcctgtgacatgccatgctgtggatgtctgactggcagctggaaatcaggccctggggttcttggagatgaaaggcaaacacacaacacaaagttacattagctctaggcctggagatgatgtgaatatccaggggcaatgtggggaggagaaaagaacgcaggacaggctcccagaacctcggggtttaaaatgcagacagagggaggatttgagtaggtggctgggtaggtaggaggggcagagagcttctgataagcttaaggaggcccttgggtggcgcttgagaaagtgacttggctgcaaccaccacacacagtggactgtgtggaaacagaaagaggcagctccttgtgtgaggtgggagtgggtgggatggtaggaggtggtgctggggaaggtagggcctccagtggcccattttcttccagtggcaggcgatctgcttggagtgagggctcaggaacattaagtcccagtctccagtaatggagtacgtcaagccactgaggacagaggatgctgagtggaagtcaggagggtttggatgctgaggcatcccaaactggccctgaggaattatgagggttggttcaaatccagcttggaatttgatagctgtgtgagtccaatattttgcctcacgggatagctgaggggaagcacatgaattgttgttaatattattactgttgccctggggatgccggagctgagagccagtgagtagatgaggagcattgggttgttggagtgggagccagggaggctttgttgccttatgtggacttctctgctgagcatcttttccgggcactgggaagacttggctgaaatggtgggagcccagtgtaggcacctggaggctcatggacactggaggacactgcagctcttcctccgcccacagagttcaggcagcgcccagccctgcttcctctggcacctgggagctcgagactccagccaagaactcctctggggtctggcagctattgctggaaggaaggccagccaggacagatggagatcagggagtgccggcagttatttgggaggggctgggcagtgaaatctgtgctcaagaggccagcataaacaggaaaaggtcttgctgcaggggcatctgagggataggagtttgcatgtgctgaacagaacagaatctcaagagcaacctagctgagttggtactagctctctctctctctctcttctgtctctctgtctccctgtctctctctctcctcctcctcctcctttttctcttctttcttctttttcttctttgatacagggtcttactatatactctggatgtcccgaaactcannnnnnnnnnnnnnnnnnnnnnnnnnnnnnnnnnnnnnnnnnnnnnnnnnnnnnnnnnnnnnnnnnnnnnnnnnnnnnnnnnnnnnnnnnnnnnnnnnnctttggctgtcctggaactcactctctagaccagactggtcttgaacttccagagatctgcctgcctctgcttcccaggtgctgggattaaaggtgtgcaccaccaccacctggctagcactgaatctcctaagggcattccattcgccttttccatttgagagggtcaccctgacttctctgacacatgaaaatccacaggaataacatttaccttctgtgggtagaacaattgagccaagtatactgattgtgtagaccagaggtttctgcccaagtgctaccagaaaggaaggaagaaaggaaggaaggaaggaaggaagaaggaaactctctagactgtaaaagatggcatttaatggcccaaattctgactgtatgtggagtgggcattctctttttgcaggtattacaggggcagtggtgctgtgtctgaactagctacatttgcacaggtggcctgacttcccaagtcctcttgtcccttcaaggggcagctcaccaaacccagggatattttctccaatgaggatggcaagggaaaaccactttgctctctgagtgcttcctctaggaactgcctttcttctctatgttccttggcctcagtgcagagggatttagcccatgacacctcccttcttacttcctaagccaatgccaatcatcgcacaggcccttctggtcctgcagtgtctagattgatatcgaagaaggggaggcagcctgtatgtacccttctgttttggccccttggtggcaaggtatccccagaggctggcagcctctctgttagggaacttgcaaaatgcgaaagatggtgtttgtgcttgggctgtgatttctagaagtgattgtcagagtttctaagaaacttctgacttgctgacagtttttatgtaagattaagaatccttgggccaagaacagaaggacaaagccacccaagctactggtgtctgcaagacaccaggtatcatatgtgtcagggctctgtgtgagcgctagggatgcacagggttgactctatcaggtatgttcatccctaaggggcaaaggcaatgccagctgtgctcagctagcattaaggtgttggggattggttctaatgttttgagttaattggaaatctacctgtccaaatgataaaggtcctggtccccagttggtttttgatcgataagtgaaattgccagcaaccaatggctgggcaaagggagatggggcagggcctttagatttgagcaggctaggaactgggaaaacggagacagagaattgccatgacttgggggagaaggatgggacataggagctccaggagagaaagccatccagccatgtgaaaattcaagtgggtggccaccggccacgttttcgattaggaatgccgtagtaggtgaaggtttaggagttcctagcctttgaggtagccaaggcattttaaaattaactggcctgtgtatgtgtgccttccattcgtgagaactggtacacacatgcagaccacagcgagggcggagctaaactcagcgctacattagggaaaagtatccgctcatttagtgtcaaggtgaagaacaatgaaacagggtggtggagagaggaggcagagctcattctttgaaagggaaagaaagcaataatgtttattcgagttctgagaaccaccaaggtagctcagcaagcaaaggcacttgctggcaagcaggacaacctgagcttaattcccagaacccacctggtagaagaagagaactggcctctgtgtttcacatgcaagcacgcgcgcgcacacacacacacacacacacacacacacacacacacacacacactcaccaaatatattttttgaaaacaaaatttaatataaataaaatttaaaaagaatcttatgagcatccgtggagtgcagaagagtgcttatatacattattccacacactaggacccctcggcagaccatcccgccccctcgcccacccatctggccgctgtgtctccactgatggcatggtcattttatcccaaggaaaccggttctccctggagctgactttgattctttctttctcttgccaacagctgtcctcaccccacccaggatggaggtcactgaacatgggctgcatctggttattgagctggaagacctgggaccccagtttgagttccttgtggtctactggaggagggagcctggcgccgcggtgaggcttcccgcagaccctggcctttgagtcacgccttagagaaggcgcacagctttctggggggagagggagtgtgtctagctttgcagtgctcatggcataagtggcttgaccagggtgaagtttaagaaaggagagatgagagaaccaaccatccatccctacactccttcctcaaaggaacctttgttcatcctaggcctcggccagggtatctgggcccttttcaggccaggtctattgaagtttgggagactgattcccttgctttaatgcccccccccgaacccctagtgcttttttgatgcatttgagttttcttttcttcctcaccacctagtctcagacatatagggccaacagggcaggatgttccagcccagggtgttccggatgatttcaaaagcagaaggtgggcatgaacctctcgagggtgtgtgtcttggcagagtgtggaagtggggcacggagccaggagctagcttatgaataagactatctaattatgatccaatgggccgtgcagaaagcttggaagggagctgcccttccccatgggaaggccgctgtagtctgaggtgagtgggaggccagccctcatggaagagtggtcagacaaacagcagaggcaacacggtataaaaccctctagcagacccaggggacgccatgccctatggaaccctgtttaagcggatataatggcagagcctggtggcccacctcagtgggcacaaggaaagctaattttctcagaaggatcaacatgggcaacagaggtgtctcaccaaatctgtgagcagaaccagcaaagggccaggcagaagtacagtcttcactacacagggactctggcctgtgggagccttggttcttcttcttgaaggtcttactgtggcctctccccttcactcccaggtcctatccatgcctgtgactgtgcctccctgactcctcaaagcatctcagactgaccctcctcacccactcctctccctttgtcctcctgtccagcttgaggtatttggttccccaagaccaaatccttcagggatgaacctcattgcttgtgccttaccggtcggtctaagctgcgtggggtttggacagccagtggagctccgtgggaccccttctcagcctgggctgttcagtgtcacatagcaatatctgggggctctgcaccctcattggagtgggacagtgatcttggaagatagctgtgggcaggtgggacaagttattggccaatatttaccctgctgggtcagggcacactagtagcacgttgcattgccagccaggcagatggaaccgagtgggagaaatgctacttggcaggagagagcacgcatcaacctcatagtctttgggggtggagcctttccccctcccttgtaactgggaggctcattgctgagagagtgtatgccctgagtcatctgggctgggtcacacaagcttctacaggctcctctacaggcctgggggttagagtgggtgttgagggttgggcagacaggtggatggactctgctcaaaccttgtcctgttggagaggctgtttcttatctccctttaacccttgtgcctcctagccactctctttgccttgccccaatttggcttcgtaactctaatcacgacaggaatgtgtttatgtaatatttctctcccgcatgcaaggtctctgagagcaggggcttatgtgtttcattcggtgctgcatcccgaattatattactacatttttatatcagtatattagtacaggcctaatagctatgagtgcgtggatgaagaaatgaatgccttcatgaatgcgtgagatgtgttctctgttctggaatgttctggaaaggactacctgcactttttcctgcccagctctccccaccatcttcagctctgctgcctttaggtactaactgcgtcttaatctttttttaaaaggaacatgttaagatggtgaggagtggggacattccggtgcacctagaaaccatggaaccgggggccatgtactgtgtgaaggcgcaggcactggtgaaagccatcgggaggcacagtgccttcagccagcctacgtgtgtggagatgcaaggtaaggataacctgcttgtccctgggtccctgcacttggcagccttaccactgcatgcctggatgcccgtcgggtgcctggttctgagtctttccctggctttacctccaggcttgcttccaggcttggtgggttctaaggtaaactccgactcccccatgggtggaagcccaccatggggactggataggatttcttgagcagttgactggaactgcccccaaagttacctcctcgtggggcacattgttacaagactaccttgccaggtcttggaaggagggggagacaccacactgtataatacaattacagccgcttttgtctagaagggatcgtagagtctatagagccctctttttgacttttttcacttgaatttaaacaatttaaaaattgtgtttgtgttgtgtatatacatgtgtgtaggtatgcgtgtgtgcacatatatatgcatgtgtatgtatgtccacacatgcacatgtgggtgtgaaggacagaggctgtattgggcatctgttctcttcctctttttctattttatgaggcagcctctctcactgaccccagatctaactgactggctatgctgtctggccaacaagctccagtgactcccccgcacccatgttatagatgtacacagcctttcctggcttttatatggatgtcatagatccaaccttggctcctaatgctggcatgccgggcactttactgactggagcacctccctagaccctctgtctacctctctcgctcaccatctaaaaaaacctacagcaattaaaaactctttgaagagaaacaaaatcttacattccgtgagcccaccgtgcaaacaccactagttacatttttcttgtaagctttaaaaaattattgttttgaatatataagtctcttcacatggcccatggcacacagtatacatgtaaattaccttttctatgtctcttctccatttacacagttcctgcattctttcccttcagtatgaatttcttatgtagtcttctgaagacatttgaatccatatacatgtaaatggggacatgtatatgtaagtatgtacatatatattatattatacatatgcacacatacatacacacacacatataatcttttaagcacgactgatggcatatgtactgttctgaatcttgcttttatgtatcttgtagatgtttgtgagtgaataaggaaattccatcatcctttttcattaccaaattctattccatttgtatatgtgtatatgtatccttctgtgtgtgtgcatgtgtgtgtgtgtgtatgtgtgtatgcatgcttgtgtgtgtaggctaaattaactgatctgctattgatagagttagattccccccaccaaaatttccttgtgcagaatcacttttgctgatacattatacatatatatgtatgtatgcatgtattatgtatgtaagtaagtatgtatgtatgtatgtaagtatgtatgtatgtaagtactgtgtatgtatgtaagtatgtatgtatatatgtatgtaagtatgtattatgtaagtaagtatgtatgtatgtatgtaagtatgtgtgcatgtaagtatgtatgtatgtatgtaagtatgtatgtaagtatgtatgtatatatgtatgtaaataagtatgtatatatgtatgtatgtaagtatgtatgtatgtaagtatgtatgtatgtatgtaagtatgcatgtttgaatgataaattcctggaagtaaagtagctgggtcaaaagacatgcatttaactttgacactgttgtaaatgccctcctctaaggaattgtgacccttcagtgatcccccatttaaagacatgctgtagcacaatatgacatacgtgttatatctggtttataacatacatgttgtatctggtttgtttttcgcaaatacattcataacattttccataaacattttctgagtaacatttcttggtacttaaaaaattatttgtcaagcttatgaaaaatccaaacaatacagaactataatgagtaggtgttcctctatctttcctcatgctgctcaagagactagctgttacaatttggatatagagtgtctccccatagactcatgtgtttgaacacagtgcctggctcacagaaccatttgggaagttgtaaaaccactgggaggtagggcctagctggagaaagtggttctccgggaggtggaccttgaggtttagagctcaatcccacttcctgtcctgtttccggagccatggggatgtaaacacacagcttcctgttcctgcagccatgaccataccttccctgccaggatggaatgcatcctcagagtgagagtcaaaataaactctccctccctttccttgcttctagttaggcatttgatcacaacactaagaaaagtcacaagtacatttttacaggcaaatccttcattcttcttccccttctttccctcnnnnnnnnnnnnnnnnnnnnnnnnnnnnnnnnnnnnnnnnnnnnnnnnnnnnnnnnnnnnnnnnnnnnnnnnnnnnnnnnnnnnnnnnnnnnnnnnnnnnnnnnnnnnnnnnnnnnnnnnnnnnnnnnnnnnnnnnnnnnnnnnnnnnnnnnnnnnnnnnnnnnnnnnnnnnnnnnnnnnnnnnnnnnnnnnnnnnnnnnnnnnnnnnnnnnnnnnnnnnnnnnnnnnnnnnnnnnnnnnnnnnnnnnnnnnnnnnnnnnnnnnnnnnnnnnnnnnnnnnnnnnnnnnnnnnnnnnnnnnnnnnnnnnnnnnnnnnnnnnnnnnnnnnnnnnnnnnnnnnnnnnnnnnnnnnnnnnnnnnnnnnnnnnnnnnnnnnnnnnnnnnnnnnnnnnnnnnnnnnnnnnnnnnnnnnnnnnnnnnnnnnnnnnnnnnnnnnnnnnnnnnnnnnnnnnnnnnnnnnnnnnnnnnnnnnnnnnnnnnnnnnnnnnnnnnnnnnnnnnnnnnnnnnnnnnnnnnnnnnnnnnnnnnnnnnnnnnnnnnnnnnnnnnnnnnnnnnnnnnnnnnnnnnnnnnnnnnnnnnnnnnnntttcttctttttcttctttgatacagggtcttactatatactctggatgtcccgaaactcactatgtaaatcaggctggcctagaactcaagagatacatctgtttctttctccaaatgctgggattaaaggtttatgccaccatgcttggcttaccttcctttctaaagacacacggtatgccaatatgtgcaagtatatctttattgttagcgataccatttactctccaaatattttccattatcagtcaaattgtaatctgtctatcctgtttcttcttttaagagccgaattgctaacctaccatgccaatgttctgtaatatcttccatcagcctgttttgtttggcatttaaatcattcccattggctctggaagatgaagtccttccttttattttgatatttgcagagcactgagtacatgtcaaatcttggcctgtccactggggcagagaagggagtccctgccttccagttatggaagcaaacagcaaattaataacatgtgaggtgtgtgtgtgtgtgtatgtgtgtgtgtgtgtgtgtgtgtgtgtgtgtgtgtgtgtgtgtgtggagaggcacagcacacagggatgcatgaatggcaggacacaacctggcaggaaggagactggctgcggctcttgtctggacattcctgtgcactgactgatgtacatacctatttccttccttggaataactttctgggaatggacatcacaggagggcattggaagcgtatgaacattgtacggtttttgatgtctactgccaaagtattttccaaaattgaaacaatacataagccccaccctacacgccacagcttcatgagctgagtcacattgtgggtgaaaggcccaggcaggaggtgataaacaggttgtttgaggttagatagaacagagaggtgggaaaccagctcttcttctcttctgcatctccagatgctcagacctggtgctttttgctgtatttgttagcaaactcatcacaggcttcggagctagaccttcctgtgtatcctgtcctaggccattagtccatcttgagcataaataacatcctcttccatgaaagaggccctcaccgtgtggaacagaggcctgaaccttagcagagtcctgagggagtggaagtcgacctagcacacgtaataggcccttgatctgtcagttattatgtgactgtctaggggacttaatattttcctccatcatcggagtcaatgccaagagcaaattgtgaaacactttgtttttggcttccaccgagccctgttctgggctgttctgctccagcacctcctcttcatcctgcctgggacctggcagcctgccttcctctggtagcagtgccaggcacatgctcccatgaacaaagccttacattccccgtccccttcccgagacggagatggtaatcgtctctctgaaaaacagcactcgaattgaacttctagaagaatggtggtagttgtagccattggaggacacaccaagtcgcagggtgtgtcacctgccagcttgacctgagtgcagctctaagaaactctcggaggtgggtgcgggactggggctccccttccctgcagttcccaagccttctcttatgatttgtccataggagagtctcttccgctggcactagctctgtttgcgtttgttggcttcatgctgattctcgtggttgtactactctccgtctggaagatgggccagctgctccggtattcttgctgccccgccgttgtcctcccagacaccttggtaagaacattcctgtacctgtcagtgtgatgctggccagatgcatcatgggccttagtggggcatagacatgtttttcatggtttatgaagatatgcagagactggagcaagcatcattgggacttcacttgtcttagtctgtgatgctgtaataaaataccacagactaggtcatctatagagaatagaagttcagtggcttctggaggctggggatggtgatggtggaatgaagacagaaggggcttatgggtaaaggtcttcttgctcttacaacatggctaaatgtgatagaacaaaatttcacactggtagccttaaggccttatagtttacatttatgtagttgagcctttacattacctcccacagttcctaccccagccccattgcgctgggcttttgtttccaacatgtggtttttgaggaaacgctcaggtcgcaatagctcctgatcagaaggtctgggtgagttctcccttttccagagtatagtaagcatcccgaggctctggcaggccattttgctgttcccccaccctccagatctagcaataccaaaagggtggctggctgtgttgttcagcccagggtgcctacggtttcaagagtcacgcatgcaaagagtctcacgattctcaggtttgaagatcgtgtggcatgaactgtgctttgccttggacaggcatggagcaggccagggcgacagtctggaccttcacagtgactgctcaaagagctgtccttccagggacccacaagcccaggatgctcatggagcatgtctctgagcctctgggtaggtgtaggcaggccctgtgtgcctgcaccctggccggggaagagtaaaggctggcctcagccgctcacacatgttccaccggtggctcttcagaggcctcctagatctcaaccacaccaagcagtataatcaaagaaagaaagaacaaacaggaagcactgcgtgcgcgcgcacacacacatacacacacacacccacacacccatccctgtcacctgaaaggtgtcacagtgctgtcttgtgggcagtcagttgctccagtgcatcagaaccagctgtggctgtcgtccacacactgtcggggctccttaacagcctgcagtttctatgaagctgctcttgtgtggcttgcttttaggtctctacaagagacctgacaagaggaataactccccctttaaccaggtcttcaggttgccctccacccttctctcataatgccagctctcctgtctcggtcatttccaagtagtcataacagtgttagcaggcagtagcagtagcagagccgagcaccagggctcttgtgaggacgctcatgggttgattcagatcactgagtttgccccgacttctgtctgctacttgattgcgagaacacggtaacgaatctatctatgagtgtagctacctctgtttcttcctgttcgtcaactttccatgcatttttgcttttttatttttcgagatagggtctcactatgtagctctggctgtcctggaactcactttgtagaccaggctggcctcgaactcagaaatctgcctgcctctgcctcccaagtgctgagattaatggcgtgtgccaccacactcagaaaattttcatgcatttgagtgtgtacacatttctgattgctggatcttcttaactaaacctttcagcattatgatgggtttctttttatttttgataatattcaattctttttgtttgttgcttatatggtatatcctttataaacttctgtgttcaagtttaaagtgccttttgtagacaggcccctaatgtgaagatcagagttagggtccccagaacctatataaatgctgaacgagggatcaaggaaaacttagaatgccatctagggcctgaacataagagcacatgtatccacctacacatgtgaaaacacagaaacacacacaagcacacatgcacacatgaacacatacatgcgcatacacatgacacacacacgtgcacacatgcatatacacatatgcacacattcatgaaagtgcacacatgtgcttgaaaaggaagttaaatagtagggatttatacaatagtctttgttgctaccaccactcaagcaatgtctaatgaataatttttatgaaaatgattttttagaaaataaccagttcgtctcagaagctgatcagctgcaggaaggaggaggtggacgcctgtgctgtggctgtgctgtcctcggagcatctctttggggtctggatctcacagacttgagaaggacctgatggattaacagcctggtctgcaggacccagaaccctggatggggtgggttgtgtttctgttttcctctgtggacaaaagacaaagagcagtaacaggagcctactgtgtgcgcgtctagcagtgaccgtcagaggcagagtggcgtgaccatccaagagtgacagaaatagtctagagaggtgatccccagacacacagttaccatacactcactgaataacagtggagaaaatggcttcatacctcggaccccgctttgtcacctgtagtggggattaaatggtttctcccctcatctctgtgtgtatacaaactcgcacttgcaggttggcaaggagactggtggcactgtgcacaacggtgagttcagatcatgcggactgtggggcatacgcgtgtgctaagaatgatcagagtactcagccgggtgcgaaatctcagcacttcggaggagcgggagagaaagtcacagcctagacgacgcggtgaaaccccgtctgaagtaaacaaccgaacaaccaagagtaataaacctccttttgtcaaatcaaactcagaccactgttggtttggacttccctctttacaagaggaaacccgaggagggacggaagaatgggagggctgtttcacttcaagccaaatcctgtcagcacgctctgctgagggtgacatcgagagaggccgtagcccgtcctggtgacatcgagagaggccgtagcccgtccatgatgggacatgcgcggatgctgctgtgggttcatgaaatgtcatcagatcctaggaccttgtccacagtaaatcacaccagctctcttcctaaggacaattcactcagggtttctcaatcgctctcaggtactcatcaggaacccctgactagaggcataaccatcactacctccaggcagcgagggaggggtggaggacagcttcagtcagaggaggatgaaaggaggtggcttcatctctctctgcagagtcaggctcaccaccacctccccctctggaacctggagctggcttgtctctgccccaacttcctgggcttcaccagccagacaagggtagagacagtgtaacggtttcaaccaggtgcttccagtccgtcttcagcacagatgccaacggcctcatctctactttggggactccaggagagatatgtaggggtgtgggcagatatgtaggggtgtgggctgaggctccctgcctttgtcctgttctgtatatttctgccttgactcttttgtgaagcgtgtgttaaatgttatatttcaactggtctggaaatgtgctgtttacagaattaaaaattgcatacttacattaaccttcatcttttctcccctctcttctctgctccctcaccccagggacttcattcctctgttacctaagctcagaataaagaaataccccgagccttcctctgttacagtttctcatgggatgctccctggttttgctggcctctgtagctacataaagacctctctcaattattctgttgtctcttaaggttcccaacatgtggatattggaccccacccgaacatcagaaacagagcctgctcctgatggggggatagctacctcctcagagctggtttactctcttagaaccctctttcctctctctgtctgtgtaacagttctaattgtcagcttgatgctatctagaatcaggcaggaagattctgagtgagggactgtctagatcgggttggcctgagctcaggtctgtgggggattgtcttgattatgttaattgatgtggcccttgcttcccacagacccagattctctacttgtgccttcatagaacacttagcatcatcccaaaacaaagtcccgcttcatggagcttggatttcaatgaacaatagggagatgattaaacaatacgatattactagtaagcgaattattagtataccgagagtttataataagccttaagaaaaagtgaaaagatagagaataaaattggcccagggcaggtcacagccctctaaagatgaaaatgaacaccaacaccggaacccacacttctgtccccatggagcccctggtgtgagagattatgtgtgatttgagtcacagtaacttggcaacaaatcctcaggggtatgctgtctaaaacaaaatttattcagtgtttgtactgtttctattgatagttctttaaagttattttcctaagctatcagatgaagcaaatgaatactctttattctgaaagaacctgactttgggcgtcaaaactgcggagggtcaattgtggacgtcaaagtttgcataggaacagtgtgttgttagaaccagatctttgatggccagggttaatgtcaacttaagataggctagagtcatctgagaggagtcaacttaagacaaaccagagtcacctgggaggagggaacttcagttgagaaaatgcctccccaagactgggttgtaggcaagcctgcaggacattttcttaagtagtgaatgatggggaagggcccaactcactatggacaatgcagtccctggactggtctttctgggatccataagacagacaggctgagcaaggccaatggcctctgtgtcagcaactgtctatgggttccttccctgctggagttcccactctgacttccctctctgatggattggaagtgtaagcaaaataaaccttttctttcccaagttacttttggtcatggtgtttttttttttttttcttccccagtaatagaaaccctaagacaaaattaaacaatggataatgtggagtcacgcctgcataaaatgcacaagtcttttgtgccacctaaagttggaagtcacaccatttgaaacccatagtttggtgttaaaaaaaaaaagttcttttgctttttcctgtggaagtggcagggtagaatcgaacccctccacaatgcacaccgatgacgtcatttcggttctcaacattgtttatcctccaagaagtcaaggttttcgtagaacaatagctaattctgtgtctggtctggaagggaaaggcttgtgggaattctagaacatttacgccttgctccatcagaaaaccaagttttgaacaattgggtcagtcaaaactttacataaccagtctcttaaggagtctctcctggccacaggtggggcagagttgagcacgccgaggagaaaggctatccatcaataaaaatctacctgaaatcgtcagcccatagggataaccaagaagacgatgggacaaactaattctcaagatgaattaagtccagtgaggtggctcagatggctaaaggcgttggcagagcaggcctggagacctgggctcaacccatgcctggaaaccacagaaggggcaggagggagcaaatgccacaaaggggttccctggcgtccgcacagtggcacaacacacacacacacacacacacacacacacacacacacacacatgcacacaccctccacacacatacaaaagtaaaaatttgaaagagagcaacagtatgtatttctgctgctaacttgtcaggtcttggaaagtatctatgtcaaacaaaacaaaaaccaaacaccctgacagatttggctcagctcaaggaagactataggaggattattggtggttagataaaagtcagctttcctcaggaacttgtgaaatgggattccctctgccaaaaggagtcgtgtcccttgcctctggcagaggggacatgtggctgtccattgatacatacccacggctgcagatcaaagtctatgctggcctccaggtttcctcagaccctacttacaccccaaagcccaggttagcaccctggcccttgccactcctcccccactttgctaactcccaggctgcctccgttcacaggcttccttcctcccagaaaccagccagctctctataagactttttcccctttccctcgtatgctattctatactatactccttgctactctggctagtctcaagactattctatgacacacacacacacacacacacacacacacacacacacacacctttctctctgctcccaatagtgctggccatgtccaatctgcttatttttccctctgctctggactcttccaggtgcctctggatgttctctctgtctctgtctctctctctgtctctgtctctgtccccccccccccccgccctcttgcccccctgccccattcacaataaaatcttcccccaatcgtggagcggccagtttggcggcttccttactgtgtcatcgctcacagtactcatttgtgttgggcttattgacacgctcgttttatcattggaaaatgccagcaattgccaagaggtcagtcacaggccgatttctcctccaccagtccctgtctccagacaccacttgcatccacctgcaggcctgtaattgcctctctgggctctccatcgattgcttcccacacgttactgtcccctgtcacgccgtttcccgcactttactgtctagtcaaggtttcttgcgaaactttccgttttactgaggagttgcaatgccgatgatatctctcctctgtgatactcctccctttctctttaaaataggcgtcttgttttccgtgggcctatttccttctttggcctgtgtgacttttctggggatgcggatctttttcctttgaatccggcctgacctgatccggtggcccaattctaccgcccacccggcgggaagcgacttcattgcgtctacgggtgtctggtgccaccttgtggcgaattctgaaaaaaaatccatttgttcccactagagaggaagctccgtgggcttcccgatgagagaaagggaaaagcccaggctagttttcctggaaccaaggctcagttggagaaagtccccaggcttagaccggaacatagagtttctccattgtcacttgcaagtttagctgccaccatgtcctctctctctgcattccctgacaccagagcatgtgcccagtggtcccttttctctgcctctgctctactctgcaagccactcacctttatcccagtcgtccaccccccccccccgatcattcaatctaaagcattgtgcatagttggtgaagtcagagcaacatccctgttgacccaaactgtaggtttggttttggttttccggctcctgggaccctggtgattccttgccagagtgggaggctcacaaagaagatgcaatgttcactccttgcatcccttagcgagcagtcggcagccctgggagaggccggaaactgatccacacataagagaacctgaacagaagccctccagggacccgaaatagcacgaggtagctcttacctttactctgctacctgaactgctcacctaccacacactacagacctcgagattgcctagggaccttcagcaagtttttcatacttgttcatcctaaggttgtgcctgcagccgcagctgcacaaggcccctccccccagatcaatttgtccaaagttcaaggatacttttaagtttactttgagatcataaataaagctcctagagaatgctgagtcgggactctggggctccgtaattgatttcaggggacaatttgggattctctaggaacagcgcgcagccagaatgccactgtgattataaatcatcttgccaggcagtggtggcgcacgcctttaatcccaacacctggggggggggggcaaagacaggtggatttctgagtttgaggccagcctggtctacagagtgagttccaggacagccaaggctatacagagaaaccctgtctcaaaatcaaaacaaaacaaaacaaaacaaaacaaacaaacaaacactgtcatctcaggccaggtgtcctggcccacgtctttaatcctgtctggaaaaccaaaccaaaccaaaccaaaccaaccaaacaaacaaaaagaaataactgtcatctctcacaagaacacacaagatcagaaactttcacttttcaagggttgatctcaacttgctgtgactccccctctttttgttctcttgtattcattcccatttgggaaaacaacaacaaccaccaaacacccccgcacccattaaaacccctgcagattctaccctgtgctaaaggctcaaagtaaatgtctgcccagtgaacaaaaatgccaggcgctcatggaggttcacacgaaggagtgaaatccttaggaaacaggagtcagtgtcacgagggtcctgcagccagagctgagatgacgtgtcagtgagtgctcggtacacttgaaagtcaggagtctaagagggtacacaaatagacactgtctgtaccgagctgctgaagagaaggagggaagagctaccgatcatgttggcatcacgaggccaacaccccctgactctagacaaaacagaagaggaagcactcaaggagaacacaagtggactgactttgcaacagaaatatgtggctgggctgtagcccaatggttgtgtgtgggtgtacgtgaggcccttggtttgatccttggaacactgagatctctttgatcagggctgtaaaactgatgcgtggaacctgagtttgatgggccctggcttctggctcctggctccaggccaggcttctctatttgtttctgcacacagctcttaagttcacagctaagccgctgttgaaaaataaaattgtttggaatctgtgtctcattttcccaacattgattcaaagcaaagatactttctgagtaacagcacaaatctcataataaacccaaaggtgacaagtgagtgtcataagttccaagaatatttaagtgttcagctttagtcatggtgtgtgcttgtacacacacacacacacacacacacacacacactgtgaagagctctgaaaactttcaaacttggatttttttgttgttgttgttgaggagatggctcagtgggtggagcagttgttacacaagtgtgtggagtggaccggggatctccagaactcctgtacacgctgcgtgatggtggtgacaagcctgcagttccatctcccagaaggcagggacagcagatggtcaagctagatggtcagctagactagctgcataggtgagctttgggttcaactaggagattctacctcagtaaataaagtggggagtgcaggcttagagtcttcaaaatctactttaataagggttcttaaatgcttcaaccacccttctagtccaccaaccaaaggcaggggagaaaagatggtaaataggacgaggggatgtgggcctgtttagaagtagttctttgggccagttctcatcttcatttgccaggagaccaggagtccacttcagtagtgtcaggataccgaacaggaatcaacagtggttgtgcgatccagcagaaacagccaggtctctgcagaactgcatgagtcagcggaagctactagaaccagctgggaccccaggagaagttctctgctgtgcctctctcaatgaagtgaagatgagcaaagacgccagaccaacaaatctagctgtgctagcattctatcactatccattgagtcctacttgtactctctccaaatattacctgtccttcccatgggtcttacctcagcaaaacaccacgtgagtctgcatcgcatgacacagccagggacttccacctcgggggagtgatcaaggaagacacatatcatcacccttgtgcctctttaggtatatgtgcacacacacctgcacgagcacacaacccacctgcaaatctgcaaatgcacacacacacacacacacacacacacacacacacacacacacctgaataaataaaataaccagatttctttaaacacaaccgcaatcctaaatgtgcacaagacattggtaactatttatggaaatggtggaaaatcttctgaatgacccgtaggaaggtgaactttgatgatctctgctagaagaggactccctgtctttctgtgacctcttatgataacgactacagagtcagcacaagaagtgaccgaaaggcactcggggcagttaggccgatgacatacacattttaccaagtagcacatggtgttaggatttactttacattttcaaacttaatattcacttttggtcctaattgtgcaatcaagagtttgaatttttttttctaagccagtgccaatttgcttaagcctccggtctgagcaggccctgggtggcctagcacagcactgtttccttctctgtctgtgtggcctctgattgccttgacccatttcctccctgggtgcgttggttctttcttctttctccacagctccagaggccctccactgacccagcctagctcagctcctgagctttgtagccatcttagctctgggaaccaacatctagatcttgggtccccgatttagattctgccagaagagaatctgcttgagccaacacttgggtacccatccggggttaggtaatttggctcagaagacagagccccgccctgcaaccagtgcaatgggacctggtccacagggcgagtggaatcaccaaggttcctttctccgggaacactgcgatcctttgcgtccagggaaaggctgttttaaggggaatgctctacactcacctcactgcagaccctgagtgctgctgttgctctctcttggggcttccctgaggcaggcaggaggctggggatgagggactggacaaccgggtcaggtaaagccccagattacagcagcagggctttcccagaatgcagctggaaaatgcagcaataggaccgtggaatagaggtgtggcctgagggagtgagaatcctgatggcttccaccatgcaggccagagggttcttctcttaactggtctttgatgctcggtggtcaccattcttgatacatggctgaagaagagaaccgacttccacaacttgtcttctgatctctacaagtgtgctgtggtgcgcgcgcgcgcacgcacacactcatataacatgggtaattttggtgattttgcatacatctaaatgtcaaaactttcatttaaaactgatgctgtacaatataacgacggacagtaatatctgtactgataattttcattggttcccttccccccattcagaacatctttacttaaagaggagaaacccagaaagaggccacaagagaaatgaaagagcttgtctatctgcctatagtgacatccccccccccccaatcctctaaaagctccacatactgtgtgtgtgcttgatcctgcctgaggttgaagtattagtcaacgaaggagatggcggctgggggcctggaggaaggaatgatgaacttctttggggttgcattggttttgaggtgctgggctcgaaagacaggagaagtaaaggttctggtctgtggcgggaatcattgttagggccgtgctagtggtgggaacagagtctcactgcctagagcttgagaaggctggagtggaggtgagtggagggtggggcttgctcctcccaaagtaggcacaggaaggaaagaagatgagcgagaaagttagctggatggagtagccagtcagccggggaagtgctaaagtggacagtctccagcctcatacggagcgcttgaagatggtgactgtgatgcctactataaaattaaataaataaataaataaataaataataagagaaagaaagaaagagagagagaaagaaagagagagagaatgagagaaagagaatgagagaatgatagaaagaagcaaaagacatggagaagaggtaggaagaacaacgctctgggctatgcacagaaaaggctgcgcctgttttgggacagatgtcgaagacctggctagctagttcctcgttctatgactgaggacacatgcctgcgtcctttcttgtactcagctcctgccctagaggacaaaggagacagggcaagctgccctgaggggtcctcctgctctgattctgcaggtgggggtctctttccttccatgctgcaggcaggccttgctccatcccctactgtcccaggcttatcatctgatccagaacagcatgtgcgtcacccctagggtggagcagctcagcaccctggagagttgttaccgcagagacagtggagctgaggcagtgaggtgttctatttaggcttagtctcctggaatctgagttctggttgagctatttgaaagtgttgtggccttgggaaagtcacttaactcccctgacttcaactgttcatccgcaaaatagagctaacagtatctcccacatcagaatgacagaggcgaatgaggaaacagacgaagtggcctgagggcagccactactcaatgaccccagctggcctaagcgtttgcagataggccagctgttctgacttcaatcagggtgacacgtggctcctctgacaattaatgaagttcctgaggtagtgcccagaccaccttcttgctcctataatttttcgtttcattttattttacatgttcaggtgttttgcctgcatatatgtctgtgtaccacgtgcgtgcatggtgcctgaggaggccagaagagagcctcggattccccggaactgcagttacagatgcttgcgagtcaccatgtgatgttgcagatgctcgtgagtcacaggacccaggttcaccactaattgaacctggatcctccggaggaacagccagggacttaaccactgagccatctttacagccccactcctttcccatagattctgtaggcttcgggcttgggctgaccagctaagcaggctggacggacaatgtgctcacaggagagggagcttgtgagctgtacccttggcacaggggcttccgagcccgttggagggcagacgagacctcagtgctcgcacctgcggtttgtatctagtctctcaggcatcaggcccagagcactgaggtttttcaggctattgaacgagtcttccctgcatcaactgcctggaaagaagcagccgggacaggaaggaatggatttctgctaaagtcacacaaccatgaagtcctcccatcacccagggaaaaccatgccatcccaaaatgggtttgtctactctgtctgagaaaggactgtagtcatcctactgagactaagatgtgagcacacaccaagtctcctcggcagcagactccaaactgagaggagtgacagcctcggcttggctcccctctctcttcctcccctccccacctcttcccacttctcacaggaaaccacattctttgtactaagaatgaataaagagcgggggagacagctctatcagcacgcacgagggtctgcgtttgatccctagaacccatgtgcacacatggaatccccatgttggggaggtggagacaagtagaggcctggcagcctcgtctgcttggtgaattccatgccagccagggactctgtct

SEQ ID NO: 294 - DNA, 2236 bp, Mus musculus
atgaagcatctcttgatgtggaacccagtgacccagccgggggagacggtgctctattgtgtggagtatcagggggagtacgagagcctgtacatgagccacatctggatccccagcagtcaatgctcaccgaccaaaagtctggagtgtgatgtcaccgatgacataaccgccacagtgccatataacttcagggtcaaggccatgctgggctcacagacttcagcctggagcaacctggagcacccctttaaccgaaatgcaactgtcctcaccccacccaggatggaggtcactgaacatgggctgcatctggttattgagctggaagacctgggaccccagtttgagttccttgtggtctactggaggagggagcctggcgccgcggaacatgttaagatggtgaggagtggggacattccggtgcacctagaaaccatggaaccgggggccatgtactgtgtgaaggcgcaggcactggtgaaagccatcgggaggcacagtgccttcagccagcctacgtgtgtggagatgcaaggagagtctcttccgctggcactagctctgtttgcgtttgttggcttcatgctgattctcgtggttgtactactctccgtctggaagatgggccagctgctccggtattcttgctgccccgccgttgtcctcccagacaccttgaaaataaccagttcgtctcagaagctgatcagctgcaggaaggaggaggtggacgcctgtgctgtggctgtgctgtcctcggagcatctctttggggtctggatctcacagacttgagaaggacctgatggattaacagcctggtctgcaggacccagaaccctggatggggtgggttgtgtttctgttttcctctgtggacaaaagacaaagagcagtaacaggagcctactgtgtgcgcgtctagcagtgaccgtcagaggcagagtggcgtgaccatccaagagtgacagaaatagtctagagaggtgatccccagacacacagttaccatacactcactgaataacagtggagaaaatggcttcatacctcggaccccgctttgtcacctgtagtggggattaaatggtttctcccctcatctctgtgtgtatacaaactcgcacttgcaggttggcaaggagactggtggcactgtgcacaacggtgagttcagatcatgcggactgtggggcatacgcgtgtgctaagaatgatcagagtactcagccgggtgcgaaatctcagcacttcggaggagcgggagagaaagtcacagcctagacgacgcggtgaaaccccgtctgaagtaaacaaccgaacaaccaagagtaataaacctccttttgtcaaatcaaactcagaccactgttggtttggacttccctctttacaagaggaaacccgaggagggacggaagaatgggagggctgtttcacttcaagccaaatcctgtcagcacgctctgctgagggtgacatcgagagaggccgtagcccgtcctggtgacatcgagagaggccgtagcccgtccatgatgggacatgcgcggatgctgctgtgggttcatgaaatgtcatcagatcctaggaccttgtccacagtaaatcacaccagctctcttcctaaggacaattcactcagggtttctcaatcgctctcaggtactcatcaggaacccctgactagaggcataaccatcactacctccaggcagcgagggaggggtggaggacagcttcagtcagaggaggatgaaaggaggtggcttcatctctctctgcagagtcaggctcaccaccacctccccctctggaacctggagctggcttgtctctgccccaacttcctgggcttcaccagccagacaagggtagagacagtgtaacggtttcaaccaggtgcttccagtccgtcttcagcacagatgccaacggcctcatctctactttggggactccaggagagatatgtaggggtgtgggcagatatgtaggggtgtgggctgaggctccctgcctttgtcctgttctgtatatttctgccttgactcttttgtgaagcgtgtgttaaatgttatatttcaactggtctggaaatgtgctgtttacagaattaaaaattgcatacttacattaaccttcatcttttctcccctctcttctctgctccctcaccccagggacttcattcctctgttacctaagctcagaataaagaaataccccg

SEQ ID NO: 295 - protein, 264 aa, Mus musculus
MKHLLMWNPVTQPGETVLYCVEYQGEYESLYMSHIWIPSSQCSPTKSLECDVTDDITATVPYNFRVKAMLGSQTSAWSNLEHPFNRNATVLTPPRMEVTEHGLHLVIELEDLGPQFEFLVVYWRREPGAAEHVKMVRSGDIPVHLETMEPGAMYCVKAQALVKAIGRHSAFSQPTCVEMQGESLPLALFAFVGFMLILVVVLLSVWKMGQLLRYSCCPAVVLPDTLKITSSSQKLISCRKEEVDACAVAVLSSEHLFGVWISQT

SEQ ID NO: 296 - DNA, 59748 bp, Homo sapiens
  misc_feature (1)...(59748): n = A,T,C or G
aataacctaaatactgggcaagtgttgcatgtggtacaggctctttacccattcagctcatctaatgatgaagaacttaatttcgagaaaggagatgtaatggatgttattgaaaaacctgaaaatgacccagagtggtggaaatgcaggaagatcaatggtatggttggtctagtaccaaaaaactatgttaccgttatgcagaataatccattaacttcaggtttggaaccatcacctccacagtgtgattacattaggccttcactcactggaaagtttgctggcaatccttggtattatggcaaagtcaccaggcatcaagcagaaatggcattaaatgaaagaggacatgaaggggatttcctcattcgtgatagtgaatcttcggtaagttgattttcggaggtaaatacaaatagagctctgggtattttaaaaaaaagagagagagaaatggagaggttaagtggcttccctaaagttaaccaggtaacaagctgggacgtaacataagcataaatgttccaaagctaaagtccgcattctttctagctatctattttgaataaaagagagctgtggcagtgttgctacacactgaattatttcgtcttgtctagttctgttgattttgcattcctgatatattttctgtttctgttgcattaaactaaatggagaaaatggaacactggcctcttcattgagagtagaataatactatagattaaactgggaaacatttaaaaaattgctatgagcaatgtgtaagaaggtagtcactgtagtccttatgacataggaaatccctgaatttaaaaaattgatattaagtttcttcataaattggttacttggaaattggaatgcacttttattataacctcaaaaaacctattttagcagtgtttgaaatgcatttgcaataaaagataaattatattgcaatactagtaaacaataaaactataaaaccataaaagttgaaaaataatatggtttcatggtctcttttagatactgcttaggatattagaatttgatgacactcattttccttaaaaatggcctttctttttccttgatgaaagatatcactacttttccatttattaaatcatggttaatcttggctttgcgtgagtatatttgtacaaaagggaatgtgtaattgcacaaaattttgaaagaaaatgtgtggaagtggggtgtggtggggagagagattaattgaacttcctgatgtgaagttcaggaaaatggggcctgtgcctaatccctcagaaaagcagttggttggcagtagggaagagtgatgacatccattttctgttagttgcctgatctggctcactgtttgaaactttgggagtaactgtagaaaaagaggctttgggggttgatatagactgtaacaacaacaacaaaactaattaaaaagaagatagcttgaatgcagaattgtatgtattttcttgtgggtaattgagtgtagatattagacaaaatgcaatatataccattatttttagcagtatactttttaaggttagaggtctcaagtaggcatattttgtttagccttcacagtgttttttaaacatttaaattcattgccgatatttaaatattaggatatttattataaaaattcagactttagaccatttaaaattggaagaactaccaacattgagacctggttcctgcaaggcaacaatcacagctgagaagtcaccacttgtttagattggtgatacactgtcatttcctctgcccatctacctttccactctgacacttatttacattattcttttggctcttgtaggcatttgagtttgtggcctctccttaaagtttagattaattctcatttgtgtattcttcatttttgggaattcagcatgttatctctaagacagctactgttagctacacattgaaaaggggttgggtgggtatcttagactttctcatgtgtttctctgactggagagaagatagctcttgttcttcaaatatttaactaaaggatttgctgtgggtgtctgctgttggagccgtgggtgttaagagacttttgattatgcaggtttgaatcctggctctgttgttaactagatggatgatattggccaagttattaatagcttctttgagactcagttttcacatgtgtaaaaagggtttgttttgaagagtaaaggagataatctatgtaaataatttaccatggtgcctaggacttagtaagtgcttagattttagcttttagtttaatataaaaatactgatagagggctttcaaaatgtttactatatgtatcttttttttctcttttagccaaatgatttctcagtatcactaaaagcacaagggaaaaacaagcattttaaagtccaactaaaagagactgtctactgcattgggcagcgtaaattcagcaccatggaagaacttgtagaacattacaaaaaggcaccaatttttacaagtgaacaaggagaaaaattatatcttgtcaagcatttatcatgatactgctgaccagaagtgactgctgtgtagctgtaatttgtcatgtaattgaagactgagaaaatgttgggtccagtcgtgcttgattggaaattgttgtttctaaatctatatgagaattgacaataagtatttttattataactcagcccatacatatatactatgtatgcagtgcatctgcatagaacagttccttatccttggccttctgttttattgtttttttctttgctgttttccctttgcttctaatattacagttttgtattttgtaaacaaaaatcaaataatgcatatcagaatctttatatggaagaaatcctttattgcctttcctttgtttccttgtaaaggcaccctgttctgttatggtttttcattatataaaattattatatctatatatgacatatgctaaaatttcttggagagtgttaatcttttctgtgactaaatagcaataataagtggaaaattagaaattatttccaggtattatatttgtcacaggccattgtaaataccaagtatattgtgtctgccataatttttaaaaatacattcattgtcttcagtcatacagcaagacacatgagacatagattagaaaacatgttgtacaattttaatttacaactgttggaaataaaaatcacttaatttttttccagtgcttctccctcatctggttattcaagaaaacaaaacagtctctgagatatttagcttttcaaactgtaaatagatgctctagtgttatttatttttttaatcccacttgtattattttacctctagagcatcttgtattaggacatgttatatttatgccagtgggaaataagttatggccaagttttgcaaaaacaggaagcagtgagatacttgtttttttctcctcactaaatatcagtaattgtcaggaatggtattacctattttcatttcctcttttcagctttgttttgttgattgggacactaaaactgatgtatacctgaggaaaaaatagaatgtgctcatggttagggaaaattatattatttttaattttttaatttgttttttaaccaagtaggaatttgggtgtatggataagaggccaatctgcttctgtaggctatagaagaaaaccagttgtattttatggtcataatttgtccccctattattctggagatttaaatttaagtaaagtagccatcagtattttaattgaaaaatactaaagccacataactgagtaggatgtcgtatgatactttcaacaaattccctaatgctgcctaagcatatggatgttttaattctttgctgttataaatagatatctaatacgccagaattactgatggtaaaattgaagttgtgtaacttgtgaattttttttatcaatgttttaaatattatttaaatcttaaaatcatttaaagacttatgttgccactgggtggcagccatggcttctcccactaagcaacagaagtgaccaaatataattaagacaaattttcatctctattacatctgcttttaaaacattttagttcatattctattatttttctaactcagtactcctttgttgagggtaattattagtagttaagtttttaatggaaataaaaatcatgtatgcttatctttgctgtaaaatcaaatgaatataaattgaggaaaactttaaattgttgtaggatgactagtagtaaacatcatcttaatttttaacatatatttgatgatgctttccttttctctgtatgtttctgggtttttccccagtcttccttatgaaaaaaatgtatgtttgtaaaaagagaacaattaatgctttgcatcacagacataaactattcatagtaaactgcactgagctgatattaatagagcagacttttgagaaagtaggagtgtagtagcactggaaacagaatgcaaatttctgttccataattaggtttattgtagctatagcgctcccagataacccatgtgtgctagtaatatctattgtgtgctcttactatggtataaaaacctcgctggaagctacttattttgtacttaaatattttaccaatttttaaaaagtcttaatccaatgcttataccagtgactgtttttataatacttgaagtaactttaagaactgaaacaaccctggaaaactctacatagctagatagtaacaatacttgtataagaaaccaagtttccttattcccagcctggtgtctgtatcgtgacacactactctgtgtatgcttggttttagactaggaggagagtcctgggaagggcaatattacagaagttttcttccacatgaggagaatgcttagtttcaaatttaaatacatgtgtcagatggaaccctgcctaactcacttctacaaataacttccccaaaatcttagaaggttttttagaacatgatataagctttgtgacaaaaacaaatgccattgtgtcccttatttagtcataaaaccttaggattcagctgaatatatattcacacatgtatattacacatatatcactatacagttaacacatgcaccttgcactattagtgacaaataatactgctaaacaaaataggcttcatgcaatctattgccattgctagaagaataaataggcctagcagatgggcaacttgggttgttagaataaggtcattcttgcagaatatggcacttaaattatctccagctgtaatgtcctaccatataatccagaggttgcatagaagcagagttgtcacagtctctgtagcacgtttgtgagaattctctaggcaggcccagcccttctctagaagtttgaatttcactcccaccttgttgctggggtaccttcttcagggtacatctaaacacagtggccttatacagaaatgttgttcaacccacacagtgctttaaaaaattaattgccaacatttaaaaatcagggagtttcacataaaattcagacttcttgtttccctttaaaaatgagaagctaataacatgagttgaattcccacaagtcaacaatgagctggaatctaatatggatggtcctcttatctttaccagtgcacatggtgaaaaaattcaaacagtataataaagtcttctttcaagtcaaaatatagagacgaatctctgaaacgttttatttgggaagcaagaattgtaattcagggcatatacacagacagtagtttttggtatgtctaaagaacagagaagatggggagttttattataaagagaaatgttacgtatgttttgaaagaaaactcattggttctagataagtttttgggaggtggcaagctctgattggtgtgtgacagtgataggtaaaaccagtcttagagtcacagcaggtcatttcagcagctactaggtaaaactggtcttagggtttacagtagtctgtttaagtagctgggcttgtggaaaactgagttcttggagcagctgctatgtccttcatgtactttttccccttaatgcattgaatctgatttggttgggtatgacaataattacccaatttgtataattaactttcacactcccaacccttatccccctagttgagatctccagatgcagtttactctccctgtttttcctataacatggaaagttttgggtttggaatctggaaattaccatttttttcagaaacactcagttacattgtccaaatcaagaaatgaggagtgtggcattacagtactccctaagttttccattttaatactttgctagaagataaggggtcctttataatcttgcatttatatagaacttttaactttccaaatggcttcacaatcaaggtcactttttttcttaaaggacttttgatatagtatagatgctatcttatgttttgaacactactgttttttaaagaatgccaaattactgtttctggagaaacacattattagaagcattggcttgctactcgattctgataggctggttctgttagtgtttagcaagtttttgtgactcaattctctgctatcttttaaacacttgacagaccagcatgatatgcatgcccccacaccctaatttcttgctgtaacatgacctaaaccaaatgacttaggaactgaaatgtttatttctagtttactaatgaggtgcaccttgtatctgaaagcatacatagtttgctgagatatgtttaatgagtagaacctaggttaggcttggtggggttttgaacagaggaggagtttgagctatcagccaccttgttcacagagggaagtgttctaaattagtgtctttgagaatatttcctggcgggttaaaagtagatttctaaggtagttgctttaaataaatttctgtgctcagataatttatatctttagactgtggagaaatctttcagatagccttcatgaaattactgagacaaaaaggtgaattccagaatgagactgttaagtgttgtctattttaggctaaacacaggaatggttattaaattgatattttttgagtacttttgaaggaaacagtaatcattgagtaaggatggcttctctaggagaagtaatgtcaaacttgatgttttctagacttaataggcaagggggatgttacagagaacaaattcatcaaggcatatgatgatgtcaagatgcaaatattttttttaattgttacatctctatatgattttatgtttaaatagcttttggagatactcgtaatcaatttatccaaccaactcacctcaaatattttattgctgagctgagactgttctagcaatgtaacagtgaagaaaatggacagagtttttataaaacttatattttagtgatgtgatacgtaacggagaagagctctgaattaaaatagaacagatttgagggttgaagagtgagggtgagggtgttaatttatataggatgataaaaagaggcctctgataaaattgacctttgagtatactgtgtgctccacttaatagaatcactgatgactacgaacgaccagtgactgaataaaatacagcaaccaaaatcatttgaaaactatgtggaacttcactattacagagcattgtttctggttttcagatttttaatttgactaaaatggtattttatcgaaatgtggaacatttaactacagaaggctattctgaataaaccctgattctccattttaagaggagttttttggggggatgtcaggtagaaaaagataactacaggaagaggacagtttggccgacttaagggttctaattgagcacactctaaggaaaccctggaggttaaattcctgatgaccagacaaacatttgggaggaaattgaaaaactgaagtatttcagaagtgaaaaaggaatgcaggagccctgaaaattagattctaaaaacgtgtagaaattctacctggggccgggcacagtgactcaggcctgtaatcccagcactttgggaggccgaggcggggggatcacatgaggtcgggagttcaagaccagcctgaccaatgtggagaaacaccgtctgtactaaaaatacaaaattagccaggcgtggtggcacatgcttgtaatcccagctactggggaggctgaggcaggagaatcgcttgaacccgggaggtggaggttgcggtgagccaagatcacgccattgcactccagcctgggcaacaagagcgaaactccatctaaaaaaaaaaaaaaaaattccacccggaacagtcttggtggaagcatgaattagaagagtctaagacaagtggaattccgctatttaaattccctgtgttacttctaaaaagaaaaaatagagacacagtgaaatccaactaaatgtcagaagtgctacaagacagaacatagatatctaagaatcttaatgcaaagggaaggaactattttgtgttaagtaggggaaaggaagattactggactgtaataattgaccacatagttcattcaaggacacagggcctatcctggacttgcacaaccctaagagtgagtgcctcagattttgcgccctaggtgcttcccttaattttagtcctggccctgcagggcacagagagcttagggttctcttccttggccacaaaacttcccatccctccccactgcctctaccttttcataaaaccttttctctgcttgcttttccttccataattaaatatcagagatttaagtggcaaatagtgtaatcgaaaaaaaaatcctatttctgaactgtacctacctataggaaattggtctattcttccagcggtttatcttctgacatggatgaccctccaactctgtggaaggcaccagaaattaacttgagaagtgcaggaaacaggatagagaatagtttcgttgtgcatgttgcatagacaagacattacaacttctctttctatagaggggcacctcaaagccagaagagaaaggcaaaatcagggtcagggattatccaggaatgttaggggctagcaggtgaggcacagccctccagaagtcctcacccaaagatacagcccaggcagaggtgggtggtctgagttacttgttgggtcatgacccaggcttgaaacggattattgttcaaaaaatatgacaggcagatggcattatctctcagtgccccttgaggtgtgctgaacccagggcagactctgtgcaatggcttatgaaggattggcaggcagtactgtcttgccagagcattgtagtgctggacaggagtgtcttgacagggaccaatgagcaggtggagctaactagccatcgtaacacttcaaagtttggtaaacaactcttcttctccgacagcatagctaaatgattcttattctttcctccattttctctgtttactttcattttcatcttcttaattcagtctgtattcccctctacctttccatctttgctcatatcattctcccaaaaggaatgatgaacagtgtgcctctcttcccctcctacccatatccaattggtacatccggaacctcatattgaggtctacctattccctaaagcctttgctgatctcttggatcactcctttgtgtccctcagacacattcctttgatgctaactgggaggcagttaaagtgagtgaaaaaagcttggagttatgcagacctcagttagaattcctgtttccatccctgaatagctctgtgatctacagtaagttaatttccctgagccctgtgttctcacctgaaaagtggagaatcaaatcatatcttaccttgcaagtctgttgtataatatatggacatgtatatagtgtgtagaaaccctttaggacattcttggcagataatagatatccagtacacattggcttatattgctaacttttgacatgctggaactgtgagcagaagcgaacttaggagagaggaatcaggaagccaagatggagaacaaaggtaacattggggacagacgttgaggccatgtatgaagcactcttaagaggagcagtgagagactgtacaagcagctagtgaccagaggtcaaagtacagatgtggccactgactcacagtgctggaatcaaggaaaatatgcaccaggttttcttgactatggtgtggtaaaaagatatacagcaatgtttattgtatacttattttgtgccagatcctgttctaagtttcacttaatcctcacaacagccctgagtcagacactattataattgttcccaattttcagatgagaaccataaagcagatagtttaaatgacttgcctaaagaaacacaactaaaaagttgacaccaatcaacctgagacaaagattatttatatactagagactcccctgcccatataagcatctaagctcaaatttcgcaagctgaacatttgcagcctttttctatagcacccccaatcctgcctgtcctgaccacactccacccacttcattatttcacttgaggtgctgccatccacccagttacccaaactcagaacctgaaagccatgtttggctcctcctccccagccctcttaatgcactcaatatccaggagctatcagttctatcttctttatcttttgaatttggtcatttctctctgcagacatgagaaacctagtggaagccaacaatgtctgtcacctggatcactaccatagctccctcatggccctcctgccttcaatctggccccctgtgctgttttctccaccctagtcacaaactttttaaagctcaaatgcagggaatgacatggtcatatttgagctttgaacccttcctttgaccttcattcctctcaggataaattccaagctcctcaataaggcattcaaaactctctagaatcctgtttctgtctgccactaagccctatttctcgccatttcaaccttgttctcgtgttgcaccaaacttcttcttgcttcctaaaaacaacattcctggctgattttttttttttttttccagagtttaacacccagtcctggagtcacctcctccaggaagctttctgtaatcctacaaactgggttagatgtttctttttagtgatgctatgtttccttacgaatattgctgtcccttcattttaaaaattgacttatgattattcccgtgtctatcttctccactagttgggaaattcttgttgagggaatggactgttgaattcctaagaactagcacatagtaggccttcagtgaaggtttcttgaatgaataaataaatgaccaactttcccaaggttacattgtaagttctgaaacttgaaccaaaatacattatactctagaacccatgtttattccactattgtatttgcacattagggtggttaaagtccttcaagggctaaattttaaagggctaaatactatcacaaggtttttcttccacctattgaaattggttttaatttttcagtaatacattcacgtgactcagtaatcaaacgatatacaaagatattcagtcaaaagtcttgttcccatttttctcttccacctttccaattcccactttctctgccccaaggtaaccaatcttgttcatttcttatatcttcttttagtttttctttttgcaaatgcatgcaaatatgaagctatatattattctttaccctcctgacttttagaagggtattttaaattttttcaaatatctttagtttttctgaagtgggtacatattagaaaaaagagctagtcagtacccagcttgaatgaactcacagagagaaacttggaagaggacagctatttaatgagggagggagataatcctgcctgctcattggcttttagggaggtgcagagtcctttaggacagagcctgtggtccgggtattgctcataggcagattctcaagctccccaaagttacattttctctggaactctcctaggccactccctgctgatgcaacatctgggtttgggcagaaaggagggtgcttcggagcccgccctttctgagcttcctgggccggctctagaacaattcaggcttcgctgcgactcagacctcagctccaacatatgcattctgaagaaagatggctgagatggacagaatgctttattttggaaagaaacaatgttctaggtcaaactgagtctaccaaatgcagactttcacaatggttctagaagaaatctggacaagtcttttcatgtggtttttctacgcattgattccatgtttgctcacaggtaagtatgaattagaatacatccaatagtttgggccttgaatataggttaagaaggcaaaaaatactttcccagggcctggggttgaaatatgtgtatagaatatcgtatatctgttttacaaaagatttatcacctcctaaacctctattcccacatcccaaagaaaaggcctgcattctgtttggaaatctctcttcttaatgtccacacaacaatctagaaagagaaatcatcaaaataaataaaagcagagctctgtgcactttgttacttatctcatcgtctggttttatatagtgcaatgtagttctttcagacttactgtgtgtgtcttggagatgttaactgtaagaacaaattaaaacaaagattctagcaaaatacacatgaataaaaagacaatttgtgagcttaacattggatacgagacttataaaaattggatttctctactggtcattgaagaaaaggtactccatagcattctaaaaaatatttggtttgggacatttcccctgccagtgagattacatagttttctctgctccactcctggttgcttgtacctatctgctttattgtcttaaaattggaactctgtagcctttgatgtttgttcatgtcaaatcacgtttaagagaaacttctaattttgatactccaagacactaggcactttgcagtgttgatgggagccttgagtactttctctctctctctctctctctgtctctctgtctcactctctgtgtgtgtgtgtgtgttttacacagaactaatttaattattctagttagtttacatcaggtaacaaatcagtactaagacaatttgcaaaggtgtagaactggcttaaacatcaaatttatggtgttctttcctagcttaaaaaccttcacagctcccagttgttcagcacatggtgtccaaattctgttgtctctcatcacccagcatattcaggccccaccctatatttatttaaccctatttctcactactccttgaaaacgaatatggactacaagcagctgctggcttaacagtcagcatattataccttcatttcctcctcctggcctttattgttataatttcccaccagaagcagcatcttcagtatttccttctacgtctttccaagacctctctttgaccccaggtactttagcttcaggtggttacttctctttccagcactgacctggagggccagggcctgggcatcttttctgctgtccccacatctcctagcacaggctaagcatgctggttgtttggttagttagttgttggttatttagttgttggaacagaaatgttgccaagaaaacatccgtccactaagctgaaacgagaagatgggaggctgaatgagaagaggaaagcccagcatttttcgacttgacattttcttcaatgacgcccgtcttataagtattttcttgaaaactcctgttttaaatagatctggaggtgagtgtgcacttctgacgcttataaacttacatagaaaacacacacacaccaaaaaaacctcagtggtgaaatcacaaggatgtcatagccagaaagacctgtgtgtgagttttggctctgttactcactagctcaggactcaatcatgtaacgtcagtttcccttcctgtgaaatggtcataatagccactttgaggttatgaggggttaaataagatgacacaaacaaaagcgctttgaagacttcaacatttccccaccctcaaatgttagttattattatctgttggttatacagatggtggtatcagtagataattgctttagctgaggttgtctttatgcagttttgaccatttcctctggattgtgtaggtgcctgtgatgaattctgcaaattctaaatgaacttctattagttactagatcactgggcagatgggtagagttgtggctttttttttttttttttttttttttttttgaccgagtctcgttctgtcgccaggctggagtgcagtggcgcaatcttggctcactgcaatctccaccacccaggttcaagcgattctcctgcctcagcctcctgagtagctgggactacaggcacacgccaccacgcccagctaatttttgtatttttagtaaagatgaggtttcaccatgttgcccaggatggtctcgatctcttgaccttgtgatttgcccgcctcggcctcccaaagtgctgggattacaggcatgagccaccacatccggccatggctgtctttcatagaaatcatttgccttgtcctgtccctcccaaataatagtgtgtgattcagaaagctgattatgctaccaatagtaataatcacaatgacaatcacaactgctatttctgagtacacattgtgccttcagttagcaaaaatgttatcttgacttctcacatgaatcctgcaagttaggtgttatccccattccacacattagggatagagactaggagaggttcagttatttgtccaagtacctatatctagtaagtgcaggaattgggatttgatgatggtttggtctgctccagagcctgtgccctttatatatctctgcagaaaaagctgagacattaaaacaaggtagaagaagggaggagggacaaaggaaaggaaataaagaagatggtgctaccttttctaatgcattagccttaaaggctgatagaggtaaaggtggcagaagaggatccaaataaagggagtggacatcaggcccactgagcgtccttcagagaagagatgcaaagatttttgcctggaaaggttgccccagggctttttggtgggtagccttcatgctacttcccttggactgactcactcaaggttttacgaaataggtgttcagcagcagaaagggtctaatttaaagacgaatgagggattaagaaaagagttagacctaggctaatttccccaaggaagccaaagcttaatttacttgttcaactttcattcttttaacaccatttatgtaccaggttctgggatgtgtgctagttagagagattttaaaaacttgtcttcagggagcctaagagcctgctgggaagtacactaaagtctttggcatgtgggaatttaacaaaattttaactattctttagccaccagaagtaaagtctagatttgtggttcccaacctcaaatgcacattggaatcacctggggaactttttaaaagctaaattccgtgacttcacagctagagattctgagttaatctagggtgctgtctggatgttgggactttttcaaaacaatgtgggtggggctccttagagaagtgattgattccagggctgggcagggaaaaaacaagatgagacaagagcattttgtggtaagtaatgaagtgattaaaaaaggatgagggcctaagttaacaattaacatagtatcctggattggagcctgggatggaagaaagaactgagtggaaaaactagtgaaattcaaataaagtctggagtttagttaatgataatgtgccagtactggctttttagttttgacaaatgtattatggttacataagatgttagcattcagggaagttgggtgaaggatgtataggaatgctgtgtactatctctgcaattattctgtaaatctaaaattattccaaaaatttaaaaatctattaataaaaataacatgagtaaaacgggtgggaacaagttaaaagggcacaggcagcttgaaagtgttcccattggccaaaagctagaacaatttgaataataaaataacaatagtgttggactttacagaataaattaaaatatccatgagtccataccactaaaaataaataattgaataaataaatggtggagaaggaacagctcttcctaacaaaagaatacaattaaataaaatatcactactagaacatcacagcaataattattacaagaaatatccatcagtagatgttaaaattaataggtgaaagtttgaggaggaatggaatatttgcacagtctcaaagtatctcccccaaggtatttattaactacacaggggaaaatggtagctttacagtagagacactttcttaaccaagtgatcagggtggttaacatcaccagtaataagacgtattgatatcatgtactccctgtgagtgtctggaaaaaatgtgtaacctcaatcaaatcacgtgaaaatatcagacaaaaccaaactgagatacgttctacaaaacaactggccagtacttctaaaaaatgtcaaggtcggccaggcgtggtggctcatgcctgtaatcccagcactttgggaggccagggcaggtggatcacgaggtcaggagatcgagaccatcctggccaacatggtgaaaccccgtctttactaaaaatacaaaaattagccaagtatggtggtgggcgcctgtagtcccagctacttgggaggctgaggcaggagaatcgcttgaacctgggaggcagaggttgcagcgagccgagattgcaccactgcactccagtctggcaacagagcaagactccatctcaaaaaaaaaacaaaaaactcaaggtcattaaaaaagacaaagacagactgaaaacagtttggaggagactaactagacatgacagctaaatgaaaatcctgaattggattttggccaaaaaaaaaaaaaaaaaaagcattaggggaaaaactgatgaaatctgattaaatactgaagcttagttaataatattgcattaatattaatatcttaattttttataattgtgctatggttatgtacatatggagggctgagtgaagagtatatgagagctctctgtattattttgcaactcttctgaaagtctgaaattatttcaaaatacagttaatctgttcatcatatcactgggctaacatcaaggtatgggcaggactacattccttctggaggttttagagaatctgtttcccccttccatggtatgaatgtactacagtttatctaaccattcacctgttgaaggacatctgggccgattccagcttgactgtgaatatttgtgtgcaggtcttatgtgatgtaaagttttcatttctctgagataaatgctgaagagtgtaattgctagatcatatagtaactacatgtttagttttacaagaaactgccaaactattttgaaaaagagtatcattttacattcctaccaacaatgtataagtgatccacttgttctgtatccttgccagcatttagttttgtaactttgaaaacttttagccattctgataactgtgtaatgctatctcattgtgattttaatttggatttccctaatagctaatagtgtgcttatttgccatctatatatcctctttggtgaaatgtctattcatgtcctttgcctatttttagattggattgtttgatttttctactgctgagttttgagagttttttatgtgttctagatactagttctttttttttttttttattttttttttttattatactctaagttttagggtacatgtgcacattgtgcaggttagttacatatgtatacatgtgccatgctggtgcgctgcacccactaacgtgtcatctagcattaggtatatctcccaatgctatccctcccccctcccccgaccccaccacagtccccagagtgtgatattccccttcctgtgtccatgtgatctcattgttcaattcccacctatgagtgagaatatgcggtgtttggttttttgttcttgcgatagtttactgagaatgatggtttccaatttcatccatgtccctacaaaggacatgaactcatcattttttatggctgcatagtannnnnnnnnnnnnnnnnnnnnnnnnnnnnnnnnnnnnnnnnnnnnnnnnnnnnnnnnnnnnnnnnnnnnnnnnnnnnnnnnnnnnnnnnnnnnnnnnnnnnnnnnnnnnnnnnnnnnnnnnnnnnnnnnnnnnnnnnnnnnnnnnnnnnnnnnnnnnnnnnnnnnnnnnnnnnnnnnnnnnnnnnnnnnnnnnnnnnnnnnnnnnnnnnnnnnnnnnnnnnnnnnnnnnnnnnnnnnnnnnnnnnnnnnnnnnnnnnnnnnnnnnnnnnnnnnnnnnnnnnnnnnnnnnnnnnnnnnnnnnnnnnnnnnnnnnnnnnnnnnnnnnnnnnnnnnnnnnnnnnnnnnnnnnnnnnnnnnnnnnnnnnnnnnnnnnnnnnnnnnnnnnnnnnnnnnnnnnnnnnnnnnnnnnnnnnnnnnnnnnnnnnnnnnnnnnnnnnnnnnnnnnnnnnnnnnnnnnnnnnnnnnnnnnnnnnnnnnnnnnnnnnnnnnnnnnnnnnnnnnnnnnnnnnnnnnnnnnnnnnnnnnnnnnnnnnnnnnnnnnnnnnnnnnnnnnnnnnnnnnnnnnnnnnnnnnnnnnnnnnnnnnnnnnnnnnnnnnnnnnnnnnnnnnnnnnnnnnnnnnnnnnnnnnnnnnnnnnnnnnnnnnnnnnnnnnnnnnnnnnnnnnnnnnnnnnnnnnnnnnnnnnnnnnnnnnnnnnnnnnnnnnnnnnnnnnnnnnnnnnnnnnnnnnnnnnnnnnnnnnnnnnnnnnnnnnnnnnnnnnnnnnnnnnnnnnnnnnnnnnnnnnnnnnnnnnnnnnnnnnnnnnnnnnnnnnnnnnnnnnnnnnnnnnnnnnnnnnnnnnnnnnnnnnnnnnnnnnnnnnnnnnnnnnnnnnnnnnnnnnnnnnnnnnnnnnnnnnnnnnnnnnnnnnnnnnnnnnnnnnnnnnnnnnnnnnnnnnnnnnnnnnnnnnnnnnnnnnnnnnnnnnnnnnnnnnnnnnnnnnnnnnnnnnnnnnnnnnnnnnnnnnnnnnnnnnnnnnnnnnnnnnnnnnnnnnnnnnnnnnnnnnnnnnnnnnnnnnnnnnnnnnnnnnnnnnnnnnnnnnnnnnnnnnnnnnnnnnnnnnnnnnnnnnnnnnnnnnnnnnnnnnnnnnnnnnnnnnnnnnnnnnnnnnnnnnnnnnnnnnnnnnnnnnnnnnnnnnnnnnnnnnnnnnnnnnnnnnnnnnnnnnnnnnnnnnnnnnnnnnnnnnnnnnnnnnnnnnnnnnnnnnnnnnnnnnnnnnnnnnnnnnnnnnnnnnnnnnnnnnnnnnnnnnnnnnnnnnnnnnnnnnnnnnnnnnnnnnnnnnnnnnnnnnnnnnnnnnnnnnnnnnnnnnnnnnnnnnnnnnnnnnnnnnnnnnnnnnnnnnnnnnnnnnnnnnnnnnnnnnnnnnnnnnnnnnnnnnnnnnnnnnnnnnnnnnnnnnnnnnnnnnnnnnnnnnnnnnnnnnnnnnnnnnnnnnnnnnnnnnnnnnnnnnnnnnnnnnnnnnnnnnnnnnnnnnnnnnnnnnnnnnnnnnnnnnnnnnnnnnnnnnnnnnnnnnnnnnnnnnnnnnnnnnnnnnnnnnnnnnnnnnnnnnnnnnnnnnnnnnnnnnnnnnnnnnnnnnnnnnnnnnnnnnnnnnnnnnnnnnnnnnnnnnnnnnnnnnnnnnnnnnnnnnnnnnnnnnnnnnnnnnnnnnnnnnnnnnnnnnnnnnnnnnnnnnnnnnnnnnnnnnnnnnnnnnnnnnnnnnnnnnnnnnnnnnnnnnnnnnnnnnnnnnnnnnnnnnnnnnnnnnnnnnnnnnnnnnnnnnnnnnnnnnnnnnnnnnnnnnnnnnnnnnnnnnnnnnnnnnnnnnnnnnnnnnnnnnnnnnnnnnnnnnnnnnnnnnnnnnnnnnnnnnnnnnnnnnnnnnnnnnnnnnnnnnnnnnnnnnnnnnnnnnnnnnnnnnnnnnnnnnnnnnnnnnnnnnnnnnnnnnnnnnnnnnnnnnnnnnnnnnnnnnnnnnnnnnnnnnnnnnnnnnnnnnnnnnnnnnnnnnnnnnnnnnnnnnnnnnnnnnnnnnnnnnnnnnnnnnnnnnnnnnnnnnnnnnnnnnnnnnnnnnnnnnnnnnnnnnnnnnnnnnnnnnnnnnnnnnnnnnnnnnnnnnnnnnnnnnnnnnnnnnnnnnnnnnnnnnnnnnnnnnnnnnnnnnnnnnnnnnnnnnnnnnnnnnnnnnnnnnnnnnnnnnnnnnnnnnnnnnnnnnnnnnnnnnnnnnnnnnnnnnnnnnnnnnnnnnnnnnnnnnnnnnnnnnnnnnnnnnnnnnnnnnnnnnnnnnnnnnnnnnnnnnnnnnnnnnnnnnnnnnnnnnnnnnnnnnnnnnnnnnnnnnnnnnnnnnnnnnnnnnnnnnnnnnnnnnnnnnnnnnnnnnnnnnnnnnnnnnnnnnnnnnnnnnnnnnnnnnnnnnnnnnnnnnnnnnnnnnnnnnnnnnnnnnnnnnnnnnnnnnnnnnnnnnnnnnnnnnnnnnnnnnnnnnnnnnnnnnnnnnnnnnnnnnnnnnnnnnnnnnnnnnnnnnnnnnnnnnnnnnnnnnnnnnnnnnnnnnnnnnnnnnnnnnnnnnnnnnnnnnnnnnnnnnnnnnnnnnnnnnnnnnnnnnnnnnnnnnnnnnnnnnnnnnnnnnnnnnnnnnnnnnnnnnnnnnnnnnnnnnnnnnnnnnnnnnnnnnnnnnnnnnnnnnnnnnnnnnnnnnnnnnnnnnnnnnnnnnnnnnnnnnnnnnnnnnnnnnnnnnnnnnnnnnnnnnnnnnnnnnnnnnnnnnnnnnnnnnnnnnnnnnnnnnnnnnnnnnnnnnnnnnnnnnnnnnnnnnnnnnnnnnnnnnnnnnnnnnnnnnnnnnnnnnnnnnnnnnnnnnnnnnnnnnnnnnnnnnnnnnnnnnnnnnnnnnnnnnnnnnnnnnnnnnnnnnnnnnnnnnnnnnnnnnnnnnnnnnnnnnnnnnnnnnnnnnnnnnnnnnnnnnnnnnnnnnnnnnnnnnnnnnnnnnnnnnnnnnnnnnnnnnnnnnnnnnnnnnnnnnnnnnnnnnnnnnnnnnnnnnnnnnnnnnnnnnnnnnnnnnnnnnnnnnnnnnnnnnnnnnnnnnnnnnnnnnnnnnnnnnnnnnnnnnnnnnnnnnnnnnnnnnnnnnnnnnnnnnnnnnnnnnnnnnnnnnnnnnnnnnnnnnnnnnnnnnnnnnnnnnnnnnnnnnnnnnnnnnnnnnnnnnnnnnnnnnnnnnnnnnnnnnnnnnnnnnnnnnnnnnnnnnnnnnnnnnnnnnnnnnnnnnnnnnnnnnnnnnnnnnnnnnnnnnnnnnnnnnnnnnnnnnnnnnnnnnnnnnnnnnnnnnnnnnnnnnnnnnnnnnnnnnnnnnnnnnnnnnnnnnnnnnnnnnnnnnnnnnnnnnnnnnnnnnnnnnnnnnnnnnnnnnnnnnnnnnnnnnnnnnnnnnnnnnnnnnnnnnnnnnnnnnnnnnnnnnnnnnnnnnnnnnnnnnnnnnnnnnnnnnnnnnnnnnnnnnnnnnnnnnnnnnnnnnnnnnnnnnnnnnnnnnnnnnnnnnnnnnnnnnnnnnnnnnnnnnnnnnnnnnnnnnnnnnnnnnnnnnnnnnnnnnnnnnnnnnnnnnnnnnnnnnnnnnnnnnnnnnnnnnnnnnnnnnnnnnnnnnnnnnnnnnnnnnnnnnnnnnnnnnnnnnnnnnnnnnnnnnnnnnnnnnnnnnnnnnnnnnnnnnnnnnnnnnnnnnnnnnnnnnnnnnnnnnnnnnnnnnnnnnnnnnnnnnnnnnnnnnnnnnnnnnnnnnnnnnnnnnnnnnnnnnnnnnnnnnnnnnnnnnnnnnnnnnnnnnnnnnnnnnnnnnnnnnnnnnnnnnnnnnnnnnnnnnnnnnnnnnnnnnnnnnnnnnnnnnnnnnnnnnnnnnnnnnnnnnnnnnnnnnnnnnnnnnnnnnnnnnnnnnnnnnnnnnnnnnnnnnnnnnnnnnnnnnnnnnnnnnnnnnnnnnnnnnnnnnnnnnnnnnnnnnnnnnnnnnnnnnnnnnnnnnnnnnnnnnnnnnnnnnnnnnnnnnnnnnnnnnnnnnnnnnnnnnnnnnnnnnnnnnnnnnnnnnnnnnnnnnnnnnnnnnnnnnnnnnnnnnnnnnnnnnnnnnnnnnnnnnnnnnnnnnnnnnnnnnnnnnnnnnnnnnnnnnnnnnnnnnnnnnnnnnnnnnnnnnnnnnnnnnnnnnnnnnnnnnnnnnnnnnnnnnnnnnnnnnnnnnnnnnnnnnnnnnnnnnnnnnnnnnnnnnnnnnnnnnnnnnnnnnnnnnnnnnnnnnnnnnnnnnnnnnnnnnnnnnnnnnnnnnnnnnnnnnnnnnnnnnnnnnnnnnnnnnnnnnnnnnnnnnnnnnnnnnnnnnnnnnnnnnnnnnnnnnnnnnnnnnnnnnnnnnnnnnnnnnnnnnnnnnnnnnnnnnnnnnnnnnnnnnnnnnnnnnnnnnnnnnnnnnnnnnnnnnnnnnnnnnnnnnnnnnnnnnnnnnnnnnnnnnnnnnnnnnnnnnnnnnnnnnnnnnnnnnnnnnnnnnnnnnnnnnnnnnnnnnnnnnnnnnnnnnnnnnnnnnnnnnnnnnnnnnnnnnnnnnnnnnnnnnnnnnnnnnnnnnnnnnnnnnnnnnnnnnnnnnnnnnnnnnnnnnnnnnnnnnnnnnnnnnnnnnnnnnnnnnnnnnnnnnnnnnnnnnnnnnnnnnnnnnnnnnnnnnnnnnnnnnnnnnnnnnnnnnnnnnnnnnnnnnnnnnnnnnnnnnnnnnnnnnnnnnnnnnnnnnnnnnnnnnnnnnnnnnnnnnnnnnnnnnnnnnnnnnnnnnnnnnnnnnnnnnnnnnnagtttccagtttttctgttctgtttttccccatctttgtggttttatctacttttggtctttgatgatggtgatgtacacatgggttttcggtgtagatgtcctttctggttgttagttttccttctaacagacaggaccctcagctgcaggtctgttggaataccctgctgtgtgaggtgtcagtgtgcccctgctggggggtgcctcccagttaggctgctcgggggtcaggggtcagggacccacttgaggaggcagtctgcccgttctcagatctccagctgcgtgctgggagaaccactgctctcttcaaagctgtcagacagggacacttaagtctgcagaggttactgctgtctttttgtttgtctgtgccctgcccccagaggtggagcctacagaggcaggcaggcctccttgagctgtggtgggctccacccagttcgagcttcccggctgctttgtttacctaagcaatcctgggcaatggcgggcgccccttccccagcctcgttgccgccttgcagtttgatctcagactgctgtgctagcaatcagcgcgattccgtgggcgtaggaccctctgagccaggtgtgggatatagtctcgtggtgcgccgtttcttaagccggtctgaaaagcgcaatattcgggtgggagtgacccgattttccaggtgcgtccgtcacccctttctttgactcggaaagggaactccctgaccccttgcgcttcccaggtgaggcaatgcctcgccctgcttcggctcgcgcacggtgcgcacacacactggcctgcgcacactgtctggcactccctagtgagatgaacccggtacctcagatggaaatgcagaaatcacccgtcttctgcgtcgctcacgctgggagctgtagaccggagctgttcaccagagctgttcctattcggccatcttggctcctcctccctctctagatactagttctttgtgagatagtggtttgctgtttttttttccactttgcaacttgtcatctcatcctcttaacatgggcttttgcatagcaaaagtttttaattttgataaaattaaaatcatggtttttcttttatggattttgcttttggtgtcacatctaagaactttttgcccagccctgaagattttctcctgttttttcctaaaagttttagagttttatattttacatttttttgcacaaggtgtgaggtttagattgaggttttgtttgtttgtttgtttgcctgcagatatccaattgttccagtattatttgtttaaagcgttttttttgttttttgtttttttgttttttttttagacagggtcacactctgtcaccccaggctagagtgcaatgcctcaatcacagctcactgcggtctcaacctcctggattcaggtgaccttccaccttagcctctgaagtagctgggactgtattagctgagaccaccacccctggctaatttttgtatttttttatagagatagcgttttgccatattgcccaggctggtctcgaactcctgagctcaagtgattcacctgcctcagcctcccaaagttctgggattacaggtgtgagttgccatgccaggcctaaaagcctattggattttaggattacttttgtctggaattgtcaaaaagcagttgagcacatttgtgtggatttatttctggaatctctattctgtttcattgatcttgggtctattcctttgccaatacaatatagttttaattaccataagtcctggaattgggtagattgattcctctcactttataattaaaatggttttagttattctagtttccttccttccttccttccttccttccttccttccttccttccttccttcctttttttgagatggagtctcgctctgtcatccaggctggagtgcagtggtgcaatttcagctcactgcaacctccgcctcccaggttcaagcgattctcctgcctcagcctccccagtagctgggactacaggcgtgtgccaccacaccaggctaattttttgtatttttagtagagatggggtttcaccgtgttagccaggatggtctcgatctcctgacctcgtgatccgcccggctcggcctcccaaagtgctgggattacaggcatgagacgctgtgcctggccttattttctattttctttatttcacgtggggtaaatgtgaaatattgttactgtatataatgtatagtgataaattcagggtacttaggagagtcatcacctgagtacaacacatttttgttgactatagataaccctagtctgctatcaggtattgaatttattccttctaactatatgttttgttttgtttttttgagacggagtctcactctgttgcccaggctggagtgcaatggcgccatctgggctcactgcaacctctgcctcccaggttcaggtgattctcccgcctcagcctcccaagtagctgggactatgggcatgtgccaccacacccggctaatttttgtatttttagtagagatgggatttcaccatgttggccaggctggtcttgaactcctgacctcaagtgatctgcccaccttggcctcccaaagtgctgggattacaggtgtgagccaccgcgcccggccacttctatctaactgtatgtttttaccatttaacctacgtctcttcatcctcccactcccaccccactcactcttcccagtttctgttatctgtcttttcgctctctacctctgtatgataaaatcgtttagctcccacatgtaagtgagaacatatgatatttgtttttttgtttctggcttatttcacttaagatacagttcaattcacattgctgccaatgacatgattcctttctttttatgactgaataaatagtattccattgtgtatatgtaccacattttctttatccattcatccactgatggacacttaggttgatttcatatctttgctattgtgagtaatggtgcaataaacatgaaaagggaggtttccctttgacatattgatttattttcctttgggtagatacccagtagtggggtggctggatggaatggtaattctgtttttagttttttgagaaatctccatactgttttccatagtggctgtactagtttacattcccaccaacagtgtgtaagagttcccttttctctgcaccctcatcaacgtttgttattttttgtctttttagtaatagccattctgacctggggtaagatgacatctcattgaggtttcaatttgcatttctctgatggttagtgatattgaacattttttcatatatctgttggccatttgtatatcttcttttgagaaatgtctacttatgtccttagcccacttttggggatttgttttttagtgttgttatttgagttttttgtatattctggatattactctgttgttggatgaatagtttgcaaatattttctcccattcaacggattgtctcttcactcagctgattgtttcctttgctgtgcagaagctttttagtttaatgcagtcccatttgtctctgatttttgcaatagtctcaggaggattgatattaattcttctttgtatgtttggtagaattcagctgtgaatccatctaatcctgggcttttctttgttgggagacttattattgattcaatcttgctactcattatccatcgttaaggttttctttttcttcctgattcaatcttggtaggttgtttgtgtccaggaatgatccatttcttctaggttttccagtttgtcagcttatagttgttcataacagtctctgatgattttatgtggtatcagttgtgacatcttctttttaatttctgatattctttatttgggtttcctctcttcttggttagtctagctagtggttttaagattaactttgttaatctttttgaagaaaaatttttttttttcattttcttgatgtattttttttagtctctattccattaaattctgctctgatctttattatttccttttttctcctaattttgggtttgctttgttcttgcttttccagttccttgagatgcattgttagattgttaatttttaatctttctactttttcaatgtaagcatttattgatataaatgtccctcttattactgcttttgatatatcccacagattttgctatgttgtgttcgatttttatttgtttcaagaaatttgaaaatttccatgttagtttctttgttgacccaatggtcattcaagatcatgttgtttaatttccatgtacttaaactggactttacaccagtttaagtttttcttggtgttggtttctagttttattccattgtgctctgagaagatgcttgataggattttgatttttaaaaatttgttggctgggcgcagtgtctcacgcctgtaatcccagcactttgggagaccaagatgggtggatcacaaggccaggagatagagaccatcctggctaacagggtgaaaccctgtctctactaaaaatacaaaaaaaaaaaaaaaattatccgggcatggtggcgcatgcctgtaatcccagctactcaggaggccgaggcaggagaattgcttgtacccaggaggcggaggttgcagtgaatctcaaaaaaaaaaaattgttgacactcgttttgtgacctaacatatggtttattctggagaatattccatgggctgatgaaaagaatatatattctgcagttgttggatataatgttctgtaaatatctgttaggtccatttggtctaaagtccagtttaagtacaatgtttctttgttgattttctgtccagatgatctgtctaatgctgagagtggggtgttaaagtcccccatccccagtcattatattgtagtctttctctttagatctagtagtatttgctttaagactctgggtgctccagtatggggtgcatatatatttagaattgttataacttcttgctgcattgatccatttatcactatatagtaaccttctttgtctttttttaattgcttttgacttgaagtctatcttatttgatataagtatagctactgctccttgcttttggttttcatttgtgtggagaatatttttccatcccttttagtccatatatgtctttactggtaaggtgaatttcgtgtaagcagcatatagtcggaactttttttttatttattcagccattttatatcttttaaatggagaatttaatccacttatattcaaggttattaatatgtgaggttttttcctgtcatattgttaattttttttctgtttgttttacatattatttagtgttttctttttctcctattgttcattgtgttttagtggatttctgtagtggtaccatttgagtcctttctcttcctcctttgtgtgactgctttacctatgagttttatactttcatgtgatttcataatggtaaatgttattatttcaatttcaggtttaggactcccttgaacatttcttgtatgtctggtctagtgataacaaattccctcaatattcgtttgtctgttaaagactatttcactttgatttatgaaggatgattttgccagatgtaatagtcttggctagcaggtttttctttttttcctttcagcactttaaatatatcattccattctcttctggcctatgcgatttctgctgagaaatccactgatggggtttccatcagactagatgctttttttctagctgtttttagggtttgctctttatctttgacttcagacagtctaactataatgaccattttacattgtatctctctggacatcatgagcctcctgtaactagatgtctaaatatcttgctagacataggatgttttaacatattatttggttaaataggctttttagtccttctgttctttctttccccttagggatactgataatacataaattcaattgctttgtgttatctcaaatgtcacgaagcttttgctcattctttttaaaaacttttgactggattatttcaaaagacctgtcttcaagttctgagattctttctcctgctcgatctagtctattgttgaagctttcaaatgtattttgtatttctttcaatgagtgttcagtttcagaatttctattggttcttttaaaaaatatctatctctttggaaatttctcatttatattctgaattgtttttctgatttctttttattgtttttccaaattctcttgtatcccactgagcttctttaatatcagtgtgtttaataattccttctctgggatttcaaaaatttctttttgattaaggtctattgctggagaattgtgttcctttggagatgtcatatgtccttgccttttcatgtttcttgtgttcttatgttgatatctgcacatctggtataacagtttcttcttcccatttttgaatttacttccataggggaggatgttttcctgaagatgtatctgtggtgttcattggctacagcatttggcatttatttatttatttttatttttatttatttttttgaaatggagtctcgctctcttgccaggctgaagtgcagtggtgcaatcttggctcactgcaacctctgccttccgggttcaagcaattctcctgcctcagcctcccgagtagctgggactacaggcacacaccaccatgcccagctaatttttgtatttttagtagagatggggtttcaccatgttagccaggatggtcttgatctcttgacctcatgatccacctgcctctgcctcccaaagtgctgggattacaggcatgagccgctgcacctggcccatttttgcttttattctgggtactttggctgcagcgttagtagtatatgtgatttcatcagtgggttagggtacagttattggagtctgtggtgaagttgtgctgtgggatgccagatgggctggtctacaggccccaattgtggcagtggtggtctgagtatgcctgtccgtgtttcccagggttatgtatgcgggcactggtgttggtggttaccagaatgctgatcattgggcctccacatggcttgcttggatgctggcagtggtagtggtggactgggcaaggaggtgggttcttggggccctggacagctagcatggcacaagtgatggcagtagcagtggcaggataattatctgggttccgagagttgtccttttatgatggcagtgggtgtgacaggctgtgtaggacagtctccaggactgcaggtggtacttgcaagtaggtgccagttgaggtgatggcagctgagagtttaggcccaacctcaggaccccagaaggagtactcaggtgcccaaggtgcccttgtcaccctccaaggccctggcctatgtgctgtgtctcagagaagggagtgaagctgggttgggtgggcttgtgctcaggcccttcaatggtgggagcaggcagcagtcatggtgggtaggggtcagggcaatcctcaggtctcaggtggaatgcatgggtgaggagtggtagtagccatgctgaggtcctcccactggagaaggtggggctgacctctgtggctacagcctgggccagtaggtggggaatatgcacctgtctcatgcttcacagccctggcggggcttaccccccagccctggcagcagccagccacacctagcttgagcccttaccttgctgcaggagtccccaccagcttgtgactaagtcccagtggcaacttgtgcctgttttcctcccagtctcagccccggcagcactcacttcccagcattgtcagctgcagcccatgcctcatttgattctcagtctcagctgtgggagctcattcccagtttgtgccccagtctcagcagcaatagcctgagtttccctaatgcttcagtcttggtgctgctggccaccaggatagcatgtgcatctgccaaagactaggatttaaaatggtgccttgctgtaactgtttgggtctcagaaaaagtgtgggacacagcatgagttcccttcctgggacaattttgtcccccagtctactggcagctccctatgtatgttttcagggcttaggagggttgaggaattctctcacggtcaggactacatgattccatggtgggaatgagggccaccagaagtctctcacttactctgcccacattgagaagtcactcttggctgccagctgatcctagccaagcaggctgcctctcctcctccttccttgcttttggtgtttcctgtaacttttctgttgagttccagtgttttcttttggataatgtattcaaagtgtgactgtatatacatgatttcggttcttctaagtggaggaggtaagcatgaaatgcttctggtcagccatcttgaagcccctccccctccttttatgtattatagttcctttgacttttcttataaaatttaggaaaaacttatctatattaacaaaaagcttgctgaactattgataggaattgcattaaacctatatacaatttgggggagaattggcatcttaactgttgaatcttctaatgcatgaacacagtatgtctctccatttatttaaatcttctttgatttcatttagcattgtggagttttccctgagtatattttgtcagatttacacctatttttttagtgattataattttaatttctgtgtatgtgtttgttgctggtatatagaaatataatttttttttgagatggagtcttgctctgttgcccaggctggagtgcggtggtgcaatctcaactcactgcaacctccacctcctgggttcaagcgattctcctgcctcagcctcctgaatagccaagattacaggcacgcactaccacgcccagctaatttttctatttttagtagagatggggttttgccatgttggccaggctggcctcgaactcctgagctcaggcgatctgcctgccttggtctcccagagtgctgggtttacaggcgtgagccaccaggcctggcctggttttagatttttttttaagattctgtgggacttttctacatgtgggagagcatatcatgtcatttgcatatagggcaagttttactacttcttttataatctatatttcttttacttattttgcttgccttattacagtggctagaactttcagtagtatgttgaataagagtggtaagagtggacattcttgcctattcctgatcttggagaggaagcattcagtccttcaccattaagtaagatgttagctgtaggttttttgtagatggtctttatcaagttgtggtaactccctgcctgctcttaacttgaagagagtttttggttctgtcttgtttttttttttttttttgagatggagtcttgctctgtcacccaggctagagtgcaatggcttgatcttggctcactgcaacctccgtctcccaggttcaagcaagtctcctgcctcagcctcccaagtagctgggattacaggtgagtgccaccacacccagctaatttttctatttttagtagagactgggtttcaccatgttggtcaggctggtctcgaactcctgacctcagctgatccgcctgcctcggcctcccaaagtgctgggattatggtgtgagccaccgcacctggcctgttttgtcttgtttttcataatgaatggatgtgggttttgtaaatcctttttctgtgtcaattgatatgatttatgattttattctttagtttatcgacatggtaaattacattaactgattttcaaatgttgaaccagccctgcatacctagaacaaatcccacttggttatggtatatagttctttttgtacattactgaatttggattgctatattttgttgaagatttttgtctaagttcatgagatatatttttatgtagtttatgtatatattttcctcatctgattttggtatcatggtaatactggcctcataaagtaagctggaaactgttctttcctattctatgttttagaggaaattgcattttgttgatgttgtcatctttaaatgtttggtagaattttccattaaaaccatctgtgcctggagatttcatttttgagagctttaaagttatataattaaattacattaattaataaattgatttgttgacataatttaattatgtaattaaattagttatataaaatgtagctttgtatttatataggtttatattccccaaatagctggctagagaatttttttaaaactttaccagaggaaggtgtcagaggggaccattccttgtcctcctgtaccactctaccccttttcctttccatcccttgggtgatttcaagcttaggggtgggtgggggtcaggaagactgccttgtgggtgctccaggtgtttccccacagaacagaccatggatgctgagggtgagatggaggtgcatcactagggccctacattagagaaagggcagggaaaccaggtggggtgtccccagcagccttccatccctttgtggtcacagggcttgataacaaacagcaggtgccaatctggagataggcacagagatgaaaagtcccaaatgaggactccagccccacccccactatgctgtagatgctatcactgcactgtaacagcaaagggaggcaggtgttgggcatttaaacaggaacatagcagagagttcagactgtacctttgggtgacatgtgaggatgaagtttttggctttgtgactgcccaaagtccttatgagcaggttcagcttcataggcctctttcattctctacaaatcatagtcccactgtgtgcatactctgggcacactgtgtctgggtacactcggggcatacttgtgtcccagactggctcaggggcctgcagtctttccggggtggactcacagagctggcttggtgtcccacttgaatggactctctccacagcagatctgagcctgtacttcccacctggcaactgatgacccatttggccttgttgagggacatgaaacgattgctttggcatctgaggatggcagtagcaggagagggaggtgatgagaatgttgcagtagtctgcattggttttccatgaatgattaagaggctcacgtttatgcaacttgcttaaagccacatagtaagtggcagagtcactggatcctagccagtctaacagaagagtcataaataatgtgactcagttttctcatttgtacaatggaaaaactaatggtctttacctcccagtatggtcatgagaattcaataagacagtcatgtaacaatccagcacatggtctagatagaacatggtaagtattagataaatattagtcattattattattaatattgatatgtcatttatcaacaaagtcagaattataatggtggtacccaaaatttagtgttaacataagcatgataaaattagagttgtttctggtttataaacatgtgaggctttttttttttgagacagagtctcattctgttgtctaggctggagtgcagtggtgcaatctcagcttactgcaacctccgccagtgaggcccttcattagacactaatttgaagctatggcattcccccactatgagcccacctgtcagccaggctatctgccttgatcctagatgaagtggccattctgcctgcccctcagaacctctctgtactctcaaccaacatgaagcatctcttgatgtggagcccagtgatcgcgcctggagaaacagtgtactattctgtcgaataccaggggtgagttttttcttttaatagttcttctcccttaagcagaagttggttcctgaaggcatagcccttcctcctgagcccaaggtggctttttgagtccagggatagattatccccaaagatctaccccctctgtctgcataggcattgaaagagttgaagaagcaagggaaattgttctgtggatttgacagtgaactctctgggaagatgaatgtgcataacacattttggtggagttattttaaaaagtgaatcaactgtccaatgggtttgactctgacttgagatggataaatcactggagactcagatcctttaagggtggaggagtcctcacttttcctgactataagcttatacctagagccaaaacgaactataatcctaaaggtcagctggccctggggctgagcaggctctagtcttctccaggtgttcaggtgcttgcagctattgaatagtgataaggacacagaaattgctccatatatttcattaacaatgaatacagactgaacacctacatgtgtagacattcttctaggctcagggatacagttgacaaggtttctggattttgagagcttacatctagaggaggatacagatgataaatatactaggccagcattctctagtatggtagccaccagccacagctggctatttaaatttaaattaaattaaattaaattaaattaaattaaattaaattaaaatgtctgtttcctgccacactagtcacattttaggtgttcaatagccacatgtggccagtggttaccatattgaacaacatcgatttagaatatttgcatcatcacagaaagtttatttttggaaagcactgctctagggaattttggatagtaatcagtgctaggaggaagctaaaaggctgatgccatagagagttgacactgaggctcctttatattagatggcctgggatggcctctctgaggaggtgatatttatgccatatctgaaggacaagaggagccagccatgcgaacagcaggggcagagcgtttgagatggagtgaacagttagtcaaaggtcctaaggcaaaaagtgctcagcattttggagaaatgaccaatgtggcaagaatatcacgcttcggagcagagtgagagagaaggccaaagcatcttgtaagaccactggcaagagtttggatcccattctaagtcctgtaggaagccattaaggagagaaacgtcacaatctgctgagtggtgaatggttttgagaatggcaggtgtccaagctgggagatcacagcaaggcaaggaatgacagtggctgagattagggtgatgaccctggagatgaagagataaaagagatccagacacattgatgtttatgcctagctttccctatctggcaataaaaggagtaagggacgatggatggttggtagggaggagagtggaggagctaggataatgagaaagtacttattttacttacctgtacaaagtaggtgaacgaagtcagttacttgcaaccataactgagcctgtgtcagaggggctggtgtaactctgtgccctcctctctttgacagggagtacgagagcctgtacacgagccacatctggatccccagcagctggtgctcactcactgaaggtcctgagtgtgatgtcactgatgacatcacggccactgtgccatacaaccttcgtgtcagggccacattgggctcacagacctcagcctggagcatcctgaagcatccctttaatagaaactcaagtaaggcacttctctccttacactcccaccccaaccagcccctcctttaggaaccatgttcacctaaactttctagactctttttagcatcagaatagtcctgcaaagccagagtattgtgaacacaaacaacccttactggtatatttgaaaaattgccaactgctttctacatgctgctctctgtcatgccctttgactactcaagtcattcctgactgtctgtgtcagggtgtgcaggtgttggggatgctgacattgggaacctggaaggaaagctgctctggaagtgaagaggtggcaccaggactgctgctccctactctgattgtgcctccataaattgtgcctcccacttgaggcctcattaactgcatatttactgcccacgtaagcagctttgttgtgcaagaggatttatacacttaacagagccaccagaaaattgcccttctgtaatgacttctgtgggaaataaataacttttcttttggagtagtacctggaaaaggattgagaaagaagtaatagaggaatccagataggtggccaaatgtggctgagtacaagcactggtcattgtataaaaggacatgtgtgtttgcggaacaggagaggcaagggctgatgggcagggggtagggaagcagttgatcatgtggtgaagggctttgacacgaagcttgaccaagtcagtagagggtagccaatgaaagaggagaggatctagaccaggtctatctctttttttttttgatacggagtctcactctgtcacccaggttggtgtgcagtggcgtgatctcagctcactgcaacctctgtctcctgggttcaagtgattctcctgcctcagcctcctgagtagctgggactacaggcgtgcaccaccatgcctggctaatttttgtatttttagtagagacagggtttcactatgttttccaggctggtctggaactcctgacctcaagtcatctgcccacttcggcctcccaaagtgctgggattacaggcatgagccatggcgcccggccgaccaggtctatcttacaaagcaacactctggctgctgtgtggaaagtgaaccagagtagggcaagcctgcaggacaggggaagagtgaggagggggttgtaatactcctactgatcccaagagtttggaaggggatgggaaggagatgatgaatccaagaaacatggctgatttagaaaggacagagcttaggaatcaagtttgtggggacagaaaagggagagataatgatagtattcagctgtcaaatggaattggtgagaacaccagctaaggcaaataacccagggggaaacaactggtcttgaagaataggagacacccccggctttgagactgagatttctacaagatgtcatcttgtggatgtctgactggcagctggaaatcagtccctgaggcttagaaagctcaaaggcagatacataacacaaagtggttttgtttgtttgtttgttttgtttttgaggtggagtcttgctcttttgcccaggctggagtgcagtggtgccaacacagctcactgcagccttgccctcctgggctcaagcgatcctcctgcctcaggcccccaagaagctgggaatacaggcacatgccaccatgcctgactaatttttttgtatttttggtagagatggggtttcaccatgttgcccaggctggtctcggactcctgagcttaagtgatcctcttgcctcagcctcacgaagtgctgggattataggaatgagccatcgcacagggccatcacaaagttaacagctaaaggcttggaagtagacgagactgtttagggacaagacgctgaagataaagagaggacaaggtcctggaaaacctcagactttaaaatgtggatggagggaagggcaccagggtagaggataatggaaaggagaatagaacagctcctgagaggctggaggaagcccctggatgggcccttgagaaagtaacttcatggagtggaaaggatgaccatctggctgctggagtggaggattgcatggaggtaggaaggagcaaggaatgggtgggaatgtaaccagtttagagctgcaggaaaggcaagataagggtcttctttggtctctgttttcgtgatgtggcagaagagcttctgttgtgaaagatggtggaagaaggtttggggcagaatttgcagcattcggatgagtcaaaatttactgaggaatgtatgatattaggtggaaattaggaaggtttagaagaagaggagcccaagctgaagagcagaggagggaagggatggggcaggaataggaccattggaatgggataccaaaaggaattttggtgcagattgtgggctcctttgcccaggcctccttcccaggcaccaggactggaatggaatggaatggaatgacttcatggaatggagaggatgatcatctggctgaatttggtccaagaggagttggtcgaagtggcaggatctgggggagattaaggggccctgtagggcactgcaaaactgccactacctgcagtgcccaggcagcattcagcaccacctccctctggctcctaagagcatggggatccagccaagaccattgctgggggctggcagctgttgctggaaagcaggcatgggtcacataaagataagggagtgcctacaaaactatgtgggtggggatgtgctgtaaaaccttgtacttacgaaggcctgtataaacaggaaaagagcttgctgcaggggcagctgaggaacaggagtctgtacttgcatcagaagatggaagatacggttctatgatatccaagcaaataggctgggatggcgtcatgatctcttaagggcattaagtttgtcctcttccatttgaaaaaggccactcagacttctccccaggaatgtgaaaaatcttgatttaaggctctcctgaaaaggatccctactgtctctctctctctctttttttttttttttttgagatggagttccgctcttgttgcccaggctggagtgtaatggcatgatcttagctcactgcaacctccacctcctgggttctagcgtttctcctgcctcagcctcccaagtagctgggattacaggaatgtgccaccatgcttggctaattttgtatttttagtagagacagtgtttcactatgttggccaggctggtctcgaactcctgacctcaggtgatccgcccacctcagcctcccaaaatgctgggattacaggtgtgagccgctacgcctggctgagggtccccactcttaaagggaaactttttattgagagcagaggtttttaactttgcacatttgagtcacaggggagctttagaatcaattatgcctggggctcttccccagagagtctggtttaaatgatctgcatgcatcttattcactgggagtttaaaattctccccagattattttcatgtacagccagggttgagatccactagcaaagaggctaaacaccccacacaagggaggtagaaatgtagaaagaaatgggctcaaattctgtagattaactctgtgactctgggcatgtcacttaatctctctgtaaaacaggaacaatgttaggctgggcatggtggctcatgcctgtaatcccagcactttgggaggccaaagccagtggatcacgaggtcaggagatcaagaccatcctggctaacacagtgaaaccccgtcgcctgtagtcccagctactccggaggctgaggcaggagaatggtgtgaacctgggaggcggagcttgcagtgagccaagatcgggccactgcactccagcctgggcgacagagcgagactccatctcaaataaataaataaataaataaataaataaataaataaataaataaaaataaaacaggaacaatgtttaccttctaaagcttcctgggcagattaaatgagataagcatgcagaaggcataggacagaggttcctgccccaacgctgtcaaacaactcttctctgaactgaaacttcagattattttctctaattctggtctcaataaagatggagatcagaagacccaattctgatgacatctgacagaaaagttgaggagtcaaatatctgtttcccttctgaaggtgtttcagaggtagtgctagtggtgctatgtggtcatatgaacctcaggactgagtgtgttttgcacagttggccctggcttcccaagtcctcctgacccctgtccaggtagctcttcaacaagcaggcataaacacttctctgatgagggacgcgatggggaaaggctttgttctctgaaaactccctgtaggaactgcctttcttctgagtgtccacttgtgtccggaattggtgggttcttgatctcactgacttcaagaatgaagccgcagaccctcgcggtgagtgttacagctcttaaggtggcgcgtctggagtctgtcccttctgatgttcggatgtgttcagagtttcttccttctggtgggttcctagtctcgctggctcaggagtgaagctgcagatcttcacggtgagtgttacagctcttaaggcggcgcgtctggagttgttcgttcctcctggtgggctcgtggtctcgctggcttcaggagtgaagctgcagaccttcgcggtgagtgttacagctcataaaagcagtgtggacccaaagagtgagcagtagcaagatttattgcaaagagcgaaagaacaaagcttccacagtgtggaaggggacccgagcgggttgccactgctggctcgggcagcctgcttttattctcttatctggccccacccacgtcctgctgattggtagagcccagtggtctgttttgacagggcgctgattcgtgcgtttacaatccctgagctagacacaaaggttctccacgtccccaccagattagttagatacagagtatagacacaaaggttctccaaggccccaccagagtagctagatacagagtgtcgattggtgcactcacaaaccctgagctagtagacacagggtgctgattggtgtgtttacaaacttgagctagagacagagtgcccattggtgtatttacaatccctgagctagacataaagattctccaaggccccaccagactcaggaggccagctggcttcacccagtggatcccgcaccagggctgccggtggagctgcgtgccagtcctgcgccctgcgtccgcactcctcagcccttgggtggtcgatgggactgggcgccgtggagcagggggtggcgctcatcggggaggctcgggccgcacaggagcccatggagggggtgggaggctcaggcatggcgggctgcaggtcccgagccacgccccacgggaaggcagctaaggcccggtgagaaatctagcacggcgccggtgggctggcactgctggaggacccagtacaccctccgcagccgctggcccgggtgctaagcccctcattgccggggccggcagggccggccggctgctccgagtgcggggcccaccaagcccacgcccacccggaactccagctggcccgcaagcgccgcgtgcagccccggttccagctcgcgcctctccctccacacctccctgcaagctgagggagccggctccagtcttggccagcccagaaaggggctcccgcagtgcagcggtgggctgaagggctcctcaagtgcggccaaagtgggagcccaggcagaggacgcgcccagagtgagcgagggctgtgaggactgccagcatgctgtcacctctcacactgaccccagggaaggcagatttagcccagaacatgccccacccctttccaatccaagaccagtgatcagggtggcccttctggtcctgcagtatctgggtctgaaaggcaagtataactccatcaccagtaaccagggtgtagagactatctgtgtgggcccttctgttcttggtctgctgatgggaaggtatccacaagggctgtgggcctctctgctggggaccttgcaatatggaagatgatgtttgtacttatgctgtaatttctagagttgattattggaatctgtaaaaagcctgtgggctgggcacattggctcactcctgtaatcccagcactttgggagctcgaggtgggcgaactgcttgagtctaggaattagagaccagcctgggcaatgtggtgaagtcccatctctacaaaaaatacaaaaaacattagctgagtgcggtgatgtgtgcctgtagttccagctacttgggaggctaaggtgggaggattacctgagactgagagttcgaggctgcagtgagccatgatagtgccactatacactccagcttgggtgacagagtgagaccctgtctgaaaaaaaaagaaacaagaaaaaaaaaagccggtgacttgccagctgagaactgggctgagaatagaatggccaaccctattcacaggctgctcatctgctgatatgtgaaagttatcagtagccagtacatgccacagatctgtgtgagctgtgggaatgcacatggccctgccaggtatgctcattcctaaggggcaaagactggggctggctgttcagtatagacctgagctcacataggcatttggcaagcattaaaatatagcatctgctcacttagatgagccaaagtgaggagcaatttctgctgaaaaagtggtgacaggaggggcatggatcataaaattttaaaagagcaagagataatgtttactggagtttttaatcacttttcttgtgtatatgtgcctcctggagaaggaacagtggactttattaaaggattaaaaaagaagagaattatagcatttgtcatttgtttcttcatttattcatcactcaaaaagcatttactgagcacctgctgcatacaggagagtatttgtgtacatgtttccatgagcttgaagctacagcagactcccttcctctcctacggagacggacatatttccatacatgacccggtcattgtgttccagggaaatcaaccctgtctggggctggctttgactctcctgttgtcttgccaacagccatccttacccgacctgggatggagatcaccaaagatggcttccacctggttattgagctggaggacctggggccccagtttgagttccttgtggcctactggaggagggagcctggtgccgaggtgagactccagccttggcctttgggtcaggcttcgggaaagaaggcacagatttctgagggtgagcaagggaaggctgcccctgctcactgggtgacctggggatgagcagtcctgggtgaagtgtgcaaaagatgagtatgctgaccaccccatcagcctcttctccaaagaacttccttggtccattcaatcatgccttggctgggagcatttccaggccagatctgctgaagtatggggctgcccccttaccctaaactctaacatagttggaccacaatatcttttcaatgccttttttctccctcatcagctcatctcctcagccacttaggggcagcaatcaggatttgtagatcaacaggatgatttcaaaagcacacaacgctggtacaaacctcctgagggtgtgtgtcttggcagggtgaagaggtagaggcagggatccaggagttggcttatgagtaaacccatctaactatgagcaggtgggccatgcagaatgctcaggtggggtgctgccctccccatgggaagggtgctacagcctgggatgggtgggaggccagccctcacagagggaatagccagacaagcagcagcagtatgaggagtggagcacgatcaggaactaggggacactcagacctgtggagcctctgtccaagcatatgatgacaaagcttagaggcccactccaggcagcacaagcaaagataggctttatcacaaggactaatacggtgcaataaggagctctcacagatctataaacagctggcagagggccaggctccagcctcacttacccagggcccttgctcccctctggtgggtccctgctcttgcacactttctatggccctttcctagcttattccaggctgtgatccctcatcaatgcttcctactcatgcctatgatgtgcccccagcctctcgaggcctctcaggcctgacttctcctcactgtgtcctctctcctttgtccctgcttctagctctcggtattcagtttcccaagaccaaatcctcagaagaagaatccaattggtcttgctcgtcttatcaggccaagcttcaggggttgctggtagccagctcgcctctgattggacccttctcaggccaagggtacccttgatcttatagcagtatctggactaagagcacatgcctcaccacccattcaaagagggctgtaggttgggtagcttcccatgaaaggtggtgtgggcaggtacaacactgggtttcggtatttacccctgctaggcaagagcccacggtaggatatggcattgccagccaggcagatggagtagtgttggggacagggcagagcctgtgcaggaggaagcatgcagctccctcagattcgctgggatggagcccactacccacctttggtaactggcagggccagggctaagaggggagcatgtaccctgagtcatctaggcttggtccaggcaagcctccacaggatcagatgcagagcacagcctcagggaagggcatggaggtggaagggtgaacagacggatggacagatgggtggatgagtgaggaggtgctgcccgtggctccactgcacactgattccttggcagcagtggccatgccaagcccctgctcaagtcagggtctctgcacaaatgttaccctatcagagaagccttctctaaccactctgtttaagatggtgcctcctcgttaccatctctttgctctgctttttccttcacagtccttgtcaccacctgatgtgtatttttttatagtctgtttcaccccatgtaagccccatgagagcaaggactttgtccattttgttcaatgctaggtccctgtgcttagagcagtgcctagcacatagtaggtacttaataaatatgattgaatgaatgagtgcctgaatgaatgtatgtgtgagagggaacattctgtgtgcatctggaaaggaagtatctgcaactttccttccctggcactttttgccctttccagtcctgctgccttctgggaataactgctttctttttatcttttattttttgagacagagtctcgctctgtcgcccaagctggagtgcagtggcacgatctcggatcactgcaacttctgcctcctgggttcaagtgattctcctgcctcagcctcctgagtagctgggattacaggcacccaccaccatgcctggctaattttttatttgtagtagagatggggtgtttcaccatgttggtcaggctggtcttgaactcctgacctcaggtgatccgcccgcctcaggctcccaaagtgctgggattataggcgtgagccaccgcacttggccaataactgtgttttctggtctgtcaaaggaacatgtcaaaatggtgaggagtgggggtattccagtgcacctagaaaccatggagccaggggctgcatactgtgtgaaggcccagacattcgtgaaggccattgggaggtacagcgccttcagccagacagaatgtgtggaggtgcaaggtaaggatggcttctctgtccctggagccctgcacaggtgatagcccctcctggcatatctcagaggcctgctgggttcctttggttctgagtttttccttgatttcactgacctccctcatggactgggtgggttcccatagtgaaattatgtttgtgaatctgattcccctagaggcaggagtccaccctggggctgggtggggttacgagcagctgtctgaaacactttcccccttaaagcttcctaggcctgggggccaggtgttgcaagactggtttaccagatggttactgcctgtgaatcagagtgggctgcaggagaggcagccacaggcttcagagggtcagaccttggaaggaggtgctacgttgtataacaccacagccttcttcatctggaagggaccttatggaaagcctagagaatcctcttgtttgaattactcttttcccttgaatattttaaggtcagaaaacctacaatgtttaaaaaccctttgaaaagaagcaaaaccaaacaagagcctacatcccatgatctgtcactcaaacatcactagttacatttttgtgtatagccttttagtctttaaaaatagaactatttttttaaaaagacgaattattatcttaattatatagtatatttatttatttatttttctttctaaaaaaatttattttgtttcatatgtagagacaaggtcttgctctgttgcctgggccttggcctccaaagagctgagattacaggtgtgagccaccatgctcagctcatttagggcatcatccttcagtcattgccatgtgtaggcacatgctgtagtcctataacatacacattttgtgcctgctttttcacaaatatcatatccataacatttttcatgcagatttcctgattactattttatgctactttataaaatcatacaagtcaagcttgcttaacaatccaaacaacaccaaagcatataaagtaagaggagggccaggcatggtggctcacacctgtaatcccggcactttgggaggctgaggcagaaggattgcttgagcccaggagttcaacaccagcctgggcaacatagcgagacctcgtctcattttaataaataaataaagaggtgagtgtgccccattctcctgcacatcactcaggaggtttccgttggtgagtctggcgtttaatcttccaggcgttgtctgtgtggtaccaatgctcacacacatagatgggatgatattgtacctactactctgtacttggcttgtcttcactcagtagtatattgtgaacatcttttcatgtcaatacatatggatctacctcattcttttttattatactttaagttctagggtacatgtgcacaaagtgcaggtttgttacatatgtatacatgtgccatgttggtttcctgcacccattaactcgtcatttacattaggtatatctcctaatgctatccctcccccaacccccaccccatgaccggccccagtgtgttatgttccccgctgtttgtccaagtgttctcattgttcagttcccacctatgagtgagaacatgcagtgtatggttttctgttctcgcgatagtttgctcagaatgatggttctccctcatttttaaagagccaggtgtggtggctcatgcctgtaatcctggcactttgggaggccgagacaggtggatcacctgaggtcagaaatttgagaccagcctgaccattgtgatgaaaccctgtctctactaaaaatacaaaaattagccaggcatggtggtgcacgtctgtaatcccagctactggaaaggctgaggcatgaaaatcgcttgaacccaggaggcagaggttgcagtgagccgagattgcgccactgcactccagcctgggtgacagagcaagactgtctcaaaaaaaaaaaaaatctatatgtcaatatatgtaaatgaaaggctgttgctctagttcagatgttgctaagaactgacttatgtatatagttgtttccttccttggaattagtttttggaattaaaatttcaggagttggggagaagtgaggatatgggcacgaaaaaaacagaaagaatgaataagacctactatttgatagcacaataggatgactatagtcaacaataacctaattgtatattttaacataacttaaagagtgtaattggattgtttgtaactcaaatgataaatgtttgaggggatggctacctattctccatgatgtgcttatttcacattgcatgcctgtatcaaaacatctcatgtaccccataaatatatacacctactatatacctacaaaaattaaaaataaaaaattgcaggagtggatgaaagggtatgaacactggtgtatctcttgatgcataccaccaaaatattttccaaaatcatggaaacaatgtacagtgcccccagccacaagtccaccagcttctccagtctcattgactgggctacccttcacattgcaggtgagtagcctggcccagagaggctaatggagttgctcaaggttacatagaactgagagatgggaaaataacctgtcccctcttctgcatctccagatgctcagatcgggccttttctgctacaattatttggtagaatgactgtgagctttggagccagtcctacctgggtaacctggggtagctcacttaaccattctgagcatagattcctcttctataaaagcagggatactcacactcattgtgaagaacaagcaactacacgtccagcccccagcatagttctggaaggcagtagtagccctagcctacaaaataggggcttgatatattgtagttattttctgactgttttctgaacaatttcctccataacatgaatcaatgccaagagtgaattgtgaaacacactttgttttcagttaccgcccagccccattctgtgctgttctctttcaatacctccccctcatcctgcccagggcttggcactctgccttcctcctggcagtggtgccaaggtacgtgctaacacagcaattggcttaacacatgatactcctcccttttgtgtcacaaggaaaagattttaatcttccctggggctttctggaaaccatgccttcatctggattctagaaaaatgcttttaatggtggtaattttggtcactagggcacacatcaaatctcaggattctgttatctgccgtcttagccaatgtgcagagtcaactccaggaaaccgggggaggctcaggattgaagttttaatctttgctgctgttttctaagcctgtttttatcttttgtttccaggagaggccattcccctggtactggccctgtttgcctttgttggcttcatgctgatccttgtggtcgtgccactgttcgtctggaaaatgggccggctgctccagtactcctgttgccccgtggtggtcctcccagacaccttggtaatagagtagttctttattcctttcagtataacactgaccagatgtagtttgggccttagctgggcatgggcacatgtttccatgtttctatcatgagattataggcatctgcacagagaggggagaggaatacttataaaatacttcatttctaactagaggtactggaagaaatctcccttctccagggcgtggtgaccttcctgaggcaagccacttctgctttctcccaggacctgggatggcaaagagagaagatgtgttgcccagcccaggatgctcagcattgcaggagtcactcatggtcttaccctcccagactggcctgctgagcattcttggcctcttcccacaattgtaacagcagctacacccaataacatgttccaacccaacttattcaattcacatgccaaaagcctcattgttctcagagtgaagaagatgtacatgggaggcatggactgtgttttgattttggtggggtagggtggggtgaagggacagcaacctggaccttgatagtgactgcctgagttaggggaccctacctgtattctcagatcctcatgaggtcagaattcttatcttactcctgagggccctggaccacaggtctgggtctctccagtgggtataggacccatgcacccatgcaatcgtaggggaaacacaaaagcaggcctccaacagctcccccatgttctctggctgcctctccagatgtttcccgccaacccccagacctcaaccacacaaagcagtgcaataaaacaaaacaaaacaaaaacaacaaaaacaaaatcaaaaagccccatccctgtcaccctagggaattctcacagttctctcctgggaagagggagccagtgtcagcttctgaaaagcaactaaagccagaactacctgcaacttatacatgcccatagctccttatcagcctggagtcactctttctgaaaggagtcatccttgtgacatccctgtggccctgctttctctccctaaacaggaggaataattcttactataattcagtcttcaggacacccctccactctgttattctaatgccagatctcccttctttcccatacttccaggtagtcataacgatgttagctgatactagtacagagctaagtgccagatactgttctaaggctttatatttattgactcatttcttttcataaagcttggcagtgtcctttttatcagttccccctccatccttctctgaatcacgaatggcttactgctatgcataaaggcaatgggatatatcataccctgggaaacagggtgggcctttattaccctttagcaagaacgtgagggtctcaaagtaccttgaagcataaaaggatatgtattctgcagttattggggaagtgttttatatatatcaattaggtcaaaatgtttcgtggtattgttcagatcatctttgtcatttttttttgtatagttgttttaatattgagagtaggatatcaaaatgccaccgagtgtgggcatatctgtttttctctctctctctctttttttttttcgagacggagtttcgctgtcatcgcccaggctggagtgcagtggcgcaatcttggctcactgcaacctccgccttctgagttcaagcaattctcctgcctcctgagtaactgggattacagacgcctgccaccacacccatctaatttttgtatttttaatagagacaggagtttcaccatgttggccaggctggtctcaaactcctgacctcatgatccacccaccttggcttctcaaagtgttgggattataggcgtgagccactgcacctggcctgtttctctctttatgtcagattttccttaatgtatttcgaggctctgttttaagtgtattcatattttgacatttaaatgtattcagattttgttatgattttccaagtaatggagtcttttatcattatgatatgttcttctttacctctggtaatattccttagtgtgatatcagtatatcttttttttttttttgctcactgtttgtatggtatatcttttttatttttttacatatttttactttaaatctatctgtatatttatatttaaggtgtgtctcttatagacagcatatagtcagtcttttctgttataattattttttggtataaatccattctgacaacctctgcctttaaattggtatttttagtccactaacttttttttttttgagacggagtcccgccctgtcacccaggctggagtacagtggcatgatctcggctcactgcaacctctgcctcccgggtttaaggaatcctgactcagcctcctgagtagctgggactacaggtgcatgcccccacacccggctaatttttgtattttagtagagacagggtttcaccatattgatcaggctggtcttgaattcctgacctcaggtgatccacccgccttggcctcccaaagtgctgggataacaggtgtgagccactgtgcctggcctccattaacatttaatataatgattgatatggttgaatttaggtccatgattttcttttcttttttttttttttttttcccctctgttctttttctgcctctttttgggttaattaaaaattttttttgaatttcactttagtgactttttagttattcttcttcacattactttttcatggttgtcctaagagttacaatatacatattcttaacttttcacagtctacttagagttaatattatatcatttcacatgaaatgtaagaattttggaataatttttgctttatatagtcatatatatttttaaggtatttaaaataatcttttatatttacccacatatttaccatttctggaactctttcttcttttctgagatctttatttccatctggtgtgggcttcctgtcattttataaaacttcttgactttttttaattataggtttagtaatgtagatctgctagtgacaaattctctttgattttttttatctgaaaatgtctttattttgctttcattcttgaaggatatttttgctggattcttggttggcaattttttcttactatattttcattttaaatattaattataatatttcaaaaataataacattttattttaataaagatggcatcttgctatgttgcccaggctagtctggaactcctgggcttaaacaatcctctttcttggcctcccaaagtgctgggatgacatgtgcgagagccactgcacccagctcttactactttaaaagtattgtttaattgtcttctagcttacattgtttttgataagaaaacatccatgatttttttaacatcattcccctatgtgaaatgtgttctttttctcttgctggttttaaattaccattggctttcaccagttaaattataacatgcctagatggggtttgcattatatttatcttgcttatagtatactgagcttcttgaatctgtacatgtatatatttttaagctacaatttggaaaattttcagcctttttttttctttttatttttttagagacagggtctcactctgccactcaggctggagtgcagtggcatgattatggctcactgcagcctcgaccttctgggttcaagtgatcctcccacttcagcctcttgagtagttgggactacaagcatgtgacagagcaaccagctaatttttaaattttatgtagagacagggtcttgctatgttgtccaggttggtcttgaactcctggctcaagcaatcctcctgctttggactcccaaagtgctgggattataggcatgagccactgcacctggccacagctaattattttatttttttgtagtgatggggttctccctatgtttcccaggctggtctggaactcctgggctcaagtgatatccttccgccttggcctcccaaagtgttgggcttaacagatatgagccactgctcccagcccatatttcttcaggtattttttttttttttgtctcattctcttctctccttctgtgagtccaatcttatttatattagaccttcagatattgtctccatagatacctgagactccattcatttttataaaaaacttcttttcctcttctttattcttcagattgaataattttattaacctatcttcttgttcactgactcttctgttatcaccagtctgattttaggcacgtctagtgaattttgtatttaaatttcagatattgtgtttttaaattctagaatttccatttgtttcttttttatagtaaatattctctgctgagattttctatttggtcatttattatgagaatattttcttctgtctttgagcatcattataaatacctttgtctgctttactttaaaatctttgctaatttcaccaggtgggtcatgtcaaggttggcctctattgatcgttttttatttggtgtaggtcacattttcctatattttgtatgtctagtgattttggattacagtctggatattgccaacaatatgttatagagattttggattcagttatgttcctctgaaaactattgattttttttgtttgtttatttgctttagtaagcagttagtttagaagaaagactcaactttggtctcctatgcagtaggcagttgatatctattagactgtttagccttagacagactggtaggagctttccccacacctgtacctcacacagttcaaaggtcaatcagatatttgggcagaatttatgtacagaattgcagctccccttttctggctctctcctttttgggatttttcctcttactttctaacttctgtgtttgcaccagtctctgttttttggcttttcaaaaacagtaagactatggcaccaagtgggacctgcctttaggcaaggagctgtgaaaaatgggaaactcacccagtgacattcccttcttccaagcatgaacttttagttgctctaccatgatttaaggaatctgtttttaatatttgggtcagttttaaaagttgtaatctgaggagtgttggtctgattggtgctctcctgacataagtggaagtagaaacctgcaataaaagaggaatcccttgacctaatccaaagcgatggtaatggtagggagcatttctggctgaggcatatcaatagctcttctttctcatacgtggtgaaaagctcagccttcctcagctgggctccatcagatggtcttctgttgtgatttctctctgaactctgctgcccatgcttactcttacaggcaactacactcttaacactctctcttatgttttctttactagttctatcagggggccagaagagtttttctctctacctcaagatcaggggaatgaagatcttcccaagacccagtgccttgttagtgaggaacagggtaaagagacagggaaagaaccatgtaaagggttaataacttacaggatttcaggtacacaagaagagtcctcaacagctaagatctcctaggaatcctgatgtatcatgagccacaccctaaaatcagcttttggagaaaacgaaatagcttagatgagaccagagactggaagactctgtgacagtatgaccaatttcatccatggcagatagacgtcactacccttgactaccttttgcttccctgttctctgttaccattcttcctacatcattctgatgtctgttcctacgtgcattcccttccgtaaggcttttaacttttatccttacttcacgctaagatttttaaagtggacaaattctctgagtctatgcatttccccacagtgctgtgtgagaagcagatcactagcgtccattgaatcccgcacaaattcttgagctgtgaatcaatactgccacctcccctctctccgctatgactttagcatagcctagctgcatttctacatgtgtgttacttacagatactaccccaaactattaaaaagtgatttctagccatccttgcaaagtcaactcatctttccaactaaaccatggaaaattaccaatcagaaatccttgacaattcttcaaaagggtctactgagtttgtgtttaatttatctgtatggacgaaacatttcatgtctacgtctaaaattttatagtaggtgatggttgcactctgaaatatgacattaagaattttttccattaaagtttatatcaccaagtaataatcttttattattattattattatactttaagttctagggtacatgtgcacaacctgcaggtttgaaacataggtatacatgtgccatggtggtttgctgcacccatcaactcatcatttacactaggtatttctcctaatgctatccctcccccaagtccacctcctgacaggccccggtgtgtgatgttccctgcactgtgtccaagtgatctcattgttcaattcccacctatgagtgagaacatgcggtgtttggttttccgtccttgtgatagtttgctgagaatgatggtttccagcttcatccatgtccctgcaaaggacatgaacttgtccttttttatggctgcatagtattccatggtatatatgtgccacattttcttaatccagtctatcattgatggacatttgggttggttccaannnnnnnnnnnnnnnnnnnnnnnnnnnnnnnnnnnnnnnnnnnnnnnnnnnnnnnnnnnnnnnnnnnnnnnnnnnnnnnnnnnnnnnnnnnnnnnnnnnnnnnnnnnnnnnnnnnnnnnnnnnnnnnnnnnnnnnnnnnnnnnnnnnnnnnnnnnnnnnnnnnnnnnnnnnnnnnnnnnnnnnnnnnnnnnnnnnnnnnnnnnnnnnnnnnnnnnnnnnnnnnnnnnnnnnnnnnnnnnnnnnnnnnnnnnnnnnnnnnnnnnnnnnnnnnnnnnnnnnnnnnnnnnnnnnnnnnnnnnnnnnnnnnnnnnnnnnnnnnnnnnnnnnnnnnnnnnnnnnnnnnnnnnnnnnnnnnnnnnnnnnnnnnnnnnnnnnnnnnnnnnnnnnnnnnnnnnnnnnnnnnnnnnnnnnnnnnnnnnnnnnnnnnnnnnnnnnnnnnnnnnnnnnnnnnnnnnnnnnnnnnnnnnnnnnnnnnnnnnnnnnnnnnnnnnnnnnnnnnnnnnnnnnnnnnnnnnnnnnnnnnnnnnnnnnnnnnnnnnnnnnnnnnnnnnnnnnnnnnnnnnnnnnnnnnnnnnnnnnnnnnnnnnnnnnnnnnnnnnnnnnnnnnnnnnnnnnnnnnnnnnnnnnnnnnnnnnnnnnnnnnnnnnnnnnnnnnnnnnnnnnnnnnnnnnnnnnnnnnnnnnnnnnnnnnnnnnnnnnnnnnnnnnnnnnnnnnnnnnnnnnnnnnnnnnnnnnnnnnnnnnnnnnnnnnnnnnnnnnnnnnnnnnnnnnnnnnnnnnnnnnnnnnnnnnnnnnnnnnnnnnnnnnnnnnnnnnnnnnnnnnnnnnnnnnnnnnnnnnnnnnnnnnnnnnnnnnnnnnnnnnnnnnnnnnnnnnnnnnnnnnnnnnnnnnnnnnnnnnnnnnnnnnnnnnnnnnnnnnnnnnnnnnnnnnnnnnnnnnnnnnnnnnnnnnnnnnnnnnnnnnnnnnnnnnnnnnnnnnnnnnnnnnnnnnnnnnnnnnnnnnnnnnnnnnnnnnnnnnnnnnnnnnnnnnnnnnnnnnnnnnnnnnnnnnnnnnnnnnnnnnnnnnnnnnnnnnnnnnnnnnnnnnnnnnnnnnnnnnnnnnnnnnnnnnnnnnnnnnnnnnnnnnnnnnnnnnnnnnnnnnnnnnnnnnnnnnnnnnnnnnnnnnnnnnnnnnnnnnnnnnnnnnnnnnnnnnnnnnnnnnnnnnnnnnnnnnnnnnnnnnnnnnnnnnnnnnnnnnnnnnnnnnnnnnnnnnnnnnnnnnnnnnnnnnnnnnnnnnnnnnnnnnnnnnnnnnnnnnnnnnnnnnnnnnnnnnnnnnnnnnnnnnnnnnnnnnnnnnnnnnnnnnnnnnnnnnnnnnnnnnnnnnnnnnnnnnnnnnnnnnnnnnnnnnnnnnnnnnnnnnnnnnnnnnnnnnnnnnnnnnnnnnnnnnnnnnnnnnnnnnnnnnnnnnnnnnnnnnnnnnnnnnnnnnnnnnnnnnnnnnnnnnnnnnnnnnnnnnnnnnnnnnnnnnnnnnnnnnnnnnnnnnnnnnnnnnnnnnnnnnnnnnnnnnnnnnnnnnnnnnnnnnnnnnnnnnnnnnnnnnnnnnnnnnnnnnnnnnnnnnnnnnnnnnnnnnnnnnnnnnnnnnnnnnnnnnnnnnnnnnnnnnnnnnnnnnnnnnnnnnnnnnnnnnnnnnnnnnnnnnnnnnnnnnnnnnnnnnnnnnnnnnnnnnnnnnnnnnnnnnnnnnnnnnnnnnnnnnnnnnnnnnnnnnnnnnnnnnnnnnnnnnnnnnnnnnnnnnnnnnnnnnnnnnnnnnnnnnnnnnnnnnnnnnnnnnnnnnnnnnnnnnnnnnnnnnnnnnnnnnnnnnnnnnnnnnnnnnnnnnnnnnnnnnnnnnnnnnnnnnnnnnnnnnnnnnnnnnnnnnnnnnnnnnnnnnnnnnnntgctacgttgtgtctttgttgtcattggtttcaaaaaacatttttatttctgccttcatttcgttatttacccagtagtcattcagggagcaagttgttcagttgccatgtagttgtgtggttttgagtgagtttcttaatcttgagttctaatttgattgcattgtggtctgacagacagtttgttgtgatttcttttcttttacttgctgaggagtgctttacttccatttatgtggtcaattttagaataagtgcgatatggtgctgagaagaatgtgtattctattgatttggggtggagagttctgtagatgtctattaggtctgcttgttgcagagctgagttcaggtcctggatatccttgttaaccttctgtctcgttgatctgtctcatattgacagtaggctgttaaagtctcccattattattgtgtgggagtctaagtctctttgtagttctctaaggacttgctttatgaatctgggtgctcctgtattgggtgcatacatatttaggatagctaactcttcttgttggattgatccttttactattatgtaatggccttctttgtctcttttgatctttgttggtttaacgtctgttttatcagagactaggattgcaacccctgcttttttttcgctttccatttgcttggtagatcttcctccatccctttattttgagcctatgtgcatctttgcatgtcagatgggtctcctgaatacagcacactgatgggtcttgactctatccaatttgccagtctgtgtcttttaattggggcatttagcccttttacatttaaggttaatattgttatgtgtgaatttgatcctgtcattatgatgttaactagttattttgcccattagttgatgcagtttcttcctagcgtcgatggtctttgctatttggcatgtttttgcagtggctggtactggttgttcatctccatgtttagtgcttccttcaggagctgttgtaaggcaggcctggtggtgacaaaatctctcagcatttgcttggctgtaaagaattttatttctctttcacttatgaagcttagtttggctggatatgaaattctgggttgaaaattcttttctttaagaatgttgaatattggccaccactctcttccggcttgtagaatttctgccaagagatctgctgttagtctgatgggcttccctttgtgggtaacttgacctttctttctggctgcccttaacactttttccttcatttcaaccttggtgaatctgacaattatgtgtcttggggttgctcttcttgaggagtatctttgtggtgttctctgtatttcctgaatttgcatgttggcctgccttgctaggttggggaagttctcctggataatatcctgcagagtgttttccaacttggttccattctccccaacactttcaggcacac

SEQ ID NO: 297 - DNA, 936 bp, Homo sapiens
atggagaacaaagactttcacaatggttctagaagaaatctggacaagtcttttcatgtggtttttctacgcattgattccatgtttgctcacagaagcagcatcttcagtatttccttctacgtctttccaagacctctctttgaccccagggttatgtatgcgggcactggtgttggtggttaccagaatgctgatcattgggcctccacatggcttgcttggatgctggcagtggtagtggtggactgggcaaggagggagtacgagagcctgtacacgagccacatctggatccccagcagctggtgctcactcactgaaggtcctgagtgtgatgtcactgatgacatcacggccactgtgccatacaaccttcgtgtcagggccacattgggctcacagacctcagcctggagcatcctgaagcatccctttaatagaaactcaaggaaatcaaccctgtctggggctggctttgactctcctgttgtcttgccaacagccatccttacccgacctgggatggagatcaccaaagatggcttccacctggttattgagctggaggacctggggccccagtttgagttccttgtggcctactggaggagggagcctggtgccgaggaacatgtcaaaatggtgaggagtgggggtattccagtgcacctagaaaccatggagccaggggctgcatactgtgtgaaggcccagacattcgtgaaggccattgggaggtacagcgccttcagccagacagaatgtgtggaggtgcaaggagaggccattcccctggtactggccctgtttgcctttgttggcttcatgctgatccttgtggtcgtgccactgttcgtctggaaaatgggccggctgctccagtactcctgttgccccgtggtggtcctcccagacaccttggtaatagagtag

SEQ ID NO: 298 - protein, 309 aa, Homo sapiens
MENKDFHNGSRRNLDKSFHVVFLRIDSMFAHRSSIFSISFYVFPRPLFDPRVMYAGTGVGGYQNADHWASTWLAWMLAVVVVDWARREYESLYTSHIWIPSSWCSLTEGPECDVTDDITATVPYNLRVRATLGSQTSAWSILKHPFNRNSRKSTLSGAGFDSPVVLPTAILWGMEITKDGFHLVIELEDLGPQFEFLVAYWRREPGAEEHVKMVRSGGIPVHLETMEPGAAYCVKAQTFVKAIGRYSAFSQTECVEVQGEAIPLVLALFAFVGFMLILVVVPLFVWKMGRLLQYSCCPVVVLPDTLVIE

SEQ ID NO: 299 - DNA, 49914 bp, Mus musculus
gaccatagggattatagtcaaggctggctataaattcagaaaggcccgttccagagccctggccaaccaagctgggcagggtcctatgcaggagagagtggctggtcagatctggccactaggaagaggcacctggctgcagaatgggagttagtcgcaagtggaggagcagggaagggtggtccaagcggtaagaacagtagctgtgaagaccctgaggcagggatagacttggcagtctctgtgtacgaaatgaggaaccaggactgctgtctttctaaggaaggggaacacagatcggatgaggatggagagacgggaccaagtcaagtttgactgtggaaaacaagacttccattagagttctctaaaagcagagggatggtgtcatcttattggtgtgtttaggtcgctttagatggtcagtagagcttggtcgggaacaaaactcaggcgccttgatgagtgagcttcggcaagaggggaaggtggctgggaccaggatggaacaagagagagactggcagaagccaactgagctgcggatgattcaaactgacaggcagaaagggggagaaccttagattcctgccatcgactggcagggctctgtcctcaaccagggggaaacttaagggtgggtaagaagtcctgtaggtgcccagagacagaagcagggctgtgggaaggcagtcagggaagctgacaagatccccggggaaggcagctgagaagtgaaacaggctggccccagctgatctccagaaggtgccggctgagacagtgacaaccgcgtcccacagaggagcagtggcaacatcgcttcagcctacagggccaggtccagacggtgctggtgcgcatgggtggcctcttccttctgttgatgaccgtgggccgctggctggatctcctgagtatctttttctcccttttgggtgagctgtggtgcttagccggtattcgcgccttaatcgacctctgccagatacaggtaggtacctttatggatccccccccccagcttcccaccctgttcccaaggttcccagcacacacacccccagagttgacaagagtcgggagggcaggggaccctcaactcggagtgaggacctgggtaccagggaccactccagctggcaaccccgggggtcccagagggtcggaagatcctgatgacggatctgagactaactgggggtatgtgtcccttcggaccctccccccagggctttccaccccagaggcctacagtaacagcagcagtaacagcagaaggagaatcaggatggacagatccatgtgagccccggccttccacacctgccccagccaggagcgcggtcccctcctgactcgccctgcggaggatgtgaagtcagtttcaggcctgcgcggcctaaccagcaaggtcttgaccacacgatgtggcctgaagactgagtggctggtcctcacctagacttttgggcaggccatgggggggctctggagaaaggaggtggccagggctggggacctagagaggtggggacatgaaggcctcagagtgaatccctctctcttggagatggacagcgtcagcagacccacttttcttggctgggcaagaggacaattgtgacctcagaatggcccctgccctctggccacccctcccccaccttgctctcgccgaagacaataaaggtgacttttctcaacctgcgttgaggatcacagtggcacaggaagaaaaaggggcttcctgaatccaatgtcttcgggggcaggcttctaggatatgagcctcaaacctggccctgccctgagttccctgggggacaaaggacacaggctgaagtaccaggttcttgtgtcccaggacaaagaactgcaccaggaacatgcggttatcaagatggttgggagctggagaagttgctcagggttacgagcatggaatgctctgagtgtcacccctacacatgggtctcctcgtcctcgtagattgctggccgattcggccaacgtcgaacagggggttcagaagccctgtgagtactcactgtgaaagaccacaccgggacccgaagtcaggaggcagatctttacctagggtgactgcaggcttatacagttttggggaactgaaggcagggacatccaggatgggcaaaggtcattggctggggggcttagaggacctggaatgcctcattagcatggggaagcacttcaggaatctcaggcgatggctgaacaagtcttgtagaagaaaggaacttgatcctataaattaattgaggctatgtgacattcctcaggtagaagcaagtgttgggggcttagaaaccccagtcaaggccagaggaggagaaactctgttaacaccaggagtcccccattatgcatcaagccccagaaggctgtgcagtcaatgacaaactttgcccatccttagttagcaggtttcccacatcccccatcagggagttcacaagtgtctgtaggagatgcttaagagatgtgatgtctctggcctccttgggcacttgtattcatgctcacacacgcatatatagaattaaaaataaaaagagaagaagagacagcttattaagaaaaagagaaacccagggctggagagatgactcagcggtgaagagcactgactgcccttccagaagtcctgagttcaaatcccagcagccacatggtggctcacaaccatctataatgggatctgatgccctcttctggtgtctgtagttgtcttgtactcatatacataaaataaatttaatattttttaggaaggaaggaagggagggagtgagggagaaaaaatccacagccaggtggtggcaccacacacctttagtcccagcactcgggaggtagaggcaggtggatctctgtgagcctggtctacagagtgagctccaggacagacagggctacacaaagagaccttgtctcaaacaaacaaacaaacaaaccaaaacaaagaataaaccctctggagatggcagtgagctagtgagctaggaaaggcataggctcattgagagttctcaggttagcagggcctggtggcacacagcattaggtaagcagacacatttcaagttcaaggtcagcctgctctacatagagagttccaggctagtcagggctacataatgaacccccccccacaatctcaaaaaaataaagatgtaccaggttgcatgcgtagtggtgaattgttaatctgctctgagctcccagcaggtgatcacacgtcttgccacccaccagagttctatgtattcactaataaaatacacactcgcacacacaccacagcctttatattttcatattcatatgcctctattagctcaatggttgggctcttccaaacctcccctcggctagcacacactcccgatattcctgagttaacactttttttaaaagatttatttattattatatctaagtatattgtagctgtcttcagacacaccaggagagggcgtcagatctcttatggatggttgtgagccaccatgtggttggtgggatttgaactcaggaccttcggaaggacagtcggtgctcttaaccgctgagccatctcttcaacccccagagttaacactttctaaatctctattttacctttgctggcctgtttccttctgggcagccctcccatggggccgctttccttttgcaccctcattgctggatggcttctctcccgcagctcttaaatctgatctctctgcttccacatctgttccttctttcctttgcatttcttgcccgggattcctaaaagtccctcctctttcaccctgcccagccattggccgttgactctttattgattaatcaaaaaccaactgaggacagggaccctcagcatctggctatgcagatccccgtgtgatttggggagctgaattaagacaaagcattagaaccaatgcccaacagcatggctcatggccattcttggtcacagtcttagctgttctcttgatttccacagatctgctgtttgttgtgtgtgacccagaaggggaaatggcttcaagtcgtctgtgctgactggctgcttgcatagctccagtctctagtctggggtgtggtacagaggtatcatactgaggtggccaaggaggcgaggtagggtagtagagacatggtgcccacctgagaccaagatgccctgtcgaattccaggctggaactgctcttgggtccccagcccctgatcctaacctattcagggcaaatgagggtccttttcatctcagtcctgttcagggataagatcagggacagggctgtacccactccatctgccttctgtgtgactaaggacaagcacggcccctctctgagaccatctagagaattactaaagcattgctagctagcgttttaatcccagttctcccgaggcagagacaagagatgtgagttcaaggccagcctggtctacagagcaagttccaggacaggcagggctacacagagaagccctgtctaaaaataaatgaatgaaggaataaataagtaaaaagaattactaccactaggagtgatggctcatgcttgtaatcctagcattgggggacagaagcaggcagatctcttgtgaattcaaggccagcctggtctacatagcaaacccacagccacacaggaagatcctatctcaaaaaaaaaaataaattaaattaatatcatatgttatgtgcttaccaagtattcaagtactgagcacttaatctattttgaccctctgattcccaccaccccttccttttctgattctcggctttgtttctaaacaaagcactggggtttcactgtggctattctgaaactcactatgtagaccaggctggcctcaactgcagagatctgtctgtctctacctgatgactatggaattaaaggtgtgtgccaccatgtccagctgcctactgtttttgaaatggtctagaaatgtagcccaggctggccctgaactcatggctatgaagtcctattgcctcaacctccgaattgctgagattatgggtagacaccactacactacgccctggtcctggaggttagatcctatgattttgtgtgtgtgtgtgtgtgtgtgtgtgtgtgtgtgtgtgtgtgtgtatgagagagagagacagacagacagagacagagagagagagagagagaggattgtacttgttgactctagagttgtcagagggcagaagaggacgtcagatccgctgaagtgggagttacaggcttttgtgagctacttcctatgggtattgggaagccactgcagtcctctgcaagagcagcaggtacttttaaccactgagccatcctttcagctcaggcaagatttgaacacaggcagcctgctcctcacccattccacccaacagctcgtattttgcatgttccttgttccccttctctgtctgaaggttaggtccagagaactaacaggactgcatagggaaaacaggcagatccagcccaggtggctctggaatgtgtctcaggccaccagaggctcccatcaggtctgttctaggcccaggatcgagcaacttggttctgtggggattttaagaggggaggcctacagagcagagatgcccagtccactaagaggccttcctggggcatagagctggcctgtgtggaagtggcctggagaaggctcttgaggaccacagactctgcaaagatccttcctccctccattatagacggagtgtgatgaggccctaactcggttcgcagagggcttgcacgaagccctgggttcagtccccagcactgcataaacagggtatgatggtttacatccgcaactccagtacttgtgaagtacgggcagaaatatcaggagctcgaagttatcctctgctacatcccaacttcatagccagcctgggccacacacatgagaccccgactccaaccccaaaacaagaagaccaccattgccacctgagaactattggcctctgctcctctcctccccaaccaaggcagggctgcaaccgggacaagtggaagccgaggggacctgatcgtatcaggtacagcttgagggcagcaaaaaccctgctcagtacaatatcaatacccctgctgtgtgatctgacttccacccctcaacttgccctgtctagaggaaacgagtcatctggtgggcgaagagccagtatccgccagacccagactggctctgggttccaacaaaacctcctgtttgtgctggaaggcattttggtctcagctcacagactggctgggaaaatactggcaacatctgggagagagctggactcagctgtcctttcctttttatgggcacagggaccattatccaaataagattaggaacatgcgggctgggagagatttctcttcttatcaaattgtttttctggaacctattttgtgtctggcaagagtcttaaaaatttggtcacccaggcttaggggtatatctcagtggtacagtctctgatgcatgagttcccccatcccaaaaaagggctagggatgggactcagatggtagactatttgcttaccacacagaaggccccgagttcgattcccaagtgtttaaactaggcatgagctcgcatacctgtcatcccagcatttggtagatgaaggcggttggatctgaagttcaaggttattctctagctgcattgtgagttgagcaagttcaaggccagactgagatacaagagaccctggggtttttttgtttttgttttttttttttgttttttttgtttttggttttccgagacagggtttctctgtgtagccccggctgtcctggaactcactttgtagaccaggctggcctcgaactcagaaatccgcctgcctctgcctcccgagtgctgggattaaaggcatgcgccaccaccgcccggtgagaccctgttttcaaaaaggaggaggaggaggaggaagaggaagaagatgaggaagaggaggagaaagaaaggaaaggaaaggaaaggaaaggaaaggaaaggaaaggaaaggaaaggaaaggaaaggaaaggaaaggaaaggaaaggaaaggaaaggaagaagagagagaggcagtggcagtggtggtgagggcccatctggtaagggtgcttgttaccaggcctgatgacctgagtttagtctctgagacatggaggaaagagagagttgattttcacacaattgctaggacaagccaatacatatgcactataaagaagtgtaaaaaaattgttataaaatttaaaacaggagccccatatggcatgctgcagcacttgtcttaaatcccagaggcaggaggagcagccacaacagggtgtgtgaacttgatggccaagagagcagaaggtggccaatcttcctttttatctaggctgccgtcggaatgtgccacccacactaggtaactaggacagatcttcagctgaggttccctgctcatgtgattctaacttgtgactagctgacattaaaaccaaccatgtggggcagggggagctggagaggtggctcagtggttgagagcaccgactgctcttccagaggtcctgagttcaattcccagcaaccacatggtagttcacaaccacctgtaatagaagccattgtcttctggtgtgtctgaagacaatgacagtgtgcttatatacgttaaaccatggaagtgtgtggctcagtgatagagagtctacagtagcaggctctgggtcccagccaccaaaatagcaataataaacacacacataggtacataaaagaagtgaaagaccagggtcttcagtgtctgcatggagtggggtggctcctatagcagctgggactggagagagcacccctcccctcttgaatattctgtcttctctctctctctctctctctctctctctctctctctctctctctctctctctctttctctctctctccctccttccctccctccctccttccttccttccttccttccttggctcatttgattcatttgtgtgctggatagctttatgttaacttgacacagactaaaatcatctgagaggagaaaacctcaattaagaaaatgtctcagaccaggcgtggtggtgcacgcctttaatcccagcactcgggaggcagaggcaggaggatttctgagttcgaggccagcctggtctacaaagtgagttccaggacagccagggctacacagagaaaccctgtctcgggggaaaaaaaaaaagcaaaacaaaacaaaacaaaaagaaagaaaaactgtctcgggctggagagatggctcaacagttgggagcattgactgcttttccgaaggttctgagttcaatttccagcaaccacatggtggctcacagctgtccgtaatgagatctgatgccctcttctggagtgtctgaagacagctacagtgtactcacatataataaatcttttttaagaaaagaagaagagagaaaggaaggaaggaaggaaggaaggaaggaaggaaggaaggaaggaagggaagaagggaagaaagaaagaaagaaagaaagaaagaaagaaagaaagactagtaatagtatatagtaatagtaaagcaaagtagtagtaatagtaaagaaagtataagtataagataagtaaagtaaagtaaagtaaagtaaagaaagaaagaaagtaatagaaagaaagtaaaggaaggtaaggtaaggtaagtatataggtatagtcaataggatagaataggatagtaaaggtaatagctaagtatagggaagcaaagataagaaagaaagaaagaaagaaagagaaaggaagaaaggaagaaagagaaaaaggaaggaagaaagaaagaagagaggaaggaagaagagataaggggagctggagagatggctcagtggttaagagcactgactgttcttctgaaggtcaggagttcaaatcccaccaaccacatggtgtctcacaaccatttgtaatggtatctaatgcccttttctggtgtgtcttaagatagtactcacattaaatgaaggaaggaaggaaggaaggaagaagcaaacaaacgaaagctgagcaaggcagtaagcagcaccttccacggcctctgcatcagctcctgcctccaggttcctgctctgtttgagttcctgtcctggcttccttcagtgatggactatgatcccgaagtgtaagccaaataaaccctttgctccccagctcttggtgcatcagagccatagcaactctgacaagacagtttaggttttttgcttgtttatattgttttgtttgtttgttgctttgtttgtttgcttattgtgtctcagagtagctactggttgtcctggaacctgctctgtagaccaggctggccttgaactcaagaatcagcttgcctctgtctcacatgtgctgggattaaaggcgagtgccaacactcctggcccttcgtcctgtgccatgttgtctctctgggtttctgcacctataactagcagatcagcccagagtacctgtaaggagtccgcctctgtcggggctggagcgaggctgtggtaagctcgctgctctcacttcagagaggtcatcctccacagagaggaacaagccagcgtggcatcacgtgacaactagtgcgggccgaggaaggggagctggtttagagaatggaagattgatgggtaggtgtttaagggacccgggaaggtgtatctgtcagctgcagctgtgtaacagattcccctcccccaaagaaaatgtagttgcttaggacagtggacatttgtcagctcataccctctgtgagtcagacattccgtgcagctcagtcacgttgtctagctcggagcctgtggtcaagaggtcagctgctgcgactcagagacttcctaaatctgagatcctccctcaagctcctgctacacggatgtcaccacaacccagcagctcctgcaaacgcagaaaccatgggaaggacacggaagccttgagggtggcgtggacagatctctgtggtgagaaagagccgggagagtgggaacctcacagaccgtggagttggcagagacagccatggagaagggcagggccctggacactcaagttcggggtcttggttctctgatgggaggccatggtgggatttgcagagggaggtaatgaatctgaagccccctgccaagggattcctctctctgatgtcccagggacacagaagcatctggagtcacagctccacctgagaagagagggtcccaggccaatggcagggtgtggccaagagctccggccttagggctctagtggggtcgtaggagctggtgagcaggacctgggtcccacaggctgggtaaggggctcagggtatcctcaagagcagcggagagccacagagtactatgccgagagggagatggtcagacaccagcagtgttggcctgtccagagagtggactgtaaggcatagggacaaggtgaatctgagctttcgtggacagtagagctaagggtcagtacagctgtgcacagctgtaatctcaatgctgggataattgcttcttaatgagctctaggccggaggggaggtctgggagatggctcagtaggtaagagtgctttgggtcccacccatggcaggtggcccataaaggcctggaactccagttccagggagtttgatgtctactctcaggaacccccatgcacctggtacacaccccccgaaacacccatacacatggataaaaatatgtataaaaataaaaaataagtttttaagatttattacgtgtctaatgttctgcctggatgtacacctatgtgccagagggatcccattacagatggttgtgagccaccatgtgattgccaggaattgaactcaggacatttggaaaagcagccagtgctcttaaccactgagccatctctccagccctagaaataagtcttaaagtataaacctgacatttaaaaaaagaaaaaagaaaaccaagacaacaaaaacaaagatgagggagatggtttctaaggaatgacactccagattaacctctggcctccacacgcaggcccacacacatgcacatgcccacacacatgcacatgcccacacacgtttgggggaaaagaacacgaacttcttacaaaagggtaatgtttacttagagaaaggaaagcacatttaattattatagacagggtgccggggtccattcgtctgacatctttctgggctgttggccaggaatgcttgctggcgaggcttcctgcctataacctggctgccctctctgtccacaatcttccataatccctacgcaacccccagccctgctgaggagctcacccaagtgagcgcagcctgatgggagcttacttaccttcatgctgaatttgccctggggctcagagagctggggaggccagcagggccatgttgggtgcaggctacagaacctagggttggtatgccacgggaggagggataattctaagagagggcttgggatggctttagtgaggccacagggcctcagcacaagaaaactgatgaggaccctttggagaaactgaggccaggattgcctccctgctgttggcagaggggctctgactcacaaggcctagagccagagaggaaggcttgaggctcgaggacccatcccccacctcccccaccctcagtctagagccctgctcacccagctcagcagctgtgggaaatggcaggcttgggcaagctgggccagaatcggctcaggcccccaaagcagaggattaaatttgctttcatagtcaagacacaggaagatggccctccctgcctgatgaggcagaatcacataggcttgcatgaagtcccatcatccgtccacaagcctcctagatcccgggcactgggtgggtgggtgtgtcaagacagggtttctttgtgtatagccctggctatcctggaagaccaggctgacctcaaactcacagagatcctcctgcctctgtctcctgagtgctagcagcaagggtgtgtgccacagccattcagcaaccccaggctcttttatctacaactttccacaccagggaagttgtggcaatcctacaggaacctcagacactgagagaaaaagggagggcccccccaaaagaaggctgaactaacccaggggtccctataaacccacatccctacctttagctcttctcagtcacaccagaagaggacatcagatcccattatgaatggttattagccactgtgtgggtgctgggaattgaactcaagatctctggaagagcagtccgtgttcttaaccacagagccatctctccagccccctatttactttatctgtggctcttcaagacagactttctccgtacagtctggctgtcctggaactcactctgtagatcaagctggcctcgaactcagagatccgattgcttctgcctcccgagtgctgggatcaaaggtgtgtactatcgttagctagctcctcaacctgttttcttataaaactcaggatggccccactcacagtggctgggtcctcccccaccaatcactaattaagaaaatgccctacagggttctctacagcctgatcctatggatgcatttctcaataaaggttacttcctcagattcgttcagcttgtgtccagttgacataaaactacccagccccatctctatctacagtttccccatcacttacaagaaggccacagccgtgagttgcaagagagtgaggtccagagaatcaatttgcccaaggtcaaacaggctgccagggtcacgcaagagcaacgataccgataccgggaagtgctctagcccatccctgctaccatctgggacccctcaagcccaacctaatgcagccccacccttgtccaccagggcatttgtgaaactgtgttcaggaaatctggtctccttcaacttaaggcagataagcggaaagatggggaagccagagccttcctgtgactgtttgccaaggactgggccgccacacttcatgcatgcgcacatgagctgccatacctgacccagaaatgtaattttaactggtttgggggaaacagaggccaggcagttggatctaggtttagcccaacaagctcgccaaggagagacagctgaaaggacattctctcaagtttccaggcctagggtccatgatgtggctcagggagcttaggagcaaaggaccatattcccagaggagaacacttccttcctgccctccggccagttggtcgaagtacttggatcttgctggactgtagatgtagtaagcagaatgctctagaagctaggcaagaatgatgtgggaaccccaggccttccacaggagggtgccaatgataaacagaccctcagtgtgctctctggatgtctgtggctctgacattcctactgagggaaggctatgtgctgtgtgtgctgtgtgctggcagacccctttaatctcagcacttgggaggcggaagcaagtggatctctgtgagttggaggtcaatctgggttcagtctagccgaggctacatagggagaccctatccaaaataaaattgggaggtggtgcttgttcaaggtcagtcagtaccagacaactaagagttcgtttggcctatgcttctgtggtccttcatcacagactaacaatgacttcagagatgccgtcccacccgccacctctctatctcaatcccttgaccttccgtcctggcacatgccactattggtaactgttgccctgttttgtcttcacccccacaccatttatgtctctgctccttcctagtgtaacccattcataatctccccatctaggcaaggattaatgtccagacttggttcctattggctcctgactctctctaccaggcagccagagcccagaccatgtttacagggcctcctcaatccccactgtggaaggtaagagagctatacttcccaacagaggagtctggatggcagcaaatatcacccactccctggatcttatccctaagcccttctccttctgcctgcagggtctcagcagtcatggccctagtagagggctctcttcttgtccactgggacttctgaggggagaagagacctggtctgagcttggcagggaggggggaggggagcagagtccatgagctggcagacagagggcgtgtattctctgcctgcacacttcctgggtttccattgcaggaagtttggcacctgcctatcggtgccactgatacccaggctggtgcaggcgacttttagccaggacaataccccaactggaagcagcaacagcagcagcagcaggaggaggtggaacagaggccaggggtgcaggacagctggtgagtggtagcagctagaccccttccagactgccttagactgtggatgtgggaagcctggctcctagattaatccctttgaccttggcgaaggccccaagtcaacccttccttccgtgtggcgtctcattgtggggtaaccgggtaggtcagtaccaccttgactcagtggcgcccccctttctcagctgaggtgtaagagtctccacacctgccacagacaagaggccccattgccaggttgggaacgcacccaaggggcccctgggcaccggtagcctcagcataatactgggttctgtccttggctctcatctggggatggtggcagcaatccagcctctgggactagcagatccgggtgcctaaggggcactctccggtctggcttgaatctagccttgtccagtgcccattgcacaagcctcggtcctcgccggcttcagtgtctggtctgtggggtgggacctatcagccctggagtagagtctggaagggttagatgaaaggtttgaaagggacacaagggaagtctctagaaacagcagttactgtcgtcgttgtgactccacactggcgggtagaatcaaatggaaaaatctaatggcaaagactggggaggccattaagggggtggggcttagtggggaggcggaggatggagctgagcacccagacaccccactctgacacctctcttctgcagcaatacaaggaccacctcgaggagctgttgtatgtgggggggggggcgaggagggctgcagaaggggacctaatccttcctagttaccccccccccatgactctgggtccagctctcccctgcccagtcccccattgtgcctctaatcgaaagaacaatcggcttgcctgggaatcagacctagattcctttcccctgcaatgtcttcaggtctctagggacctgagctgtccagagcagccccaacccaggccgcagggccctgtgctctgcttcttcaggggccagtaacagggccggaaagcaaacaggtgacctgattgtttcccctgtctcctgtaagggcctctttccactacaggacctgagacccacttgtagaaggattcataggctcacacaggcagtgacagcccaggacagcagatccaggtgacttgcttcgctggggtgtctgaaaaccctaccccaggcatcctttgaataagccccgcaactccagtatatgttagcattatcgctttaactctaggccacgttgcagaggtgggctgtgcggaccccattttaggaattaaagattgaggcttaagaaaacggggttgacagtccaggtcatgcgtctagcctaacttatgaccctgaaggatttcagagtcagtctggctacaagtacccctctccaccaattggggcaggtggagcctctcatccaggtgacctagagcgaggttggctaaggatcccactccccagcccgccccgcccctccccggtgcaccgtgggggtgggcagcggaggaggagccacagggaaggggaggagtggtgggaacaaagggagggggcgcggccacaggtgggggggcaggtagggcgagccagcgccccctccccgagcgtcaccttttatggtaaggcgcgcgcggggcggcgggcggagggaggctggggcgggagcaaggggcggaggcgcagcgccggcggaggccgggcgtggggagcgcggcaggtaagcgggtgcggcgtgggggtcctggctgtgctccccgggcagggtcaacttcaggtggccacatgggcaactctcggccaccgtactgaacccagctcggcgcggttggggggctcggggcgggtactgtgtcttgtccctgtgtgtcccaggatctcagccattggggactctgggaggctgtgcggggacggcacaggggtcatctcctggctcttgattgggacgggttgagcagggcagaggctcccgcacaaagaggatagcgtcccgcatatggatcgaattatagtcactgcggtgacccggccaactgtcccgctctgctgctgtgccagggagcagagttcccgagttcttttgcccctcccggaccctgtttccagctccagtctggagagggaaaggagggtcctggggtctcctcgcctggcttggcggggtgtggaagtgggcgatccccaaagtgagtgcaactactcccccatctccaggccagacctgaggtcccagggggagaggctgggcagcgcccagattccagcttttaacaatggagatcactgtcctccagccgcagggctccttcttcccccctggggctgaacgaccagctggcctccccagccaccctccagggcagacttctattctctttatgaatagaaagcgagcccagagaggttgagtgaccgcgtcaaggtcgcccagtacaaaagaccggtagcctgaggagatctgacttctgcgcctcttcctttctctggtctaggaaagaggatgagagaggcccttagccttctgagatcgcaaggtgtcttgtgggagtgagtggggggacattcactcttccactttcagcaaagtttaattctagtcctcaacttagattgcttattggtctgtgtgaaagagcaatgcttagaaatgactcggaggtggctttagagtgcgggcaaagagttatcgaggccgccagcacatcccctcccaggggctgcagcctaaggccggccctggctggctggctggccggctctcagcctccttccttcctcttgacaggaaatgactttctttccctttgttcccactttctccgcttacccaactggatctgggtgtctgatttgccctccgggggaggaaggatgggggtggagggtctgctgggaagttttcatagaatgctccccccaacccccaccccacccccgcctgggtgaactcagggttagtgggaccaaagggaagcgccagcaggctctccttaagggacctgacagggctttgaaaatccccagcgctgctccatccctgaggtccccacctctgcatgacaacgtaaagggcgggtatggctgcccagctgcgaacatctggccttcacgctggatgtttccgagaaagcagggagaacggaatggggggtcagagtcggggtgggggtgggggtggaggagggttcctgaagagccacagcctgtctcagaggacccgcctagaatgtgttgaccgcaagaaactggtttggattgggttattgggggaaggggtggagcttggagtgggggaggaggcttgtgtggtccagggaagaaaaagtccaaggatgccccaggactttcaggttgctggatcctctgaaaggattccaagcctgctggagggccaagaaaatccactctaagtcttgttgggactgcgtgacagaggctccctacagctgaggtttgaaggctgagctctcgactctataaatgtcagtggagttgagggagggtctaactatgtagcccaggctgggttggaacccatggtcctcctgtctcaggtttcctgagttctgagattacagttgcaagtatgtgtggccgttcttggcttcaatttgtttgtttgtttctttgtttgggctagtgtgggatttgctatgtagaccagtctggccttgaactgacaagagaagagatctgcttgctcttctgcctctgagtgctaggattaaaagtatgagccctcattcctggtgaggtgtgtgtgtgtgtgtgtgtgtgtgtgcacatacacatattttatacacttttttttactagacagggtttctctgtgtagccctgtctgtcttggaactcactctgtagtccaggctggctttgaactcacagagatctgcctgcctctgcctcccaagtgctgggattagaggtgtgtaccactattgcccaggcccccaatttttttttttttaaaagattttacccttttgggaaacagggtttctctgtgtagccctggctattctggaaatcgctgtgtagaccaggctggcctccaactcacagacattcccctgtttcttgcctttggcacatctgattaaaagcatgtgtcacctcgcctgacactcccagagctattttcttggtctgtgtctctgtcagcctgcaggagggtctaaggaagccaacgcactttagggatcagaggaaggcctgtgagtgaccatgtgggagccccatcccatcagggactctggatctgtcacccctctctactgtccagccccatttagactagccatacacctccctaagcacccgtgactgggcttcagggtcgaggcatggtggcccacacagagccaggaagggagagagagataaggggcacatttttagccagggaactatggttgggtgccagggaggactttggtgctctgtggccagttcacccccagtgacccaccccagaggctgctgtctgcaggagctgcctgtccttcccagcatgaaggtgctccctctgcccagatccctgcttcagcccatgcactgccagccgctctctggctctggatgcagaccactgaaggcaggcgggttacctgagggtatcagacacatgcataatgagccagcaggtcctgtggtgagttgtccccaaggtgaggaaacagacattgccccagggtgagagtcgggacactcccttggatgaggtgaggtttgaactggaccttgagagagttaaaattaaccctgtaggaacatcctcccccagagaaaggcgggaaagaaagggctaagagggttaaaagaacttgaggtaggctgggggcttggctctgtaccgcacgtgtgcaagaccctgagtcccatccccgtatcagagagatggatggggttgagagggggaagccatagaagtttagagtttatcctctgagataatgggaagccttaagacagggtttctctgtgtagccctggctgtcctggaactcattttgtagaccaggctggcctcaaactcagaaatccgcctgcctctgcctcccgagtgctgggattaaaggcgtgcgccacctcacccggcttaaaaacttttattatttacgtacgtgcgtgcgtgcgtgcgtgcgtgtgtgcgtgtgtgtatgtgtgtgtttgaaacaggatttctttggaactctctctgtagccaaggctggccttgaactcagatctgcctgcctctgcctccctctgctgggattaaagggtacactgccaccacccagtcttaaaaagcttttaagcaggggagaaacaatcagatttatgctctgagaagatgagggttaggaggtaagataggagaccttcaactacccacagccaccacacacacacacacacacacacacacacacacagagtgtcaaggatgtgacacttcggggctggatggagtgggcagaagagaacaaagcagtcaagggacttgacttctggcatctgtttcctcgctgatgaaataagatgatgtgtcgctgggtgctcgcggcagcatggggagcacgtgctgtcttttcctcttccagccgctcttaccatcctgttctcttccagtggagctggcctgaactttggaccttgtcttccagtaggaaatcagtctctcaggtaagggaggggtcggggtgggtatcctaatacctgcccgccagctgtctgggctgggctctgaaggaggtggccaaggaggagggtctggatcctgcagggctggctgtccattgctctggagcactggccaccaggaggagccattggagtgtgtgggtccctgtgaactagccacctggcctatctgaaggccatcccttgcccctcctacttcttcctctgaccttccctgctcactgtgcaacccaggctggcccagaccacaccattctcctgcctcagtcccctctctggtagggcctgggtatttagacagtgtcttgtaggagaagggaggctctggacaagctctttggtggccagcaggataccctttgatagcctgaaccccttctcttcctggccccaacagaaggcgatcatggcctccaagcctgagaaaagggtggcctcctctgtcttcatcaccctggcaccgccacgccgagatgtagccgtgagtgaggaagtgggccaggcagcttgtgaagccagacgcgctcggccctgggagatgcttcccacaaagacacctggggccgcagtgggcaggagccccaagacctggacgccctctggcaagaccaatgcctcactctctggagtcacacctcagctctccaatggaggtaagagagcatctctaaggggacgaggacagagctagcaccaaggcagggagaaaagggcaggctaggggtcactcattcatcaagtgctgtccgtgtgccaggccgactctggaacccacctacctgcgcccgagtcctgactcttctccttttcagctccgggatgttgcaggtccctcagcctccctgtgcctcaatttcttagcaatagagatccttacgaatatgatatgtcacataaaaacttcaaagtatagttgtgaagattaagagctttaatacaggaccagcaagatggctctgccggtaaaaatgctcgctgggcaagtgtaaggacctaagttcaattcccagaacctacctaaaggtggacaggcagatcaactcctgcaggttgtcctctaacctccacacatacacacacatgcacacagatatacacatgtgcacacaggcacacacacagatacatgcgtgcacatggacatgcacatacatgcacatggatacacacatgtacacagacatacatgtacctggatacacccatgtacatggggatacatacacacaaatagacacatgcacactcacacacacatacacccatgcacatggatacacctgtgagcatatacatgtacatggataaacatacacacagagatacacaggcacacccatgcacacggatacccccatgtacacagacacacatgggtacatgggtacacacacagatacacacaggcgcacacacatatgcatacatgcacactaagtaagtaagaattgacaaaaacatctcacatgtcagaagagcaagcgtcacaatggagcctggtgccgccatcaagatggaggagtgactgaagacagctccttgaggtggctgctctgaggtctctgcaggacaggggacatggaaacaggtgcaaaggccgaggctgaagtgagctcgaagggtctggaagatgtcttacgctgattgtgcacactgctgctggcctgctgtgcagtttctttcctgccatgtgctggcgcgcgcgtgcctgtccaaggcgctcagtgcacagcttgtccctgtgacttctctccttcccatccccatttgaggcctggggattgaactagggtcactaggcttggtagaaaatgtttttcccactgggccatcttattagctctgggactgactttttagttttttttttgtttgtttgtttggtttggtttttgtttgtttgtttgtttgttttttcaagacagggtttctctgtgtagccctggctgtcctggaactcactttgtagaccaagctggcctcgaactcagaaatctgcctgcttctacctcccaagtgctgggattaaagacgtgcgccaccacacccagcttttttttttttttaagatgtatttatttatttaatgtatatgagaacactgtagttgtgagccttcatgtggttgttgggaattgaattttaggacctctgctcactccagcccaaaagatttatttattattatacataagtacactgtagctgtcttcagacactccagaagagggtatcagatctcattatgggcagttgtgagccaccatgtgattgctgggatttgaactcaggacctttgaaaaagcagtcagtgcttttaccctctgagccatctcaccagcccccacagcaactcttacagaggaaaacatttaactggggctggcttccaggttccgaggtttagtccgttattgtcccggcaggaagcatggtggtatgtaggcagacagggtcctggggaagaggctgagcattctgcatggggatcagcaggcagcaggaagacagagtaagccactgggcctgccttgagcttctcaaacctcagagccctcccccagtgacacacttcctccaacaaggccacaccttaaggtgccaatggctaagagcctatgagactcattttcattcaaaccaccacacatatgtgagaggtcaaccaaccaacgcagggaaaagaagtagggaagcttcctccgggcagctcccagggagcaaactctagctgtcaggcttggcagcaagtcctttacccacagtgccacctcctctcccgcttccattcttgctgatcctcctcagctcgtggtcccaggagcagagacacagttgggagaggacccagcttgcgatgcttctgagcgctggggtcctgactcacaagctctcctagagtgaggctcccaggttctcacactcccatcagcccatcagtcatacctagtcacctctgggcttgttccaacacagctgggccccacctcaaagctggagttgagactttaatttgcgttttttccctacctttctgggtagtaattacactttgtgaattttatatatatatattttttaaaaataactttttttttcaagacagggtttctctgaaacaactctggctgtcctggaactcactctgtaaaccaggctggcctcaaacttagagatacatctgcctcaggctcctgagtgctggggttaaaggcgtggctgctcagcatctttttttgcttgttttttctcacttcagccctgctcagctgaaactttatttatctattatatataagcacactgtagctatcttcagatcacaccataagagggcatccgatctcattacagatggttgtgagccaccatgtggttgcttgggatttgaactggggacctctggaagagcagtcagtgctcttacccactgagccacctctccagcccctgcccagcttccctttctcgctcctaatccttttccagtctctggattgattccaaggctggtactgtagcccagctgcacctctggcctggcctgtaggaagcctttgcttgccccagaccacaaaaccaaaaagaaaacaaaaactatttttctttcaaagcattcttttggttttatatttattttatttttacttatgtacacgagtcctgtatgtgtgttcacgtgggtgcaggcgctcgtgcgcgcccctctggagctggggatacggctggctgtgggcctcctgatgtgggtgctgggaaactgagcttggatcctctctgcaacagaagtagtcactaaccactgagcaacctttacagccctcatttaaaaataattttttttaatgtacttattttatgtctatggatgtgtttgcctgtgccagaaaaaggtattggatgccctggagttatagacagttgcgagctaccatgtggattctgggaattgaaccccagtcctctggaagaatagtcagtgcatttaaccactgagccaccccactggccccagatttatttttatttgtgtatatatgtgtacttttgcacatgggttgcctttatgtgtggttttgtgcaagtgtgattgtagtacagccagcggccagaagagggcgcaggatccccctgagctgcagctacaagtgattgggagtcacctgacatggtgataggagttgaactgggctacactgaacgctaaggtgcaaatgtctctggagggctttgggcaagttgccaggagtggaatagctaggtcacatggaagatttattgctttttattcccctattctaatttatttattgtgtgtgcataggatggggtggggggccatgccctgggacagtatgaagtcaattcttttaccatggaggttccagggatggaactcagatttggtagcaagctcctttacccacctagccatattactggcccaattgttaaggttttttgttgttgattttagtttatttatcttattgtttgggtttttttgtttgtttgtttttattttttttgagacagggtttctctgtgtagacctggctgtcctggaactcactctgtacaccagtctggcctcaaactcagaaatctgcctgcctctgcctcccaagtgctgggattaaaggcatgcgccaccactgccctgcaaaactttctctgtaaaccaggctggccttgaactcacagagctccaccagcttctgcctctgagtgtcagaatcaaaagtgtgtgccaccacatctagctcttagtttgtttgaaagatgtgtttatttttattcaggtatatgtgtgttttgcctgtatgtatgccgagtggctctggaagccagaattgggcattgaatcctctgaactgcagacagttgtgagtcactgtgtgggtgttaggaacccaatctgagtaattaattcataaggacagcgagtgctcttaactgatgagccatctctccagccccaattgttggggttttgagaaactctaggctgatttccgtagtggctagactagtttacatcccactggcggcatatgaagcccccatcagggagctggggtagcagggttccactttagtcccagcattcaggacacagaggttggtgggtctgtgtgactttgagaccatctttttttttttttttttttttttttttggtttttcgagacagggtttctctgtatagccccggctgtcctggaactcactctgtagaccaggctggcctcgaactcaagagatccacctgcctctgcctcccgagtgctgggattaaaggcgtgcgccaccacacccggcttgagaccatcttatttatacagtgagttcctggacagccagggctatgtagagagatgcccaacaccaccccacccccaaaagggacgagggtccctttggcccagctcatggctgttttctcagccttggctaccatcttggccatagaaccctgacggtgtccatcacatctgagctctggccttgggtcagttgctcaatgtaggcaaatcatcacctgtccgttcccctgacaagagccatagggtttgaggctcactttccaaagaagccattgaagattcagagagttaacactcttgcaagccagggacagcagttcagggtggactggagccagacctgagcttttacccactgctgcttggtcttctgggtgagtagatctgtgggactctgggcaacccatcccctttcccattgtaggatgctctctcccacctccttccctgaatgaggaggacctagacctcccgcctcctccaccgcccccttctgcctacctgcctctcccagaagaggagcctcctgtcttaccagggaagtcgctcatttccgacttggagcaactgcacctgcccccacccccgcctccacccccgccacaggtaaactttgagtgtccccaggcctcctcagcccgaggggtggggggagcttcccagaattaccaaggtggaggtgctttggttccttctgcttgaaggccatcagtctccaaagcccttccgagttccaaagctggtagaaactgggatttgtacaaagtaagttcaaggccggcctaagcaactgcatgagaccccctatctggaactaaaagaaagaaaagagattggggatagaggtagttcaaagatagagtccttgactagcaagcatgggaagagtcactttggtggagagagccccaggcacagagaagggatggttctggctcttgctgctcagcattcctgttgagctatagaagctgggtatttgctcctccagcctcagtttcctcatctgtacaatgggactaatcgtacttggagcccccctcagaaaaatagtcaagctgggaggatctggtgaggtccccaccagccgacttctcttctatctcctcatgtgtatctccctcccacccccaggctccatcaaagggatcgtctgtccaccctccgcctggtcacgccataccctcggaagaggagcttcctcctcctccagaagagcctgtcacacttccagagagagaagtgtccacgggtatggctgtgtgcttactctctgggtcttcaggggtcagaatgggcttcgcatgtgaagtgtgggagagcagggtcccgcccctgctcacatgacagcagggactgtctatacagtgtgtaactgctgaatctccatcgcagccatgtgcttgcttctggtttgctgataatgatgatgcttttgagatagggtctcatgtagtccaggctagccttgaatttgagatgtagccaaggctggccttctctttctccacctgcctcaggtagctgtcttcagacacaccagaagagggcatcagataccattacagatggttgtgagccaccatgtggttgctgggaattgaactcagaacctccagaggagcagtcagtgctcttaactactgagccttctctcctttctttctttctgagacagagtttctccctgtagtcctggctggacatccttaacccatgtttgtttgctttgagatctcactgtagccaaatctggacttcaacttgagatccttctgcctcagcctcctgaccgtcaagattgcagacatggtcctttaaaatttctttttctcgccgggtgtggtggtgcacgcctttaatcccagcactagggaggcagaggcagaggcagaggcagaggcagaggcagaggcagaggcagatagatctctgtgaggtgggggccagcctggtctacacagagttcctggacagtcactgttacacagagaaaccttgtcctaaaaatcaaaaacaaaaacaaaaagattttttctctctgtttttctgagacctcactccatagctggctctggttgccttagaactcacgatgaagacaggctggcttcaaagttgtggcaatcctactgcctcagctccatgctaggattacagatgtgggccagtatgccaaacttgttttttttttttttaattctttgttttgtttaattttttaattctttgtggggcatgggggatgtagcaagaaggttcagagggtaaaggcacttatcaccgagacttagtaacgtcacttctgtccataagtcccgcttggtggagcagactcccagaggatgtctccctggtctccactcaagatgtatacatgcatatacaaccgatcagtaaataaaagttaattctttttagttatttttttatttgtttactttgtaccagggtgtatgatgcaggaggattagaagttcgaggtcatcctcagctacgtagtgagttgggggctaacctgggctacaaaagactttgtctcaaaaacaaagaaccaattcagccaagcacatgtgccaaatggtggcacagacctttagtcctagcacttgtgaagcaaagacaggaggttctctgagttcaaggccagcctggtctacatagcaagttccatgccagctagggtctacatggtgagaccatgtttcttcctccccaccaccctcaaccctcaactcactctctctgcctctgtctctctctgtctcacacacacacacacacacacacacgcgcgcgcgagcgcgcgcgcgcacacacacacacacacacacacacacacacacacacacacaaaacagtttctaattttctcattttgcattttgagctttgagtctgttcttcattgctggttttccaagtcatctctgagcctgtttcccatcagaatatgcagtggctcctagccccgccccctccccctttaaggctgtgtgacagtcctccataggaactgtaggaaagtaggcttgatgggttctacagctgcctcctgatggatctgtagatggtttctcaccgtaaatgcactgagctgagtcgccttagcaggttatttcactgtgtgaggggttttctggggtaaattcctaaaagaggaagtaacctataaaaaggttggtgtttcaagttttgtattttttgtcaaatcaccttccttagccatcccagcctacgcacacccaccagcaggttctggctgtttgctagaaggttctacggcactgtgtgctttgtttaatttagccactaagcacttactcagagccctgccctaggcgctgaagacacagttaagtctagtctatagtgtcctccttccgggagacatagggagacagggggcaaatgtttttctaagtttgttatttatctttgacttaaggtagattgtagctatcttttttgctactttgtggcttctctcttccatggctttccaccttttaacgccccctgataccaagtaagagagaaaaaaaggttagggggaaacaaaagagatctttgagtaaagtcaggggtcaacgttattgttagactacttgctgctggttagcgactcttagttcctcccggcagggcaagtttgatcttcactgtcaggatctccaagtttcttcttgtttcttctttgtgcgtgactacttaacaaaccacacacagtatcactcagggccctatgtttataaaccctctgaacagttcccagaattcccagcatagaaactatctgcagctggcaacatcacacctctgcgagagctcgaagcgaatcatagcccagccgctgtggtcagtcaaagcacacctgagaacaaaatgaaaacatgttcccaaatatttctctgtttttctttctttctttctttctttctttctttctttctttctttctttctttctttctttctttctttctctctctctctctctttctctctctctctctctctctctctctctctctctttctttctttctttctttctcttttttgaatttatttttgtttgtttgtttcgagacagggtttttctatgtagtcctgactgtcctggaactcactctgtagaccagactggcctcgaactcaatttcgcctgcctctgcctcccaagtgctgagattaaaggcgtgtgccaccacgcctggctttctctgtttttcaaagacgccaaaacctcaaaattgtcactacaatacatttttggcactcaaaaattttgtgtggttggttttgtgttttgtttggtttgtttgcttgttccgcctgcctgcctcccatgtgctgggattaaatgtgtgcaccaccactgcctggcttgaatttttttttttttttttttttttttggtttttcgagacagggtttctctgtatagccctggctgtcctggaactcactttgtagaccaggctggcctcgaactcagaaatccgcctgcctctgcctcccgagtgctgggattaaaggcgtgcaccaccacgcccggccgaattttttttttttaagattttttttttcttgtgagtacattgttgctacctttggacagaccagaagagggcattggaccccattacagatggttgtgagccaccatgtggttgctgggaattgaatcaggatctctggaagagcagtcagtgctctgagccatctctccagcccagttctgatttgctgtcagtgctcctaactgctgagccatctttacagcctttttttttttcctttaaggtacagtcttacagtatagcccaggctagcctggaactctgtcttccttcatcagccttcagagtgctaggattacaggtgtaagccaccccacccaacatcagaatctcttagggtttttttgttttgttttttaagatttattttagccaaatattgtggtgcttgctttaatctcagcactcaaaagacaaaggtaaaatctctgatttttgagaccatcctggtctccagggcaatttttgttgttgtttggttttggttcttagacagggtttctctgtgtagccctggctgtcctggaactcactctgtagaccaggctggcctcgaacccagagatcctcctgagtgctgagataaaaggtgtgtgtgcccattgcccaactaggcccgactattttttcttatttttaattatatgtatatgtgtatgtgggtgtgtgcacatggatgcattatcctcagagtccagaagagaatctctggacttacagcagctgactgatgtgggtagggggaattgaactcaggtcttctgtaaagcagggtgcgttcttaagtaacgatccatccatttcttcagctcctctcatagcataatcagggtcatctgagtgttggcagtctcctgcactctctcagagatgagaccctgaaggccaactctgctttcttttcctctctctctctctccctccctccctccctccttccttccctttcttcctctctctttctccccccaacccttcttgctctgtagaccctcttcaattatcagttgaggaagcctttgaggctgggccctgcacacactgggggattgggaactgctttcctgggctgctgacagcctgtgtctctcctaccccagatgtctgtggtttctgtcacaagcctgtgtctcctcgagagctggctgttgaggccatgaagaggcagtaccacgcccagtgcttcacctgtcgtacctgccgccgccagttggctggacagagattctaccagaaggatgggcgccccctgtgcgaaccctgctaccaggtactcccctgcatgtagccccccgggttgcactgactgagctcagagcattggatgccttacggatctcctaagagattgggacactatgaacccatttcacagcctaggaagctgagactcagaaaggagcaaactcaaccaagcaggattagtttctgtggctgctataatgcatgcatctgtttccacagcaacagtgatgacaaagagatgtatttggttagaggttccagatcgtagtaagatggccttgccagtttgagcctgtggtgagacagtgcggtcgtggtgtgggcttccggaaggacatacccccgatcacatggaccaccattagatcccgcttcccaaaggctctcccacctcccaacattgccccctggagcccaggcctagtgggtgagtggagagcattccaaacaacggaaccacagtttggtggcttcaaaccattcaaacttcttatagttatggaggctatcagttcataaatcaatttcctcgggctcgaatcaagatgcctcccccatcctgctcttccggctctagaggaggcggtatttgctcgcctttttagctttggttggttggtttgggtttggtttcgtttggtgtttttcgttttggggtttttgtgtttggttttggttttggttttgtgtttggtttttttggtttttggttttttaaggattctctgtgtaataaccctagctgtcatggaactctcttggtagaccagactggtctggaactcacagagatccacctgcctctgcctcccttctgggtgctgggattagaggccaccacaccaggcctcttttgaggggtttccagactgaaacagagaggaaggtgctcttgagacctttgctccccaacttatgagtaatgagttagctgtgaaggtgtccatgtgttgccagaattcagaaacctgaggcaggggggacaaagagtttaaggacccaaaattatagcagcagaccctgcctcaaaaaaaaaaaaaaaataaaataaagaatttgcataccattcatcagcagtagtaatgtgtaaggatttgttaagggggctgggtatgctataacatatgcctgaaatgtaaatactcgtgggtggaggtgggagattcaggagttcaaagtcatacctaactacgtagtctaacctggggtacatgacacactacactatctcaaaaccagccgaaaaaaagtgtgtgcatctgtgtgtatgtgtgaaaattgctaagacagtcctcgggctaagcaggtacttcagtggcagggtgcttacttggcacacaaaaggctttgatttcagtccctagttctgaagaaagaagggagggagggagaaaagaaagatagaaagataaagacagagggggctggcgacaccccctggttgaggcatgtttgtgggttggccaaagcagaggctttctgccccaggatactctggagaagtgtggcaagtgcggagaggtggtccaagagcacgtgatccgggccctgggcaaggccttccacccaccctgcttcacctgcgtgacctgtgcccgctgcatcagcgacgagagctttgcgctggacagccagaaccaggtgtactgtgtggctgatttctacaggtaggaaggagactggggcttcgggaatggggagggcagggcggggctctggctggctggaggggtggcagggccaggccagtactttctcccatgctgactgaagcctgttagcttccccacctaattcacagggtgtctgcttgaggcgttgagtccctgagctccgacagactcctcatctgaggtgctccacaaaattctcagatgaagctttcttcctttctttgtgtaacagccctggctgacctggaactcatgctgtagaccaggctggtctcgaactcacagagatctgactgcctctcagagtctcctgaaggctgccgcagcacgcgtctaatcttcagaatttttatggctagggaggacagcggaagagtatgttttagcagaagtagaaactgcggcacacagttcccaaggcggaacgaagcttccatttgaagacttgatttgggagctgggtagtggctcagttggtagagtgcctgcctagcatgcgctgggtttccttccccagcaccacataaccaggctgtgctgggattgccaccgtaatcccagcattccagagggtcagacgcttaaggtcatccttggctaccctatcaagttcaaggccagccgaggctatatgagaccctgtctcaagaaaaattacagggcctggagagatggctcagggattaggagcaatggctgctcttccagaggtcctgagttccattctaggcacccgcatggcagctcacaactgtctgtagctccagttccagaggatctgacaccctcacacagacatacatgcaggcaaaacaccagtgtacgtgaatttaaaaacatattaattttatttatttatttatttatttttggtttttcgagacagggtttctctgtatcaccctggctgtcctggaactcactttgtagaccaggctggcctcaaactcagaaatccacctgcctctgcctcccaagtgcttggattgaaggcgtgcgacaccactgccctgctgggcagtggcattttaattttttaaaatgacatttataggaaaacttataggacttgatttgggaccttgctttcagaccctaggccatgtctctttccttgggaaatagagggatgggaagtagagggagggaggaaggagtggggaaatttatatatatacttatgatatgtgtgtgtgtgtgtgtgtgtgtgtatatatatatatatatatatatatatatatatatatatatatatacatgactactcttgctttgccctgtttgaaaataaagagatggggtgtggtggttcatgcctcacgtgtgatcagcatggactgtaaagtcctgtcttgaaagataagcgaacagctgcactccagaaggcagaggcaggtcgatctctgtgaatccaggccagccattgctacacagtgagagtctgcctcaagaataagtaaacaaataatacacagacaggactgccaagatggctcagtggataaagacgcttgccaccaagcctgatgacctgagttcaattcctgggacccacaaggtagaagcaaagaactgactcctgcatgttgtccttggatctccaaatacaactaaataaatacgctaaaagtttttttttttttttttaattaagcaaagtacaagataatgggtggcctggaaaactcatctcacatctgacgcttcccggggaaaactggcctctggctaattgcacaatgggtagctggattcatgccactgaccccatcctcccacccctgtcgggaagagtagacatcattagctgcgcagatgcggtcacctagcaacctcgggggcggggcgcggggtgaactgcagcttcacacctttgaccagctgattccttggtcagtgtgagtagttgactttcctggcttgtgctccctgtccatctaggaaatttgcccccgtgtgcagcatctgcgagaatcccatcatcccccgagacgggaaggacgccttcaaaatcgagtgcatgggaaggaatttccacgagaactgttaccgctgtgaggtgagtggagctgaggtgaagggctgtggccatgggcagccctgtgccagaatctctcctgctcactgccctcagcagaggctgagaaagatggagataaaaacataggtggcgagccgggcgtggtggcgcacgcctttaatcccagcatttgggaggcagaggcaggcggatttctgagttcgaggccagcctggtctacagagtgagttccaggacagccagggctgcacagagaaaccctgtcttgaaaaaccaaaaaacaaacaaacaaaaaaacaaaaaacaaaaaaataccataggtggcaaactggaccatgatggcgcacgcctctaatcccagtacaggaagcagaggaagttggaactctgattttgaggcgagccccaagacagccaaggctacacagagaaatcaacccactctcagagaaaacgaaaacaaaaacaaaccaaccacacatggctatatatcacagttaattgtgtgctcacattgcttactatggaaagagaatatgttccagaatggtgggtggtgacagcatcgttagcaagtgatatccctgggctatcactctacctcctgttcctgcctttactttgttttctgagtgtcggcacagcacatgggcatagctggctcaggtttgcatccttagaagcccccaaagtagactccactgtggggttctacccccaccgccaagaaggctcctggttggcctggcatgggtttgttgccatgatacgtaccataattaatagcaggttggttgaggaaaagatccgccattaagggaaatcaaagcaggaaccagggtcagaaaccatgggagaatgctgcctactggcccaaactctcttgctctggcatcctttcaggaagatttcttatacagcccagggtcccctgcctcagaattgcacttcctgcagtgagccggggtctcctacataaattagcaatcaagagaccgtccccatccccacagacctgccacgggcagatctgatctgagcagtccctcaattgagactcctatagataactctgagctgtgtcaagttgaagactcaaaacatggaagattctaggtgtgtctagagtgcagaaggcttaaggggtgagagctgatgggaccaggaaggggtaagcacttcaggctgagggaaggaaccagctgggctgcgctgggctgggaggctgcttagaactggtacagaaggcagctggagaaatggctaagcagttaaaaacactgactgctctaacagaggtcctgagttcagatctcagcaaccacatgttggctcacaaccatctgtaatagggatccgatgccctcttctggtgtgtctgaagacagcgacagcatactcacatacatgaaagaaagaaagaaagaaagaaagaaagaaagaaagaaagaaaggaaggaaggaagggaagggaaggaaggaagaaaggaaggaagggtagaggaaatgctggacaattggacagtgctcacacaagggcctgtgatcagaactgggtaactacaacttagtttttctttctttcttcccccccctttttttttctggctttttcgagacagggtttctctgtgtagccctggctgtcctggaattcactctgtagaccaggctggcctcgaactcagagatccgcctgcctctgcctcctaagttctgggactaaaggcatgtgccaccagcacccggccattttgatcttgggactgatccagcagtggggcttcaagaattgcctaactccctccctgacactgccagccccgtagctccaagctttctgtgctctggtgataaagacacaagtggtagtttttcacttgtgtggagagtcccagggcagggccccttaatcagcaatgagtaattctaaacatttattctcttgtatttgttttaaaagataacgcagggccatgaggaccttgggagagacactgattacttcctagggtctctgactttgtcagttagagttcaaggtccatgcagctgataatgtatcaggagaggccaatgaggaagattgagtgctgttagctcttccagagccccatagagtccgaaagtaccaagccttcataaaagcttggctaagcacataacccctatttcctgtccacagtgactttggctgaggctgcctggcaagtcaggatttggactccaggaaattacatttcagttgggactgcatttaaaccctgtcttaaactgacccttaaaaacaaacaaacaaccccacagatgtaaatctcaaactatagcagcccagaacagaactgggttccagttttcccaggggggaagagggtctccacctatttattgttcatgaccacctgactctggtccgcagtccgtgtcttttcttacagttgttggaaagatgacagtattcttagaggtggaaagtgctttttaattataagactgtcatacgcatcaccttaggaaatcacagcagtcttgggagatagcttatagtctccatttaagttggaaaaacctgaaggtggcatggtgacaaatacttgacatcctaatattgggaggctgaggtgggaaaatcgggagttcaggccagcccgggatagacttagttttccagagcaccctgggatgtgtagagggagtctttctcaaaacaaaaccgaggcggtggtaggatcaggagttcagtcatccttggctacttagtttgaagccagctttttatctttaaggctgggcagtggtggcacacgcctttagtcccagcactcgggaggcagaggcaggcagatttctgagttcgaggccagcctggtctacagagtgagttccaggacagccagggctacacagagaaaccctgtctcgaaaaacaaaacaaaacaaaacaaaaagatcctatctttaaatgaagaaggtggggggagctgaggtcccctggggaagctccgtgctggcgggatccaggcttggagacacccacacttgcttctgtatccccaggactgcagcgtgctcctgtctgtggaacctaccgaccaaggctgctacccactgaatgaccacctcttctgcaagccctgtcacctgaagcggagtgctgctggttgctgctgaagagtcccgatagctggcccttccctgacttggtttcccctcctgacttttcttgagtactttctttttgaacctcactgggcaccagcacactgctcagcccatagtgtctaaatgcacagacaggcttgagacactgggctttggcctcctagtacacagcaccccccacccccagactttctactcctctcccttcattgaccaggaggcctctcaccaccagactgcaaccctggtccatctctagtgctgccctgacatgtttatggggacaggtctcaggatgatacctgtgtctctgaccatgatgcttagctgcctagcagaaggcgctgagacctcagcttagattgtagagctaagttgtttgaagtgcgccttctcagccactccaaaaagtattttttgagaatataagtgtgtagtagacatgatagcacacacctttaatcccagcacttgggaggcagaggcaggtggatttctatgttcaatctagtctgatctactaaaagattcaaaacaatattctttggatttgggggagagaaatctttgaatttttctctttttctttttttggtggggtaaaatcagtaaacatcttcccttggttcaggggctgcgaagatggctcggtgatgaagagcgagctcttgctcctcttgcggaggaccagagttcatttcccagcatccctcatggaggctcataactacctgtcctgcaactccagtttccggagagctggcgccctctgctggcctccttggaaccttaatgcatgtggtgtacacgcttacactcaggcacacacacatacattaaaaaaaaaaaaacaatttagccatgtctaatggcaaacacctttaatctcagtacttgggaggcagagacacatggatctctgcatttgaaggcagccacagctacaatcttaaaatgcacaaactactggggtttggtggtgcaaatctgtgatcccagtgctgggggaaattgccagaagcttgcgacctgcttagacttcatagaattcccaatcagttttggccacattcagagatttgtctcagaaaataataataaatcataagtgcatagaacgtgaggtagcggcgacccagccttccttcctgtagaatccgtgctgagctgggctcaggatgggagggaggatggtcacgtgcctctgcttgcttccacaccctgtgagctcctgtgaggggctcccagacctggattaagagcctttgatttgctaaggaacaagttcgaggctgagcctccttcctccagactttactggggctctggcctctacaagtgcgcgcacgcgcgcacacacacacacacacacacacaccaaagaggctagggaaagaagtcacatctctttggtctcccatgtgtgccacccagcctccacttcagctttgctgctaggctgcccgtaaccactgtctctgtgaagccacacctagaacattctccctcttaaggaaattcactttaaggcaggcaagatgattcagctggtagaggtgctggcttccaagtctgatggccggagtcctgtctctgggacccacagtgaaggagagagccaattctataagttgtcctctggtttacacctgcataccaagatacacgtttgtgcacacacatctaatagagataaaatgtaaagtagaaaaaaaatcatttttgtgctttgtaacttctaagttgcacacagaaaaaaaataaacatatgttctttccttgtgtcttgtttttgtctggggtggggggagttggttgtttttatttgggggttttgtttcagtgagatagtgtcctgagtatcccaggctgaccttgaactaactatatcgtcctggattgccttgacttcatatcccttgtctccaactcctatattctggaattctaggaatcgaacccagagcctcatgaggcttcgttttaaatatatgggtaactgggggtggggggtgtcgcagtgatttgaatacacttagcatgtatgtacttgactggcttctgtccccagcaccaaattatataaatatatacatatatgaattaattaaagggaagctgataaagtggtgacgtgcattgggactcctgtgaggggacatgcattaccccgcttaggggtcctgggaaactaggcagtagtttgcaagttgcaggttctgggctgcgtcaaggcagatgtggcgttcagccgctagggggcagcatgagccagcgagttgatacccggagccaaggttctctggcttctcaccagcttctcaacgcgtagggttctcaatgctcatatttcggagagagaaaacatcccaaaagagtgacgtggtcatgaaacttttccacctgtctcaggaatgcggcctctcgaaaggagacctgcggccggagattaagccagtcgctggcccaaactgtcacctgtttggaggggatgcccggaaattcaagaatgagacctgggaacttggactctgaacaaaggaccatcaggagttgctggggagcgctgaacttgcccatggccctgtgccagggtccctctcgcctgaggccacacccaggtgcttggagtatgacctcactagcatgtagagcctgttgctgcctattcaaccagaaagaccttcagaggggaccaggtgatggctgagcaggcctgtgcatgccagaagtaccggaaggaagtggaggcaggaggagccaaagtttaaagttatctttgaggacatagtaagtaccaggttggcctgaggtactttgagaccccgtctggaacggatataaagaggtatagggtgtgtggcacacacctgtaattccagaaatggggggtcgggggcgcagaggacggaggattgcttagagtacaaggccaccctgtaatacgcagagagaccatgtctcaaaaacagacaagctggggcggtggtggcctacacctttaatctcaggggaggcagaggcaggcagacctctgtgaattcgggaccaacctggtctacagagtagattccaggataaccgcgggtgcattgtgaaaccctgtctcaaaaaacaaacaagaagggcctgcaagatggctcagtgggcaaaagctcttgccacaacgcctgacagccagagttcagagttcgattccccagcactgcataaatcaggagtggaagtgcctgagtgtggtctagcactagggagaggaggcgggaggaccagaacttcactctcattgtagaaatctcgaggtcagcctggaatgcatgagaccaatgtttctcaacacctaaacaaacaaataaataaatggacaaaaacctgaaggtcatttgtttatatatttttaatttgtttttattttataggtatgcctgcaagcatatctgtgcaccttgtgctttgagaaaccagaagaggataccagggcacctggcactagagttacaggacattgtgagctaccaagtgggtgctgggaatcgaacctgggtcctctggaagaagagtcagtgttcttaaccagtgagccatctctccagccccacaaagcctttttctttgcatttatttatttctgtggaggagtaactgcatgccacagctcaattgttcctacatgtgtgtgtgtgtgtgtgtgtgtgtgtacaacctgcagttctctccttccgccaatgaattctggcaatcttaagacttggtgccaactgccttcacctctgatccatctcactaaccgtatgtgtgtgtgtgcgtgtgtgtgcctgtgcacatgcctgtgtgtgtgtctgtgtctgtgagcgtgcacgcacacacatgtgtgtgttgctgcagcagctggacattacaaaaccatattctcagccctgagaagggaagcatttgatgtgttcggtccttgaaagagcttagcccagcccttgaactttagagtgttttgcaatgtcctctgctccccaagaaaaggcctggcatccggtgtgtgtgaatcacacttctcagaggctggactgtggactgaaccctttcatgacctgccttgtgtggaaaatgcctgggccttggtcaaaagctatgagctgtccacacagcacattcttcttgctggtggctggatcccagcttttccccttgtctggaagctgttttatagctctgtaaaaggcaggtgggtaaaaatcctgtcctgtctcggtaggtttcccaacaccttccccttgtggagaaactgatatctgttagcacacagatttctccatagctgttctaaactgtgccgtgtggctgctcttggagccgaggacaactcccacccagcttttccttccttatatggggccggaacctgtgtcttctgagagtctggggtctaccaatgagctagcctggaaaattttcacttaatacttcctttaccaggtgatttttttggaaggcttcatcagggggaccccctaaaggaagtagggtaacagttaggaagcagctgcctcggggcagcctgggaaagagcgttgagctgacagagaagggggaaggaactgaggaagggacagtaggagggacaaggtgagttctggttggctgctcctcttgttctgagaaaacctgtgagttttgagtggagggtggggaataactgacagtctctacattcctgttttgggtgaggctggaaggtcaggagaaaggcagccctgtttcaccagggttaagactcagggtctggcaagttcttagtcaggatacgtgaagtcctacccacaggaacaggccccatttgggggggcacaagccacatttggggggcactgaatcttggcctcccgaaggggacatccaaacctgtcctttgcacaaggaggccagggctccaggtgacaccactagacaattcatccactgtggcctcacaccagtgggtcctcccgtgtctgctgctcatcgattttgttgtgaaagggtctcatgtagcccaggctggcctccaactccagctgtggagacccgggtgacattgaacccctgatcctcctgggtgctgggattgcaggtctgtgctactgtgtccagctttcccatcctgggctgactcctgctataggcagggcagtgctgggtaggtagaagcaagtggaagcgtggactagggtctgttccactgataccctgaaaacggaggcaggagaaagagccatgcatggaatttgagagaaacagcagggcaaagagtctaccttgcagagggtgttcaggacacaggtccaggggagtgggtggtgacaagacagacaatcccaacaaatcccaaaggtggcaagtggtggcaagatggagtggcatgagcctggtagaattttagagatgaaagccaggcatggtagcatacgcctatagcccggcccttgggactcagaagcaagaggattattacctgaggccgacatgctctacatagtgtgtttcagtctagcctgagctacatagggagtcccttccttgaaggaaaaggaaaagactctagaggtgagaagtctcccttcccggctggccagcagccgcacctaggcgtggcttccaggcttccactccgaggttctccttacccctcccacatgctgttaccttccaacccccacttacagacaacatcagcctgtggaggcgggaaggctgaggaatgaatggggctgtgcagatgaactggagtcagacttaggactagacaggcagccactgtcttaaaaagcaggacaccaggtcgaatccactgtctcctgcatgagatacggttcgacccggagctctgccattatggctctgccatgtggttgacacctctgtctcctgcgggagataagtgtcggcccggagctccgtcattaaactacctcatgcttttatatcaaaaaaaaaaaaaaaaaaaaaagcaggacaccagcactcaggaggcagaggcaggcggattctgagttcgaggccagcctggtctacaaagtgagctccaggacaaccagagctataaagagaaaccctgtcttgaaaaaccaaaaaaaaaaaaaaaagcaggacagtggcctccaagggtgagagccatttgccccagaggaagtggtcactgggtccaagggtcaccctcctccctccttgtgcactttgaccccagccctgaggcagacaccacctggactcctggggaggtgggagggagtagcttgcctgggtggggcatcagctgtcctcctgtcctccatctgccctttgggcaccgactaggaggccacgtctgcacatcatgcccagtccccccacaccctccgtctgaggctggtaagtttccactttggctcctctgtcgtttgagtcaggattgacctaacacctaggagaggccacaggaagctgtgagcttccttctcctgggcctgagctctgtcggctttcgtcctccgacagtgtccttccactctctcaagggtggatgatcagaaatggcagagaacaacgtgccaccactgtgctggcactctgatgccagaaacggcatccaccactagaacaaaaagtggctgaagggcagggcaaatgactggggaactcctggacccaggatcctggggagcagccccagaggcccaagtggcaaccactgacgaaagacctagcaggtaccaggcactaacaaggcaggcagccctaggggagggtggtatgtccccatgttatacagggagtaacctggagtgcaaaaggcatgatatccacaaaaggctggcccatcaggctttgtgttagcattctgcctaagccccacagttatctggcaacagccaggtgtgctgacccactaaaaaaggggctgttcacccctcccttgctattctcttcccccctccccattctctttccccttctctctccaggtgctcatggccagtctctattctcttcctctccttctccatctccttcatcttctcctcttcctcctcctcctcctccttcttcttctctctctctctctctctctctctctctctctctctctctctctctctctctgcctataactcccctccccaggccctgaatgaactctattctatactctaccttcatgtgtggctggtccctaagggggaagggatggctcagcattggcccactgaggcacccccccttcccctatacctgattgcacctccatagaacatatcccccgctccctttatctttgtttgtttgtttgttttctttttcaagacagggtttctctgtgtactcactttgtagaccaggctggcctagaactcagaaatccgcctgcctctgcctcccgagtgctaggattaaaggcatgcgccaccacacccagcttctctttatcacttcactttgtgtgaagacagacagacatgtgagcttccctgagggtaggtgggaaggtaggcagagggcagattacctctgctgggatagctaaagaatgcggaaacaaccaaaagcaagggagtggggttggtgcagtgaggaacagaaggtgctgggccagaggtcagtctgtggtcacaggacgtgaaccttagctgcccccgcccccatgtgacttgtttgtttccctcaattgtcagcgcgcacagagcagcctgtacaggccagcccttagtaagtatgtgtggaatgaatgcatccaccctcgggaatttggagagaggtgacttacaaactggaacccagagagtcatgtggaaattggtgatggcccacacacagcccttctggaaactctaattgtcttcttccagaccagatcaatcaatgtctgtaagagtgctagagagggctgaagaggtggctcaggagccaaaagcaacagctgctcttctggaggacctgggttccattctcagcacccacatggcagctcacacctgtctgtaattcccgttccaggagaacagatgtttcttaggcatagtgcatacctttaactacagcattccaggaggctgaggcaggaggatcactccaagttcgaagccagtttcagaccagctaggattacatatctagacctggtcttgaaagagagggagccagctctgtggcagctctatggcacgcagcagagtgtcacccctctctgttgtgaagaagtgacacaccagaagagggtgtcagatctcattacagatggtcatgagccaccatgtagttgctgggaattgagctcaggacctctggaagaacagtcagtgcttttaactgctgagccatctctccagccccataaacctatttttttattctatttatttaggcctcttacgcatctgctactgagccaccacaccctcagacccccaaattatatgatacatatgcatacatgcacacgcacgcatatgtcatatacacatatatagtttatttgtgcgtatgtatgtaaataggcctgccgtggcatgcagataaaggtcagaggtcaagttttcggaagtgagctctctccttcaagttctatgtgggtctcagggacaggattcagggtgtgaggcttgtgtggcaactgcttttacccatgagtcacctggagcacagccctctggtttgctgtgacacaacctccttatgttgccccagcctggacaggctgtagggctgacctggaattcattatgtataactgactgagctcactggtgcggtgagcctccttcagctacctcccccgggttactctgctccttatgggaggcttttgtgataaccctatacaacagctacattcctgggccaccctactccaggatcctgagtaggttactcctgggggttcttatctgacttccacgggccatccacacacctgggtgcacacacaaaaaccattttttttttaaaaaggtttatttatttttattttttggattttcgagacatggtttctctgtatagccctggctgtcctggaactcactttgtagaccaggctggccttgaactcagaaatccgcctgcctctgcctcccaagtgctgggattaagggtttatttatttattgatttcatgtatatgagtacactgtggccatcttcagacacaccagaagagggcgtcagatcccattacagatggttgtgaggcaccatgtggttggtgggaattaaactcagggtcttaggaagagcaatcagtacttttaactgctgagccatctctccagcccacaaaaacaattcttgagacagggtttctctatgtagctctgactgtcctggaactcagtctataaaccaggctggcctcaaactcacagagatctgcctgtctctgcctcccgagtgctgggttcaaaggtgtgtgccatcactgctcatcgtaaaatataattttgtgaaagccaagagggctggagagatggttcaccagttaggagagcgtgtgttgctcctgcagaggaccttggtttgattcttaacacccaccatgagggctcactgccatctgtgacagcagttccagaggatatgacacactcttctgaacatgccacatgtggtacccagacatgcacgtaagcaaaacactcaaacgcataaaataaataaacacacacacacacacttgctctgtagaccaggctgaccgagaactctcaagtcctcccaagttgggatcaaaggtgtgcgccaccaagaaaagccaggaggagcttgtctgattctggccttcttcctgcagtgataatatgtgtagcagtcaagtttatctaacccgatttgtctgcctgacaagtcccacttgtacacccacccaagagctatctggatttgtgaatgaaagacacacacacacacacacaaactacacacacacacacacacactccagttgatgttaaatatgccttgatgaggtcaaagcctgggcagttctaatcttccccgcagctagcacacattaccctctggtactgctagcttaatggcctctaactccatattttatctttgctgccctggctccttctgggcagcccttccgggcccattccttctctcctacactccggatgattttccttctgcagttctaaatctaatccgtctccctccttcctttctcccaatgcctagcctgtgaaaatctaaaggtctcgcctcagtctacctgcctggacattggcagttggctctttattgattgatcagaaaccaattggggacaaggatcttcagcgtttggacacacagattcacaattttgggggcccggattacttcaaagcattagatcccatccccaacacatgtgttcaccccccagtgtgtgtggtttgtctctgaaggcccagatttttatggtcactcataacagagtcaaagtctgagaaagagaaggctaagatatgccctctgagccttcaggggaaataagggcaaagtctcaagtccttttattatttttttttccgagacagggtttctctgtatagccctggctgtcctggaactcactttataagccaggctggcctcgaactcagaaatccgcttacctctgcctcccaagtgctgggattaaaggcatgcaccaccaccgcccggctcaagtcctattttttgtatattggtgtttggactgtatgtatgtcagtatgggggttgttggatcccttcgcaaccccattggactacatagtgtcttctgccaggtaaggacatgtgcagctacaagggaggggggcatggagggcgtcttgtctagaaggaattaataaatacaagctcattgggaagtgcctctaaattagggttagtaagccctagagtgcttccattctaggaggtactgtgtgtgtgtgtgtgtgtgtgtgtgtgtgtaaagaatagtggactagagacatggctcagcaggctgctcttccagaggaccccagttcaattcccagcacccacatggcagcttacatcctgtttccaagggacctgacaccctcatactgaaatatacacagtcaaaacaccaatatacataaaatacaaataaattaatatttaaaaatgaaccaaggaaggccggctgcgatgacagctcttaggaggcagaggcaggtagatttctgtgagctccaggccagccaacttgagctgcatagtgagaccatgtctcaaaaacaaatcaacatcaaaaaaccagtgcatgctctctgtccagagccatctcttcagtcccaactagggtagactttaaaaactattcctgagccataggctacgcttggggaatgcctacagctaagtctcagccccttgtatttccttaatggttgggggggggggctgaggctaggggagtgaccctagataagccactcccatccctgccttccatcctggggctcctggcagtctgaggactcatcaccaaacctacttgttcagattgatacttcccccagagccaaattcggccttttcccaaaagtgtgaactgcattggatcaaccggttctaaaagtggatggcttatcaccttaggccagtggttcccaacgttcctaacacttcgtgcaactctttaagacagctcctccgttgtggtgacccccaactagaaaattattttcgctgttacttcataactgttatttttctaccgctttcaattgtactgtttctgtgttttgcgacggtattgtcttaggcaaaagggtctttcagc

SEQ ID NO: 300 - DNA, 3115 bp, Mus musculus
aacgcagaaaccatgggaaggacacggaagccttgagggtggcgtggacagatctctgtggcaaggattaatgtccagacttggttcctattggctcctgactctctctaccaggcagccagagcccagaccatgtttacagggcctcctcaatccccactgtggaaggaagtttggcacctgcctatcggtgccactgatacccaggctggtgcaggcgacttttagccaggacaataccccaactggaagcagcaacagcagcagcagcaggaggaggtggaacagaggccaggggtgcaggacagctgaggactttcaggttgctggatcctctgaaaggattccaagcctgctggagggccaagaaaatccactctaagtcttgttgggactgcgtgacagaggctccctacagctgaggtttgaaggctgagctctcgactctataaattggagctggcctgaactttggaccttgtcttccagtaggaaatcagtctctcagaaggcgatcatggcctccaagcctgagaaaagggtggcctcctctgtcttcatcaccctggcaccgccacgccgagatgtagccgtgagtgaggaagtgggccaggcagcttgtgaagccagacgcgctcggccctgggagatgcttcccacaaagacacctggggccgcagtgggcaggagccccaagacctggacgccctctggcaagaccaatgcctcactctctggagtcacacctcagctctccaatggagatgtctgtggtttctgtcacaagcctgtgtctcctcgagagctggctgttgaggccatgaagaggcagtaccacgcccagtgcttcacctgtcgtacctgccgccgccagttggctggacagagattctaccagaaggatgggcgccccctgtgcgaaccctgctaccaggatactctggagaagtgtggcaagtgcggagaggtggtccaagagcacgtgatccgggccctgggcaaggccttccacccaccctgcttcacctgcgtgacctgtgcccgctgcatcagcgacgagagctttgcgctggacagccagaaccaggtgtactgtgtggctgatttctacaggaaatttgcccccgtgtgcagcatctgcgagaatcccatcatcccccgagacgggaaggacgccttcaaaatcgagtgcatgggaaggaatttccacgagaactgttaccgctgtgaggactgcagcgtgctcctgtctgtggaacctaccgaccaaggctgctacccactgaatgaccacctcttctgcaagccctgtcacctgaagcggagtgctgctggttgctgctgaagagtcccgatagctggcccttccctgacttggtttcccctcctgacttttcttgagtactttctttttgaacctcactgggcaccagcacactgctcagcccatagtgtctaaatgcacagacaggcttgagacactgggctttggcctcctagtacacagcaccccccacccccagactttctactcctctcccttcattgaccaggaggcctctcaccaccagactgcaaccctggtccatctctagtgctgccctgacatgtttatggggacaggtctcaggatgatacctgtgtctctgaccatgatgcttagctgcctagcagaaggcgctgagacctcagcttagattgtagagctaagttgtttgaagtgcgccttctcagccactccaaaaagtattttttgagaatataagtgtgtagtagacatgatagcacacacctttaatcccagcacttgggaggcagaggcaggtggatttctatgttcaatctagtctgatctactaaaagattcaaaacaatattctttggatttgggggagagaaatctttgaatttttctctttttctttttttggtggggtaaaatcagtaaacatcttcccttggttcaggggctgcgaagatggctcggtgatgaagagcgagctcttgctcctcttgcggaggaccagagttcatttcccagcatccctcatggaggctcataactacctgtcctgcaactccagtttccggagagctggcgccctctgctggcctccttggaaccttaatgcatgtggtgtacacgcttacactcaggcacacacacatacattaaaaaaaaaaaaacaatttagccatgtctaatggcaaacacctttaatctcagtacttgggaggcagagacacatggatctctgcatttgaaggcagccacagctacaatcttaaaatgcacaaactactggggtttggtggtgcaaatctgtgatcccagtgctgggggaaattgccagaagcttgcgacctgcttagacttcatagaattcccaatcagttttggccacattcagagatttgtctcagaaaataataataaatcataagtgcatagaacgtgaggtagcggcgacccagccttccttcctgtagaatccgtgctgagctgggctcaggatgggagggaggatggtcacgtgcctctgcttgcttccacaccctgtgagctcctgtgaggggctcccagacctggattaagagcctttgatttgctaaggaacaagttcgaggctgagcctccttcctccagactttactggggctctggcctctacaagtgcgcgcacgcgcgcacacacacacacacacacacacaccaaagaggctagggaaagaagtcacatctctttggtctcccatgtgtgccacccagcctccacttcagctttgctgctaggctgcccgtaaccactgtctctgtgaagccacacctagaacattctccctcttaaggaaattcactttaaggcaggcaagatgattcagctggtagaggtgctggcttccaagtctgatggccggagtcctgtctctgggacccacagtgaaggagagagccaattctataagttgtcctctggtttacacctgcataccaagatacacgtttgtgcacacacatctaatagagataaaatgtaaagtagaaaaaaaatcatttttgtgctttgtaacttctaagttgcacacagaaaaaaaataaacatatgttctttcc

SEQ ID NO: 301 - protein, 302 aa, Mus musculus
ALDSINWSWPELWTLSSSRKSVSQKAIMASKPEKRVASSVFITLAPPRRDVAVSEEVGQAACEARRARPWEMLPTKTPGAAVGRSPKTWTPSGKTNASLSGVTPQLSNGDVCGFCHKPVSPRELAVEAMKRQYHAQCFTCRTCRRQLAGQRFYQKDGRPLCEPCYQDTLEKCGKCGEVVQEHVIRALGKAFHPPCFTCVTCARCISDESFALDSQNQVYCVADFYRKFAPVCSICENPIIPRDGKDAFKIECMGRNFHENCYRCEDCSVLLSVEPTDQGCYPLNDHLFCKPCHLKRSAAGCC

SEQ ID NO: 302 - DNA, 41061 bp, Homo sapiens
  misc_feature (1)...(41061): n = A,T,C or G
aacctctgcctcccaggttcaagcaattctcctgccttagcctgctgagtacccgggattacaggcacctgccaccacgcccggctaatttttgtatttttagtagagacagggttttgccatgttggccaggctggtctcaaattcctgaactcaaatgatccgcccgcctcggcctcccaaagtgctgtgattataggtgtgagccactgcacccagcctcatgactgactatttatttagaacaaggaaaaaaagcgcaacaaataactgcagaaatacaattttaactggtttaagaaaaagtaaggaccgggcacggtggctcatgcctgtaatcccagcactttgggaggccaaggcaggcagatcacgaggtcaggagatcaagaccatcctggctaacacagtgaaaccccgtctctactaaaaaaaaaatacaaaaaattagccgggcatggtggcgtgcgcctgtagtcccagctgctggggaggctgaggcaggagaatggcgtgaacctgggaggcagaggttgcagtgagccgagatcgtgccactgtactccagcctgggtgacagagcaaaactctgtctcaaaaaacaaaaaaaaaaaaaaaaaaaaaaaagaaagaaagaaagaaaagaaaaaagaaaaagtaagggagcccatagttgtactccagtctgggcgacagagcaagactgtctcaaaagaataaaaaataaaaagtaagggaaaaaaatgcattgactctggaggtctggtagtaggattgcaggtatggctggatccagcagctgatgaaatcagttatctttctttcctatctctttgctctgctgtcctctgtggtggtccaagtggggggcaaaagtggtgtcaagcttgtattctgccagccaacaagcccagagagctgatcttagaactaacagccactatgattggctggacatgggtcatgtatacaccaggcactgagagtggaagagaggttccccaaacagaaactgagtgctgttatcagaatcagggaaagtagtgctggctatcaggagccatggatgttccttggattctcttgcaggacaaagtcacgtccttcccttcccttcagaactttgtccctcttactaaaacttctatccttcatgtggtagggagagcaaaggaactcatctctgaacacctactgagcatcaggtatttttacccacatttaccccaccagattcttgctatgaagccacaagggacaaacctgggttggcaacccctcggttgcaagaggaaactgaggcccagagagaagtgatttgcccaaggctggcaagtggcagagctggaatcactcccagatactgatgttactcacagctgtatctgtgtccccatctgacccggccaccatgggggagctcccttttctctatgctgctcctctccccgccctgcctagcacagggccccacacacagcagcgcccaggaaataagcattggactgacctgactccaagcaggtagggtggaagatggaggatggaggaaggagctgggaggcccaaggggcttctgaggctgtctgccaagctgacctctgacctttaaagcccatgttttcccttctgccccctttccctgggaatattcgtccctattctcacactggctcctccccatctcagcttaaccctcacctcctcagagaggatttccccccacaccccacaccccacacccaccccacccccttttgtctcagaccccttgtccattccttcatagcaccttttactattggttattgttatgttaatttgctttatggtttgctctacccaatctccctgtaaggactgtggggacaaggactgatcatgtctgatttgatcccgtcggctccttgactcatgcattgcacacagtaggtgcccggtcagtgtctgctcagtcaaagctctccactgtggaggtgccacccccgccccggcaagcagacttgccctcaaacctctcttccaccccttccctgccactcagggtctcagctgccaccatcctaatagaagattgagccccttgcctgctggagccatctaagggagaagaaagccgttgtgagcctggcagggagggcggagggcagcagagcctctgagctggcagacaaagggcgtgtgttctcatccagcgcacttcctgggtttccgttgcaggaagtttggcacctgccgatcggtgacatcgacacccgagctgctgcgggccaggacgaatccctccatccgggagcagtggtggcggtggaacaggtggcctggggtgctggaggcaggtaagcagaggcagttgaacccctcattccccttggactgtcccagagcaaatgtgggaagcctgggtcctagactaagtcagtgtgaccttgaacaaggccccaaatcaactcttcgttgcctcactatcccacctgggggtgcaacaggtggttcaggggctgtcatggaggtgagggcaggcagctccacttttatctcttaaataaacttctgggtcactaagcatttgcaaaggggttctacagccaaaagcgcctgaaaacccccagatcgcaccttcctcctttgagtccttcccgtctctgtcgttcagagggtatggggaagtctcctccaaagggtgctgcaaagctggagttttggggggcaggggcaggatatcactgccaagccaggaatgagccgagcagggactcagacagccttgagtcccagcctcgccctgctgcacagaactctcagcacctccaagccccagcttccgattctgtaaaggatggcactggtacctgttcttgagactagcagagctgtgtgcccagggacacagcggctctggtttgaatttggctctgccatttgcccctagtgtggccttgagcctctcggggcctcagtgtccttgaccgtgaacaggaatcatcagccctggtgctcatggctcttgtgggattaggatggggatgaggatgggtaccagcacctagaaagcccctatcaatggcagctcctgggactgctgctgttactgcagcttggctgagaggatcaaatgggaaaaggggcgacaagagggatgggaggggcgatgatcagtgggtgagggcggaggcagcctcctctgaccctcataaaccagcctccctcagaaacagccccagagccaccctggaggggtgactgtagctgaggggttgcaggacgggccagatcctgtctggccaccccgcagatggcgctgggtccagcgctcctcaagcctcagccactgtggctttaatcaaaagaacaatctgtctgcctctgaatcagacccagattcctttccccacaatgtccctgaggcctccagggacccaggcagtccatcccggccccatcccgggccccagagtccaggctctgcctcccctcccgctcccgtcctaattgctccagctgggagggggagggtcactggatgtggagggaggggttcagccacagggccagccgggccctgccttccagagctcctggagcggcctgtcccccgggacaccgggacccacctgcagagggcttaccgctcaggagagcagaacaaggtgacctgctccactgggggtctccgagacccccaccctcaggaacactcccggaaaaagcccccaacccagcatatattaaccactattaatcacagtcctggctgtaactgtcaccttttatcctcaggccaacctggagaggtaggcagtggctacctccactttacagatgaagacactgaggctcaggaggtggcgtgactgctccgggtctcacgcttagtaaacggccgcagaaccctggtcggtttgacgcaagaccctggcggatcccagagccaaagtaagcgctcacctccgccggacagggtaggtggggttgccaacccaggagagcgagggaagggggacggcagggaccactcggggtccatgaagaacgcgaggggatgggcagcggggagggaaggaaacccaccccgactccccattctcctacccccactccccatccctcccattcccccatcgcccccatccccattcccccccattcccaccccctggcctgtgccaagggggaggggaggcgtcgtccagggaacaaagggagggggaaggggcggcgcggggcgcggccgggcaggttggggggcaggtaggggccgcttccgcggggcgggaatcccgcgccccctccccccgagcctcaccttttatggtaaagcggcgcggggcggcggggcggagggagccgagggggcggggagggcggacgggcggaggggacgggaggcccagcggctccgggctccgctggctcgggcgtcggatcggagccgccggggcgcgggcggcccaggtaagcgggccgggtgggtgggggtcgcgtccctccgtccctgtccccggtgcacacaggtgacagcgccggcagtgctcggccggagcctgctcggtcgccagccgggacccccggcgcggcgcccctggaggggcctgcgggtggggggtgcggtcctcacgccctttgcgtcccagtctcttggtctctctccccggagtcggggagtcggcaggtccggggcgagggctcagtgaggccggcggagggccgagtcccagcccgggagcgggagccggggacccggcgcgcagggcggaagctcccgcacaaaaggccggagtcccgcacatggatcgaattaaagctccggcggcgcccagcggtgaccccggcggccgccctgctcggctgcctgcggagggtcccgcgtttccggagcccgggggcgctccaggccccttttcctagccagggtcaggcaaggggagggacgggtcccggggctgctcctctctgggcctcacgcgcccgtcgggggctgagaaggtgtggagatgggcgatacccaggtgtgtgccctgggatgatcttggcgtcggcccctacccctcacctcccacccaagcctgaggaccccggggagaggctggggccgcgcccagattcctgctcttaatgacgctgtaggttctgtccgggtcctggaggcacccccagccgagcccagcccccgggctgcttctccctctcagctgctgcctaaccagctgtccttctctttgcaccttccaagggcctagaccctgagtcttctttccttatatatcctctcagccgccctagggacacactcattctcactttatgaaaaaacgaggccagagagtttctgtgacctattcggggtcaccccgcaggaaagaagtggggccgcgtgtgaacccagctctctacctcctctgtttccctggggtgggaaagaggttgagggaacccctcccctaagttgcagggtgggaggggttggggcacaccccgccacttctgcctaaatttaattccgtacccaaaggtagactgctttatccggtcattaaagaacaaagctggccgggagcggtggctcacgcctgtaatcccagcactttgggaggccgaggcgggcggattacctgaagtcaggagttggagaccagcctggccaacgtggtgaaaccccgtctctactaaaaatacaaaaattagccgggtgtggtggcgcgcgcctgtaatcccagctattcggcggctgaggcacgagaatcgcttgaacccaggaggcggaggttgcagtgagccgagatcgcaccactgcgcagcctgggccacagaatgagactctgtctcaaaataaataaataaataacaaagcttaagccgggtgtagtggctcaagcctgtaatcccagcactctgggaggccgaggagggcggatcacttgaggtcaggagtttgagaccagcctggtcaacatggtgaaaccctgtctctaccaaaaatacaaaaattagccaggggtggtggcgtgtgcctgtggtcccagctactcaggaggctgaggcaggacaatcgcttgaacctgggaggtggaggtttcagtgagctgagattgcgccactgcactccagcctcggccacagagcaagattctgtctcagaaaaaaaaaaaaaaaaaaaaagaacagagcttagaggtggccccagaggtttttttgtttttttttttctttgtagggaacaaggagtaggaaggaggactgtgggggtgaccccccctgagctgcacattctctgccccaaggctgcagcctctagctggtctgggtggctggctggatccctgcctccttccttcctttggacaggaaatgactttccttccctttgttcccacttttctccacttatctaactggatctgtgattcgctctctgggggaggaagagtgggggcggagggtcccctgggcacagctgactgggagatggccccagggaacttacacacagcctgctcccagctgaatcggtggcagtgggacgggagggaagccggggctccctctcccgatgggattgacagggctttgaaactccccagcttagaccccctggggcctgaggtccctgcagtcactgcttgggaggtataggggctgcccagctgtgaacatctggcctcagtgctggacattttccgagaagccaggcagatccgacttcccggaggagtgtaggaagggtcagggctgggtgggaggaggcagagggccatcccgaagccccacagcagcccctggggaccagcccggaacatgccgaccacaagatttctggtctggattgggccattgtagagtgacaacaggcctgggaacttgggcgactttgtgccacccaaggaaggaaaagcgtgtctggggacacacttttggatgatgttccattagaattccgagtgccatggatggcctgggaaagtcacttaacctcttggaacctcacagggtccatctgcaaagtgggggcaggatgggcatttcttgcagctagattgagaggctggtgggttttgaggcacatatagtacctggcacagggcctggcacgaaacaagtgccttatcagcaagtcgtttggtatttctttaaatctcacatgtactctgaacattgttgacaaaaatagattcttaaacttataacaaagtgtaaaactaaagcccgtgacagccagcctaagcatacgtacttccagacatcatttccaaacccagaagcaaaagacaagtactttaaaataagttttgaagctctttcctaatatattggtttcttcctcagaatagatattttattgtcagactgagctatgtattttagccaaacaacttaagggaatttaggagcacgtgttattgtttttattatcatccatcagtcgctgtgaacccaaagtggccagtgcactttgagataaggagggaagcctgaagagcgagatagaaaaggggacatttttagccctgggcacaggcattgggtgcctgctgaggactgatgtgctcactggactcccagctttcccacccatggccccacctcagccttggccacagggactactgtcagcaggaactacctgagagatgggaaataatgtccttttcctgacatcagggtatcagggtgccaccatgctctctgatttatgcttttctttttttttttttcgagacagagtttcactctgtcacctcggctggagtgcagtggcacaatctcagctcactgcaacctcgcctcccaggattcaagcgattctcctgcctcagcctcctaagtagctggggactacaggtgcatgccaccatttctggctaatttgtttttttttttttttttttttgagacagactcttgctctgttgcccaggctggagtgtggtggtgcaatctcggcttactgcaacctccgcctcccgggttcaagcaattctctgtctcagcctcccgagtagctgagataacaggcgtctgccaccatgcccagctaatttttgtatttttagtagagacagggtttcaccatcttggccaggctggtcttgaactccttacctcgtgatccaaccaccttgccctccaaaaatgctaagattacaggcataagcctccacgccaggccaaatttttgtatttttagtagagacagtgtttcaccatgttggccaggatggtcttgaactcctgacctcaagtgatcgcctacctcccaaagtgctgtgattacaggcgtgagccatcgggtggccagatctgggttttgatgcctgcactctgatatcctctaggcacacaaagaatgcagacaccggtcagacgcattgatagtgagcttgtgagccagcctgtcctgccctggggctatcatcgctttcgtccacccttggcagcaggaaactgcccctggagagggccaggaatcggggggtgccttgtggaagaggtgatgtttgagctgggcctctaagagaaagctgaaattcaccctgtgggggcaggacaggaaaaccatagaagaaacactgcaaggcaagagagaggacataggaagggcgagtggtccaggggctcaaagaggctgaggctgccgcagttggacttcatcctgaggtggtggagagccatactttttttctttttttttttttagacagagtttcgctcttgttgcccaggctagagtgcaatggtgccatctcacctcactgcaacctccactcccacgggttcaagtgattctcctgcctcagcctcccaagtagctgggattacaggcgcccgccagcacacccagctaatttttgtatttttagtagagatggggtttcaccatgttggcagggtggtctcaaactcctggcctcaagtgatccacctgcctcggcctcccaaaatgctgggattacagctgtgagccaccatgcccggcccatggaaggtttttgagtaaaggagaaagagattgatgctctagaaagatcagggttaggaggtgagaccagaggccatggagcctccccatctctccccttgccccctgcccactgcccaggcctgaaccaggacccaggttttggagattgggtggagtgagagagtctggcactagaaagcaagcaaggagggtgctggctcatgtgcagggctgagaaaggtcagagcagagcaaagtggccaagagcatgggctctgggttccagtgccacctcaccaccgtgtgaccctggacaggtgacttctctctgagtctcgatttcttgatgtgttaggtgggtgatgatagtgcctgccctgcagccaccttgtgagtgtttatgagttaatgagcataacgtgtgagtgtttatgagttaatgagtataacatgctcagggcagagccggtcttggtgagggcagctctcactgtgccctgcccactctgccgccggagcctagccctgacgccctggcagatcctgatctgttctctttccctcccaaagcagagctggcctgaacctccaggacttcagcccttctaggagaatctgatcccaggtgagggaggtcacttggggtgtggcccagcaggcaggcgggactccagactgggaacggaagtcagccctgctggggctgggagctgaagcatctgttccttcctcgcgggtgtgagacaaggaagagtgatcattggtgagggctgccctttgctcccctaggtgtgcaggttcgggggaggggcagtcaggacttttgggtctcacccctgtggccaagttccctggtgggtcctgtcttccccagcaggacacccccaccccttctctggctgggctgggtgctggactgagttgttgagatggtagggtggctggcctgtctttttgggaggagggaggctctctcctctcgggggagggtggctgtgtgtctgggtggcaatcctgtgctgtaccccactctgtccctagccacaccaggagctgaagccatggcctcaaagcctgagaagagggtggcatcgtctgtctttatcaccctggcacccccgcgccgcgatgtggccgtggcggaggaagtgaggcaggcagtttgtgaggcccggcgtggccgcccctgggaggctcctgcccccatgaagacacccgaggctggcttggcggggaggcccagcccctggacaacccctggcagagctgcagccacagtgccggctgcacctatgcagctcttcaatggaggtaagagctgaggggactttggggaagaccacgtcagaggcagaggtggggaggaaagggcaggctccagcgtcattcattcattcattattcatcctgacaaaattcacacatcaacgggaaacaaaaagatgtgccccttctgggtgggcaagggagcccgggaaatagaggctagatgtcagaatttccgggacattttcatgggttattgggattatgggaagaggatcttgggagtgtgggaacaagatcaaacttgcctgggaagggctgtcctgtcactggtcagcatggctggctggccgtttcgtctgccaatttaataccctcaagcagagcacggggatcttggggttcagtctccctgaagtgagataagttttaggtgaccagcttggtcatgcgcctggtctgactgcaggacacaaaggctggccccgggccctggggatgctgccagctgcttgaagccgtctacaccgaaggctgccatctgccatctgcttagtacttgtcctctcagagtcatcctcgagcgggtccaggaccccctttctgcccacctgccctgtggcctcgggtccccctgcttctctcttgaattcctgcccgcccatcatagcctatgggccctgcaccgggaggcaggcactgggagaggccacagcactcttactgcctctccaagacctggttcctgactccgtgagctcatcggagcctctttctctcacttccgctgagtcagcagcagcatcacccgggcctgtaccaacacagtcactgggtccattccagcacagccgcaggctcccaccccaagtatctctgattcagcagatctgccgtggagcctgagaatttgcatttttttttttcgagacagggtcttattctgtcacccaagctgcagtgcagtgcagtgcagtggtgtgatcacggctcactgtagcctcaacctccctggctcaagcaatcctcccacctcagcctcccaaggagctgggaccacaagctctcaccaccaggcccagctaatttgtgtgtgtgtgtgtatgtgtgtgtgtgtgtatattttgagacgaagtctcgctctgtcacccaagcaggagtgcagtggtgcgatctcggctcactgcaacctctgctccccaggttcaagcagttctcctgcctcagcctcccaagtagctaggattacaggcgcccaccatcacacccagctgatttttgtatttttagtagagacagggtttcaccagggttgccaggctggtctcaaattcctgacctcaggtgatctgcccgcctcagcctcccaaagtgctgggattacaggcgtgagccaccgcgcccagcctaatttttttttttttagatggagttttgcttttgttgcccgggctggagtgcagtggcgcaatctcagctcactgcaacctccgcctcctgggttcaagtgaatatcctgcctcagcctcctaagtagctgggattacaggcatgcccaccacgcccagctaattttgtgtttttcgtagagatggggtttctccatgttggtcaggctggtctcaaacttccaacctcaggtgatctgcctgcctcagtcccccaaagtgctgggattacaggtgtgagccactgcacccggcttttttttttttttttgagacaggttctggctctgtcacccaggctggagtgcagtaatgtgatctaagctcactgcagcctcaacctcttgggcttaagtgatccttccacgtcagcctcccaagtagctaggactacaggcttgtgctgccatgcctggctacattttttttaatttttagtagagttgaggtctcactatgttgcccaggctgctcttgaacttctgggttcaagcgaactgcctacctcggcctcccaaagtgctgagattataggcatgagccaccgtgcctggcctgagattaagtttcttgcctaaggacacacagcaaatcagtggcagagttagacatggaacccaggccggggtgatcccgaccggggccctcagcttccctctgtatggccatgtaggtaagtaaaaccctcccaggtccacctgggaggctctgaccagccctctctcctcccccattgcaggatgcccaccccctcctcctgtcctggatggtgaggacgtgcttcctgacctggacctcctcccaccccctccaccgccccctccagtgcttctgccttctgaagaggaggctcctgctccaatgggggcctcactcattgcagacttagagcagctgcacctgtccccgcccccgcccccaccacaggtactgcctgccccccgacccccagcaatcccttggtccccttggttggggcacggggagtctgggccttctgggcattcaggggttctaaacctggactttgtctggtgcattcttctgctcgggggcagtccctctttgaagctctcagaagtccctatttaggcaggtaaaaattggttaagtgtttcagggtccctggagagggatgccactgcctcgctgctgcacctgccgcagacacctccttcagctctgaggaagacgtttccctgagtccgacctaaatcccttaggctgcataggaaacctggatttttgtttgtttgtttgtttttgagatggagtctcgctctgtcacccaggctggagtgcaatggcatgatcttggctcactgtagcctccacctcccaggttcaagcgattctcctgccatagtctcctgagtatctgggattacaggcacccacaccatgcctggctaatttattgtgcttttatagagacagggtttcaccatgttggtcaggctggtctcagactacttacctcacgtgatccgcatggctcggcctcccaaagtgctggaattacaggtttgagccactgcacctggccaggaacctgttttttaaccctgggcccttaacagaggctgtgtagaaatggggggcgtcacaggccaagggcttagtccacttcagtccagcatccatggggaagcctggttgcaggagagtccttctaagtaggacaaggagcagtggctgattgagggaccccagtcagctgccactgtgaccttcctgctgagagacttacgcaggtcccttgcttccctgggccttggtttccttctcggtacaatgcggctaattgtacctgttaccacccagatgaggaacagagctgggagggctgcatggggtcccactggatgactccccgtctgcatccccacaggccccagcggagggaccttcagtccagcccggtcccctcaggcccatggaggaagagctgccacctcccccggcagaacctgttgagaaaggggcatccacaggtaggtgcacagggctgagaggatactggggtgatctcatggggccagcatgggcttccaggtagaaaccaagagagtgaggacccctcttcccatccccaccccagctcatgttaacaatgatgggctttgtagttcggcatccatttaatttgtattgctttagcctttttccctttatacctaaattctatttaaaatgttagtctgcagtttgctatgatagcaaaaatgtcttgaattttttctcactattttattttctgaacacctaatgccctcacacagtgcaaaataaacagcatgagtggggacacagtgagaagcctgcaacctgccccatccccctaccacccggtttccttccagatgggtgtcctctgtcattgagctctcatgtatcctgccaaagacactatgcacatacgagcaaatacaaatatgtgtccacctgctccctccccccatttttccataagtagcaaactaggctcttctgctgttcactttctttccttcgtacatctcagagctggtcacacatcagaatataaagtggctcctggctgagcgtggtggctcacgcctataatcccagcattttgggaggctgaggcaggtggatcacctgaggtcaggagttcgagatccgcctggccaacatggtgaaatgctgtctctactaaaaatacgaaagttagctgggtgtggtggtgtgtgcctgtaatcccagctactcgggaggctgaggcaggagaatctcttgaacccaggaggcggaggttgcagtgagctgagattgcgccactgctctccagcctgggtgacagagtgagcttccgtctcaaaaaaataaaaaaataaaataaaataaataaacaaagtggctcctggctgggtgtagtggttcatgcctgtaatcccagcactttgggaggtcaaggcagccaacaatccctttgtcctgaaactgctgtccagaattccttatttatttatgttatttatttttatttttatttttttagacagagtcttgctctgtcaccaggctagagtgcagtggcgcgatcttggctcattgcaacctccacctcctgggtttaagcgagtctcctgcctcagtctcctgagtactgggactacaggcgcccgctaccacgcccagctaatttttgtatttttagtagagacagggtttcaccatgttggccagatggtctcgatctcttgaccttgtgatccgcccacctcggcatcccaaagtgctgagattacaggtgtgagccaccgcgccgggctctttattttttttaatttttattgtttttcctgaaacagagcctcactctgttacccatgctggagtgcaatggcacagtctcggctcactataacctctgcctcctaggttcaagtgattctcctgcctcagccccatgagtagctgggactacgggggcatgccactatgcccggctaatttttgtatttttagtagagatggggtttcaccatgttggccaggctggtcttgaactcctgtcctcaagtgatccgctcaccttggcctcccaaagtgctggcattacaggtgtgagccaccatgcctgactcagattcctttttaatgctcctcatgaccctctgtatttgtcatttgaggaatttgcagggtttaagacagagcctcgggtatcctgagcatgttctgggtggtgcctgggtacagtcctcacaggctgggctggtgatggcctgtgtctcccctaccccagacatctgtgccttctgccacaagaccgtgtccccccgagagctggctgtggaggccatgaagaggcagtaccatgcccagtgcttcacgtgccgcacctgccgccgccagctggctgggcagagcttctaccagaaggatgggcgacccctctgcgaaccctgctaccaggtaacccctgcagcagacctctgggtgccaggcagtgagctgagcacttagaatatgttgcaccatttcattccccacacagtcctgggaagtaggcactattgacccctttcacagatgaggaaactgaggctcagaaagaaggagcccagtgaaggcgattagtttcctagggctgcctgtaagagatcaccacaaccttcgtggcttccagcagtacacgtttattctgtcccagttcgggagatcaaaagtccaaaatcagcttcactgggccaaaaccaaggtggtgtgctgtctggaggcttgagggagaacccacatctctgccttttgcaatttctttttttcttcttcttcttctttttttttgcggtgggggacggagtctcactctatcgcccaggctggagtgcagtggcacgatgtcagctcactgcaacctcggccacccaggttcaagggattctcctgcctcagcctcccgagtagctgggattacaggcacctgacaccacacccggctaatttttgtatttttggtagagatggggtttcaccatcttggccaggctggtcttgaactcctgacctcgtgagccacccacctcgacctcccaaagtgctgggattacaggcatgagccactgcgcccagcctgtttttttttgtttttttttttttttaagatggaggctcattctgtcaccccagctggagtgcagtcgtacaatctcagatcactgcaacctctgcttcccgggttgaagcaattcccatgtctcagcctcctgagtagctgggactacaggtgcctgccaccatgcccaactaatttttgtatttttagtagagatgggatttcaccactttggccaggctggtctcaaactcctgacctcaaggaatccaccccctcggcctcacaaagtgctgggattacaggtgtgagccaccgcacctggccccttttgcagtttatgaagctgcattctccttgactccttcctctgcttcaaagccagcagtgtagcatcccacttcagcggccctattgtcacctctgtgtcaagttacagggacacgcgatggcatttaggacccacctggataatcaggataatctcccccatcttaagatccttagctcatcccatctgaaagcctcttttgccgggcaaggtaacattcggggtccagagataaggactggatatctttgggggcatctcttagctaccacacgaggtcacacgagatggccaaggagctgggattctactccacacccatctggctctggagcctgccatcagtcttgccactatctcccctagagtagagccacagggttccaatgtttgatctcacgggaatctgtgttgcttccgggtaccaagtgcaatctgggagagccagctgggatgccagcacactggaatttctaactcttggatggtttgtggtggcatgttgagtgtggtgaccacccacagccgcatcccctggggatgtgtaggccactctttgtgcttatgaatgaggaacacctggaaatcagcattttgaatcagtgtctcaagtgattctcatgcatatagaagtttgaaaacggctgatttgaagggttagagtatttggagctgagactctccagaagaatccaaacaatccaatcccaggctcaccaccagtgaggcactgtgggaagagagaggagccaggccctccctgccgtgtccctgtgaccccatcaacatcatgggggagtgttcctcaggggtgagacaccaggggaggaggggtgtccagctggaagcaggaagcagccaggaggaagacttgagcagtgtgctggggagagaagggccatgcccatgagagggaggggggagtgggagatgcccccacacgtgtccaggtgaggtcaaggtaaaatgcacaggagcacagccaggaaggagagacagcatgtccaggagaaaaggtggaaaggctagagggaagcccactgccctgcctcgggaatctctttgtcattgctcctcattccagaaggaatttgaggcagcttctatgaatgcatgtataccagccaggcgcggtggctcacacctgcaatctcagcactttgggaggctgaggtgggaggattacttgaggtcagaagttcaagacgagcctgggcaacatagcaagactccatctctattttaatatagctatttttttattaaaatatgtttttaaagagaatgcatatatacctatagaccacaataacatgcgtgcactgaaaaattccacgtgattctcccgcctcagcctctcaagtagctgggattacagttgcccaccaccacgcccggctattttttgtatttttagtagagacgggggtttcaccatgttggccaggcttgtctggaactcctgacctcaggagatctgcctgcctcagcctcccaaagtccagggattacaggcataagccaccttgcctggcgcatttcttcttaaagcatcatataaaattatgttaactggccaggtgccgtggctcatgccaggccgaggcaggtggatcacctgaggttaggagttcgagaccagcctgaccaaaatggaaaaaccctgtctctactaaaaatacaaaaactagccaggcatggtgcgtgcctgtaatcccagctacttgggaggctgaggcaggagaatcacttgaacccgggaggcagaggctgcagtgagtcaagatcacaccactgcactccagcctgcgcaacagagcaagactccatctcaaaaaaaagaaaaagcctgggcacggtggctcacgcctgtaatcccagcactttgggaggctgaggcaggcagatcacctgaggtcaggagttcgagaccagcctgaccaacatggagaaaccccgtctctactaaaaatacaaaaaattagccggatgtggtggcacatgcctgtaatcccacctactcgggaggctgaggcaggagaattgctttaacccgggaaacgaggttgtggtgagccaagattgcgccactgcacttcagcctgattgacaagagcaaaactccgtctcagaaaaaaaaaaaaaaaaaaggtagatctcatgttaagtgttcttcccacaataaaacaattttttaaagactgcaataatactacgatatgtaaaataaagacatccaaacagaaggaaaatcaaaatagaaagtgagacgagatcaaagggaatgttactacccaaaatgtgtgaggaagccagacacggtggctcacgcctgtaatcccagcactttgggaagctaacgtgggttgatcacttgaggtcaggagttcgaaaccagcctggccaacatggtgaaacaccgtgtctacaaaaaattagccgggcgtggtggcgcacacctgtagtcccagctactcaggaggctgaggcatgagaatcacttgaacctcaagtagaggatgcagtgagctgagattggggcactgcactccagcctcagtaacagagcgagactctgtcccaaaacaaaacaagaaccaaataacaacaaaaaagccctataatggtttctaaacgtgaaatgtggaatttggctctgagcttccaagtggccaaatggaaaagggaaagaatttcaagtcttcttgtctgtatgataaagcacccaattctcctgagaattccttttcctgaccctgaggtttaagcgaggtttctcctatagctctgtggaccctggccataaacatatcccagtaacaagaaatgcagccatagcatcagggcatcagggcagtattccttgctgtaagccaaggatgcaaggctaagctcaatttgttataagcaatggtggaggttttgggcgatagttacaggttgtctgcaggcctctcctgtacttcccagttcctgggcccctgagggcagcctctcagaagaagacgaccctcgtgggttggggtgggtgtgtcgtggatggttctggcagtggcctctgtcctaggacacactggagaggtgcggcaagtgtggcgaggtggtccgggaccacatcatcagggccctgggccaggccttccacccctcctgcttcacgtgtgtgacctgcgcccggtgcattggggatgagagctttgccctgggcagccagaacgaggtgtactgcctggacgacttctacaggtacgagaagggtttgtgcactgggtggggtgcagggacagggcgagacccaagcagggtgaaggagctgagcttgagtcctgggtgctgggccagagtttcctgtctactggtttattataaagaatattacagggctgggctgggcgcggtggctcacgcctgtaatcccagcactttgggaggccgaggcgggtggatcacgaggtcaggagatcgagatcatcctggctaacatggtgaaaccccgtctctactaaaaatacaaaaaaaattagccaggcatggtggcgggcgcctgtagtcccagctactcgggaggctgaggcaggagaatggcgtgaacctgggaggcagagcttgcagtgagccgagatcacgccactgcactccagcctgggcaacagagtgtgagactccgtctcaaaaaaaaaaaaaaaaaaaaaagaatattacagtgctgggggcagtggctcacacctgtaatcccagcacttttggaggccaaggtgggcagatcatgaggtcaggagtttgaggccagcctggccaatacggtaaaaccccatctctacaaaaaatacaaaaattagctgagcatggtggtgtgtgcctgtagtcccagctacttgggaggctgaggcagaagaatcacttgaacccaggaggtggagtttgcagtgagccgagatcgcaccactgcactccagcctgggtgacagagtgagactctgtctcaaaaaaaaaaaaaaagaaaaggatattacagcgatacagacagacacgtgaagagatgcctaggatgaggtctaggggaaggggcaaggagcttacatgccctccctccccaagtgtgccaccctccaggaacccccacatgttcagccacctgaaagctcccgaaccctgtcctcttgggccttctatggagacgtcattggataggcatgattgaccacccagtagaaattcggctggaggaaaagggtatggtggaagctaataaactgagagggaaacctagcagggcctgtccagagtcatcttggtctctatgcagcttttcttcctccaggatggagggcaggattctccctggaatgaatgaagggcttatgactcagtcagataaggcaggccagagaatttctttatggccagctcccagcaagaaaggtgggagaagattcctgccttggggagaaaaaggaacaggcaaaaggtcagagagaaattctgttttctaaggcctgaagtgcccaatattataacaagtgctatgggagtgatgagcccagcaggaactatagacaaaaacatatataaaaaacacatatggggccgggcgcggtagctcacgcctgtaatcccagcactttgggaggccaaggcagaggttgcagtgagccgagatcgcaccactgcactccagcctgggcaacagagctagactccatcccaaacaaaacaaaacaaaaaactgaaaaataaatataatgtcacaggcaggtacgattaagggttctgttttaccacccaaggcacacagcagctaagtacccaaagtctctccacaggtaagtattgaagctcttggtaagtatgcacatccccaaggacctgactttggggccctgctctgaaagcccagacctcggggtctgcccttggagctgaatgatgcagtggggacacacagataaccgctggactcaatccctgcccatgagttgctcaccactcaagcggagagacagatgtgcctcttaagaaagaaagaagtactggctgggcacagtggctcacgcctgtaatcccagcactttgggaggccaaggtgggcggatcacgaggtcaggagttcaagaccagcctgaccaacatggtgaaacccgtctctactaaaaatgcaaaaattagctgggcgtggtggtgcctgcctgtagtcccagctactcaagaggctgaggcaggagaatcacttgaacctgggaggtggaggttgcagtgagctgagattgcatcattgcactccagcctgggtgacaagagcaaaaaaaactccatctcaaaaaaaaaaaaaaaaaaagaagtactgaaaaaaaaacaaaaaagacagatgagatgggtcccagccccactgaacacagttctcaattcagacaatctccagtgacgctgggaaaccaggtctcattacacaggtctctccacctgctcctgccaagaagaaacagacatctctgcagtcccatagcaacgggactgaaattgctcaggaggtgaacaccagccagcccgagttctgacagctaattaatttctgtggttgtggcatgaacgcctcccaagcatgggttcctttgcttctaggaaattcgcccccgtctgcagcatctgtgaaaatcccatcatccctcgggatgggaaagatgccttcaaaatcgaatgcatgggaagaaacttccatgaaaattgctacaggtgtgaggtgagtggagcctaggtggtttaataacattccattgctgcgtgccaggcccttagctgggttgcttggacatggggacaggtcagggtgggggctgtactctcaaattgctcattgtctagtaggagaaacaaaagatactggaaatgcaaccatagtctattatcaactctttgcgttaataagaaaccggactcaagttgcattctccagagaagggaatctgttggctcatggtgctgggatcactgatggtattgagcgatggcatcaggactctctccattttttttttttttttttttggacacagtcttactcttgttgccaggctggagcgaagtggtgcgatctcagctcactgcaacctctacctccagggttcagcaattctcctgcctcagcctcccgagtagctgggattacaggcgcgcaccaccacacctggctaatttttgtatttttagtagagacagggtttcaccatgttggccaggctggtctggaactcctgacctcaggtgatccgcccacttccacctcccaaagtgctgggattacaggcatgagcaaccacgcccagcctctttccatctcttggctctcccttgtttgtgtgtttgcttcattttctctgcctgtgggctggccttctctgtggggaggtggggcacagtgcatgggcataggtggcccaggtttgcatctccccagcttagaaaccctaggggaaagagagagcacaccccctccagggaagccagacagtccctagaaggcctctaatcaccccagctagggtcacatgctcattcagggccagtcactgtggctggggtgctaggattgataaccactggggccagggaggcagaaccatataaaaaaggaggggttgttacaactggaggaagggagaagaggatgctggacagatccacaccacagtgccttttccaggtgctgggcaagagaatgtagaaatcagctttgggggcctggtgcagtgcctcacacctgtaatcccagcactttgggaagctgagatgggtggattacttgagctcacgagttcgagaccagcctgggcaacatggtgaaaccctgtcttaaaaataaataaataaaaataaaaaataaatcagctttgggataaagaaggcagtgatggtctaaccaggatggtagaatcaaaggcactcatgtaggaggcaatgcttgactgggccttgcaggatgagtaggagtttgccagatattcatagaggggagaagtccagaaaggggaaaagagctacaaaaatccacggtaacacgagcaagcctgaagaatcagaggaagtggaagcttctttttcttttttttttttgagatgggatttcactcgcgttacccaggctggagtgcaatggcgtgatctcagctcactgcaacctccacctcccgagttcaagcgattcccctgcctcagcctcccgagtaattgggattacaggcatgcaccaccacgcccagctaatgttttgtatttttagtaaagatgtggtttctccatgttggtcaggctggtctcaaactcctgacctcaggtgatctgcccacctcagcttcccagagtgctgggattacaggcgtgagccaccgtgcccagcgtttttttatttttgagacagtctcactctgtctcccaagttagagtgcagtggcatgatcttggcttactgcaacctccagctccctggttcaagcaattctccctgcctcagcctcctgagtagctgggattacaggtgcgtgccaccacgcccggctaatttttgtatttttagtagagatgttgtttctccatgttggccaggctggtcttgaactcctgacctcaggtgatccacctgcctcggcctcccaaagtgctgggattacaggcatgagccactgcacccagcctagatcaactcttttgaatgttactttttcacttagaaattgtctcttttaaattgtttttattaaatttttatttatttattttttgagatggcgtctcactctgtcacccaggctggagtgcaccagtgcgatctcagctcactgcaacctccacctcctgggttcatgcggttctcctgcctcagcctaccaagcagctgggactacaggcatgtgccaccacacctgactaatttttgtatttagtagagatgagatttcaccacgttggccaggctggtcttgaactcctgacctcaagtgatccacctgcctcagcctcccaaagtgctgggattacaggtgtgagccactgcacccggccagaagtggaagtttgtagatgtgactggagtgtagagggctggggttatggttaatgattaggtcagagagaaggaaaggactatggtgccaggctagagagtctggacttcaggctgcagagaggggtcaggctgagatgggcgagctgattagaagctggtgcagttgtcccaggaagaagggcccaggagtcatcacatgtggcttggtgatcagaagggtcctatgctagttttgaagttctgctattgctgtctttaaattcttgatttttgtttgtttgtttgtttttaatagagacagagactggagtcaggctggagtgcagtagtgtgatcatagctcactgtagccttgaacgaacttttgggctcaagcagttctctcaccttagcatcctgagtagctggaagtacaggtgcgcaccaccacgcccagctaatttttttatttttaaaatttttgtagagttgacttctctacaaaaatttgcccaggctggtcttgaactcctaggctcaagcgatcctctcaccttggcctcccaaagtgctgagatcacatgcatgagccactgcgcacggcctgaaattcttaaattttttttttgtagagactgagtctcactttgttacccaagctggagtacagtggcgctatctcggctcactgcaacctctgcctgtcaggttcaagcaattctcttgcctcagcctcctgagtagctggaatgacaggcttacaccaccatgcccgggtaattttttgtatttttagtagagatggggtttcgccatgttggccagcctggtgttgaactcctgatctcaagtgatctgcccgccttggcctcccaaagtgctgggtggcgtgagccaccacacccagtcaaaattcttaatttttgaacaaggggccccacatttttattttgtcctagatcgtacaaattatgtagtcagtcctgctgaggaggctcagaaatcctctcccaccccttctacagctggctccttgtcactgaagcttctgtcttctccggtgatggtgacaaggtggcaacttttatgcggggacctaagtggagagccccagagcagatctcttactcagccgatgagtatttcgacacacctgttcactcccatttatttaaacagatactggaacccagaggctattttcactgaggttatcaaaggagctgggtagagaagttgataaattgctgagtaattacattgtctttgttggttataggtcaaagtcctgctgataatgcattttgaaagcccagtgaggaagtttaagtgctgttatccccaacatcatcctcacgagttccagcagtgactggcaccttcctgagcctggccaggaagcgaataaacccccccggtagtccttgatgacttggccgaggtggtgtagtaagtcggcatttggactccagcagttatgtgtcagaagatgaggcttcttggccaggcatggtggctcatgctggtgatcccagcactctgggaggctgaggcaggcggtcaagagnnnnnnnnnnnnnnnnnnnnnnnnnnnnnnnnnnnnnnnnnnnnnnnnnnnnnnnnnnnnnnnnnnnnnnnnnnnnnnnnnncaagctgcacctcccgggttcacgccattctcctgcctcagcctcccgagtagctgggaccacaggcgcctgccaccacgcctggctaatttttttgtatttttagtagagatggggtttcactgtgttagccaggatggtcttgatctcctgacctcgtgatccgcccacctcagcctcccaaagagctggaattacaggtgtgagccaccgcacctggcctgtaggtagtattttttaatttataaaatgctttcattgacatcaccttgtttaatcctagtgacagtcttgtgagatgggatttattgtccccatttcacatggggaaactggtggggtgtggtggctcacacctgtgatcccagcactttgggaggctgaggcaggaggatcacttgagcccaggagttcgaagccagcctgcgcagtaagacctcatcttaccataaatgtttaaaaattagccaggcatggtggtacctgtctgtagttccagctactctggaggctgaggcaggaggattgcttgagcctgacaggtggaggctgcagtgagccatgataatgccactgcactctagcctgggtgacagagtgagactctatcttaaaaaaaaaaaaaaaaaggatgggaaacaggcaaacagtctcagaaaagtggttccagccatgcttgtgtgggctgggttcagtgaggtttcagccaccgcacagctgccttgcagaggttgtgagacttggtggtagataaggtgtttcttccaattggttctaatttaggaggggtctcatgtggccctctggcatgtgttcttacagtgccaaacaggtggcacagatggtgcagttgtatagcccatggtctacttgagagactcaagtggccttgtagggaggagacacacaggggtgcctcacccagctggccatggaggaaggcagattgcagaccctggtccctactgcataaggagggccacctgtgaccccaaagtagtccctatagggactcttttttttttttttttgagacggagtcttgccctgtctcccaggctggagtgcagtggcgcgatctcagcaacctcctcccgggttcaaacaattctgtctcagcctcatgagtagctgggattacaggcacccaccaccacgcccggctaatttttatatttttagtagagacggggtttcaccatgttggccaggctggtcgcaaactcctgacctcatgatccgcccgcctcagcctcccaaagtgctgggcttacaggcgtgagccactgcgcctggccccctataaggactcttttgtgggatcagtgcagcttccaaagggtgcccagaaccaagtctctgcgcgcaaattgtcccctctgttattctctagcatgtgcccaggtgaggtttctggggcagaacagtgacgttggtagaatttgggccccgagtccctgtgttcctcattctgaaatcctttggtgatttgaaaaatagaaaatattaatgtttgtgctggtgttgaagctgtgtgggctgtggagtcacagaaaggcccctggagccagatcctggagacccagtctggtcccagctccagaaccagctgtgtgacctggggcagagcccactcctccctggaccttggtatcccacctgtgaaatgaagggactggactagattcaggcactcatcagcagatacccatggcctgtgctgggatggggacttggccttaaacagggttcctgtctcgtagaacttacgttcttttttttttttttttttttttttgagatggagtctcgctctgtcacccgggctggagtgtagtggcacgatctcggctcactgcaagctctgcctcccgggttcacgccattctcctgcctcctgcctcagcctcccacatagctgggagtacaggcgcccgccaccacgcccggctagttttttgtatttttagtagagatggggtttcaccgtgttagccaggatggtctctatctcctgaccctgtgatccgcccgcctcagcctcccaaagtgctgggattataggcgtgaaccaccgcgcccgcccagaatttatgttctaaaggggttattgaagccgggcgcactggctcacacctgtaatcccagcatgggaagccaaggtgggcggatcacttgaggtcaggagttcgagaccagcctgaccaacatggcaaaaccctgtctactaaaaatacaaaaattagctgggtgtggtggcacacgcctgtaatcccagctacctgggaggcaggagaatcgcttgaacccgggaagcagaggttgcagtgagccaagatcgtgccactgcactccagcctgggcgacagagcaagactgtctcaaaataaataaatgataaaaacaaattttaaaaaataataaaggagctattaagactcttctagccccaactttccctgaaccctcaggggacttccccaggtgtccttagttctcctgacggtgaatgtctgtcctcaccggcgcctccacgtggattaaagcctccatgtgtgtctgtgtctcatcttcccttatggagacctggcccgggtgttgggagggcagcagtgagcagcctccttcctcccacttaggaagggcatccactcatgcagttggtttattcggcagatgccaagtgagtccctcccctgtgcaggcagcgcccaggcccagggcgggtcagcatgtgtctttgtctccccaggactgcaggatcctcctgtctgtcgagcccacggaccaaggctgctaccccctgaacaaccatctcttctgcaagccatgccatgtgaagcggagtgctgcggggtgctgctgagagtgcccgctgggcagtgaacagaccactagccccggctggggcccttccctgacttggtttcccttcctaacctgctcttgcacactttccttctgagcctccatggagaccagcctgcaagccggcccagcctgtccaggatacagtggggctgagcacccccaggccttccactcctctaccctctgggcaccagaaggctcctggaccatgagcttcacccccagaattccctgctgaccctgccccacttccagggaaaagctgggggaggttggacccctctcactgactagctgtctggtaggggtgctaggaccagcctcgcctgtggggttgagctgtttgaggacaaactccaaggtcccttaaaaagtgccttttagaggctgggcatggtggctcacgcttgtaatcccagcactttgggaggccaaggtgggtggatcacctgaggtcaggagttcaagaccagcctggccaacatggtgaaaccctgtctctactaaaaatacaaaaattagccaggcatggtagcaggtgcctgtaatcccagctactggggaaagctgaggcaggagaattgcttcaatctggaaggcagaggttgcagtgagattgcaccattgcattccagcctgggcaacaagagggaaactccgtctcaaaaaaaaaaaagtgccttttaggccggatgtggtggctcatgcctgtaatcccagcactttgggaggccaaggcaggcagatcacttgaggtcaggagtttgagaccagcctggccaacacggcaaaaccccgtttctactaaaaatacaaaaattagctgggtgtggtggcgtgcgcctgtaatcccagctactcaggaggctgaggcaggagcattgcttgaacccgggaggcagaggttgcagtgagctgagatggcaccactgcactccagcctgggagacacagcgagactctgtctccaaaaaaaaaagtgctttttgaaaatgttgaggttgaaatgatgggaaccaacattctttggatttagtggggagcataatagcaaacacccccttggttcgcacatgtacaggaatgggacccagttggggcacagccatggacttccccgccctggaatgtgtggtgcaaagtggggccagggcccagacccaagaggagagggtggtccgcagacaccccgggatgtcagcatcccccgacctgccttctggcggcacctcccgggtgctgtgttgagtcagcaggcatggggtgagagcctggtatatgctgggaacagggtgcaggggccaagcgttcctccttcagccttgacttgggccatgcaccccctctcccccaaacacaaacaagcacttctccagtatggtgccaggacaggtgtcccttcagtcctctggttatgacctcaagtcctacttgggccctgcagcccagcctgtgttgtaacctctgcgtcctcaagaccacacctggaagattcttcttccctttgaaggagaatcatcattgttgctttatcacttctaagacattttgtacggcacggacaagttaaacagaatgtgcttccctccctggggtctcacacgctcccacgagaatgccacaggggccgtgcactgggcaggcttctctgtagaaccccaggggcttcggcccagaccacagcgtcttgccctgagcctagagcagggagtcccgaacttctgcattcacagaccacctccacaattgttataaccaaaggcctcctgttctgttatttcacttaaatcaacatgctattttgttttcactcacttctgactttagcctcgtgctgagccgtgtatccatgcagtcatgttcacgtgctagttacgtttttcttcttacacatgaaaataaatgcataagtgttagaagctcttccatgttgtgtgtaggctctcacacaggtaaacgctggcgtttggtagtagccctgggcatctgctcgctgtggcgggagtgtccgaagagtgctggggctcagctcagcagatggaggggctcatttcctgcctcatgcccagcactggggccggccaactcactgggtgtgcttctcctggacacaggccaccactgatggggttggctgcaggagcctcagtagggctgccaaatgctttaagaattaacactcatgccgggcgtggtggcccatgcctgtgatcccagcactttgggaagctgaggtgggcgggtcacttgaggccaggagtttcagaccagcctggccaacatggtgaaacaccgcctctactaaaaatacaaaaattagctgggcatggtggtgcttgcctctaggcccagctactcgtgaggctgaggtaggagaatctcgaacctgggaggcagaggttgcagtgagctgagatcacaacaccgcactccagcctgggtgatagactgattcaaaaaaataagaatcaacagtcaggctgggtgcagtgccagcactttgggaggccgaggtgggtggatggcttgagctcaggagtttgagaccagccgtgtcaacatggcgaaaccccgtctctatgaaaaatgagctgggcacggtggtgtgcacctatagtcccagctacctgggaggctgaggtaagaggatcacctgagcccaggaggtcgaggctgcagtgagccgtgattgtgtcactgcgctccagcctgggtgacagaatgataccctgtctcaaaaataaaaaaaaaacacccccagggcgtgctccctgcacataactaggctgctctcccttttcaagcttgcacactgacccctgggctcacttggtgagcacaggcccagaaagagttggcctgaaagagcactggcttggtgacaggccacccagatctcagacctatctctgtactcaatagcgtggacaagttagtaaccctcagccttgatgttctcatctggagcagtttaaaacattttatttattggctgagcgcgatggctcacacctgtaatcccagcactttgggaggccgaggcaggcagatcacaaggtcaggagttcaagaccagcctggtcaacatggtgaaaccccatctctactaaaaatacaaaaattagccaggcgatgtggcaggcgcctgttatcccagctacttgggaggctgagataggagaatcggttgaacctgggcggcagagcctgcagtgagctgagattgcgccactgcactccagcctaggtgatagagtaagactccatctcaaaaaaaaaaaaaaaaaaaaaaaaaaaatatatatatatatatatatatataaaatgtattataaaaatagaggccgggcgtggtggctcatgcctgtaattttaacactttgggaggccaaggcaggcagatcacgaggtcaagagatcaagaccatcctggccaacatggtgaaaccccgactctattaaaaatacaaaaaaattagctgggtgtgttggtgcgcacctgtaatcccaggtactcaggaggctgaggcaagagaattgcttaaacctgagaggcggaggttgcagtgagccgagattgcgccatagcattccagcctggtgacagagcgagactccgtctcaaaaaaaaaaaaaaaagaggccaggcacggtggcacatgcctgtaatcccagcactttgggaggccaaggcgggtagatagcctgaggtcaggagttcgtgaccagcctgactaacatgatgaaaccccatctctactaaatacaaaaaagttagccgggcctggtggcacatgcctgtaatatgagctacttgataggctgggacaggagaatcccttgtacttgggaggtggaggttgcagtgagctgagatcgcgccattgcactctagcctgggcaacaagagcaaaactccatctcaaaataaataaataaataaatagagatggagtcccactatgttgctcaggctggtctcaaactcctgggctcaagcaatcctcccaccttggcctcccaaatagctgggattacaggcgtgagtcaccatgcccagccaagttggaacagttctaatctatcatggagagttgctgtgagagaaagggaagtattaggctgagagatttcagcttagttcatgagtcactggcttcatcttgtgaaccctgaaattctctagccgtcactccctccatggtcacgttgatgcctgtcaatcagaccaccaggaacacgcctgcagtcaacaaatttgggtttattatgcttgctgtggcaagggaggccacacagcacggggaagccagggcatctccaaaagcagtgttagtgctggtatcggatttggagaaagatttaaggaagtgtgggtttgctctggatgtgtgctgtcagaaagcggggtgattgtatggttcagtgactcgatccctttatatctacagctgtgattgggggcgacgcagcagcagctgcaggagacattctcatttgtgtgggtggccctgagatgcgtgttcaggacagctgctgagtggtgttgcttttgactttaaccttcttaggccagacgtggtggctcatgcctatatacccagcactttggaaggccaaggagggcggatcatctgaggttgggagtttgagaccagcctgaccaatgtggagaaaccctgtctctacaaaaaatacaaaattagccaggtgtggtggcgcatgcctgtaatcccagctactcgggaggctgaggcaggagaatcgcttgaacctgggaggcggaggttgtggttagccgagatcacggcattgcactccagcctgggcaacaagagcaaaactccgtctcaaaaaacaaaacaaaacaacaaaaaaaccatataaacaaacaacaaaaaaaccatatatatgtgtgtgtgcgtatatatatgtatatgtgtgtatatacatgtccatatatgtatatatgtatgtatatgtgtatatatatgcatatgtgtgtgtgtgtgtgtgtgtgtgtgtgtgtgtgtatatatagccttgttgtaattcctcatgtcctagcatgcttctgtttgagtgtatttggaggggtgttacctggatgaaattctaggagatgcctctgcttttcgggctgcccatgtaaaaatcattccattccataaggggatgcttctagggagcactcaatagtgtgtattcacctcccccaccccaaccctcccaaccaaccttcattcttcttttcattcctcttttcatccttttctctgctctcacttggagggcgcctgccacatgtaggcacaatcagaacaccccaggcaaagatgatttcccttccctttgggtacacttactggcaaagataaaatatattctctagattcaaagagatatttgtgcacccatgttcatatcagcattactcacaatagccaaaagggggaaggaaccaagtgtccatgaacagaagaacggatgacaagatgtggtctctccagacaatggaagattcttcaaccttaaaaaggatggcagcctgggtgcggtggctcacatctgtaatcccagcactttgggaggctgaggcaggtggatcacttgaggtcaggagttcgagaccagcctggccaaaatggtgaaatcccatctgtactaaaaatacaaaaattagccattagccagctgtggtagtgcacgcctgtaatcccagctactcaggaggctgtggcaggagaatcgcttgaacccaggaggcggaggttgcagtgagccgagatcgtgccattacactccagcctgggtgacagagcgagatctccgtctaaaaaaaaaaaaaaaaaggccacacgtggtggctcacacctgtaatcccagcactttgggaggctgaggcaggcggatcacgagatcaggagttcaagatcagcctggccaacatggtaaaaccccgtctctactaaaaatacaaaaattagccaggcatagtggcacacacctgtagtcccaactactggggaggctgaggaagaagaatcatttgaacccaggaggcagaggttgtgatgagctgagatcgtgccactgcactccagcctgggcaacaaagtgagactccatctcaaaaaaacaaacaaaaaaaaaggatggcattctgacacatgccacaatgtgaatacaccttgacaacattgtgctcagtgaaataggcagacacaaaaggacagacactgtatgattccacttatatgagtatctagtcagattcataaagacaatgtagaacagaggtttccaggaactggggggaaataggaatgaggagcttagtgtttaatgggggcagagtttcagtttgggaaggagaatagcgttctggaggctgggcgcagtggctcacgcctgtaaccccagcactttgggaggtcaaggcaggcgaatcgctggggcccaggaattcaagaccagcctgggcaacatggcaaaaccctgtctctacaaaaaattagccaggcatggtggcatgcgcttgtagttccagctactctaggggttaaggtaagagggtcatctgagcctgggaggtcgaagtcgcactccagcctgggtgacagagtgagaccctgtcaaaaaaaaaaaaaaaaaaaagctggccagagttcgagaccagcctggccaacatggtgaaaccttgtctctctaaaaatacaaaaattagccaggtaggggccgggcgcggtggctcacgcctgtaatcccagctctttgggaagccgaggcgggcggatcacgaggtcaggagattgagaccatcctggctaatagggtgaaaccctgtctccactaaaaatacaaaaaattagccgggtgtggtggcaggcgcctgtagtcccagctactcgggaggctgacgcaggagaatggtctgaacccaggaggcggagcttgcagtgagccgagatcgcgccactgcactccagcctgggcgacagagagagagtctgtctcaaaaataaaataaaataaaatattagccaggtggagtggcgggcacctgtagttccagctacttgggaggctgacgtgggagaatcacttgaacacaggaggcagaggttgtcgtgagccaagattgcaccactgcgcttccagcctgggtgacacagtaagactttgtcttaaaaaaaaaaatagttctggagatgtatggtggtgatggttgcccaacagtgtgaaggtacttaatgccatgaaaccgtacagttagttgcgatggtaaattttacatgtattttagcacaattaaaatatacgtatataatacatctatctatgcatctaaaccagatgctgcgagacaggaagaggagctggtgaaggcatgcagtgctggaagggtcctgagggggacggtccctgcctagggtcccctgcgcagcctgggaaggctggccactgctgtctgcagatgagctggttgtcccggctgtcctggactccctaaaggcaggtgcgcacacaaccactagagggcagcatgggctggcgaacggggagcccgggcatgaatgatttcagggttcacacgggtcctcaacttctccaaactgcaagaggggaagggtcattccggcccacgcaccacgcagggtggcagtgaggctgagaggagagaacagattgcaaaactagaaagtgtccagcctgggccaggcacggtggctcacgcctgtaatcccagcactttgggaggcagaggccggtggatcacctgaggtcaggagttcgagatcagcctgaccaatatggtgagaccctcgtctctactaaaaatacaaaaattagccgggcatggtggcgtgtgcctgtagtcccagctattcaggagactgagacaggagaatcgcttgaacccggaaggcggaggttgcagtgagccaagatcatgccactgcactccagcctgggcgatagagctagactctctctcagagaaagactctgtctcaaaaaaaaaaaaaaaaaaaaaaaaaaaaaaaaaaaaaaagagaaggagaccaaggtgcaactttcttcggttgtcccgaatccgggttcatcccacaccagccacctccaccatgccgtgaagtttgaccccagagagatcaaagttgtatacctgaggtgcactggaggtgaagtcgctgcttctgcgctggcccccaagatcggccccctgggtctgtctccaaaaaaggttggtgataacattgccaaggcaacgggttaccggaagggcctgaggattacagtgaaactgaccattcagaacagacaggcccagattgaggtggtgccttctgcctctgccctgatcatcaaagccctcagggaaccactaagagacagaaagaaacagaaaaacattaaacacagtgggaatatcacttttgatgagatcgtcaacattgcttgacacacgtggcaccgatctttagccagggaactctctggaaccattaaagagatcctggggactgcccagtctgtgggctgtaatgttgatggccgctaccctcatgacatcatagatgacatcaacagtggtgctgtggaatgcccagccagttaagaagcagaaaggaaaatatttcaataaaggatcacttgacaactggtggaaaaaaaagaaaaagaaagagtgtccagcctgggcaatgtggagaaactccatctctactaaaaatagaaaaattaggcagggccaggcgcagtggctcatgcctgtaatcccagcactttgggaggccgaggcgggtggatcacctgatgtcaggagttcatgaccagcctcaacatggagaaaccccgtctctactataaaaatacaaaattagctgggcgtgatggtgcatgcctgtaatcccagctactcgggaggctgaggcaggagaattgcttgaacctgggaggcggaggttgtggtgagccgagatcacgccattgcactccagcctgggcaacgagagcgaaactccgtctcaaaaaaaaaaaaaaagaaaaaaagaaaaattaggcgggcgtggtggtgagcacctgtggtcccagctacttgggaaactgagttgggagattcacctgagcctgggatgcagaggttgaagtaagctgagatcgcaccacgccactgccctccagcctgggccacagagcgagaccctctctccaaaacaaaacaaaacaaaaaactagaaagtgagtgatatggctgtggaattgctgcctctgtcctagagacacgcccttttggagggagacctgtgtcagcagactgaattcttcattggctcaaacccccacctgctaggaggggcccacctggaagtccccatgctgctaccctgcaattccatacctgggaacctgggcacagtaagcacagaatcagagctgggacaaaggacagcatggtgcactgggagccctgagcctttctgatggtcaccctgtccccagaggcccctttcccgagggcacacccaggtgtgaacttcacccagcacaggccacaggccagcccctccagggcaacccaagcccctccctaccctgctagagagacaaatggtgggaaccgggaattgaatggggggatggggagaggggaggaggctgagctgatgaggaagaattgcagggactgagaacattttccaaaaaatgttctcctcactttaatgtacagtttatgtaacaaaataatctatgaagtagcaattttgacattgccaaagaggaggaagctgcacatcagagagctggtataactgcacaaggccgcacagcagagacaggatcaaagcaggtccagtgaaaattctatagtcctccactacagacccacttcagaaatccatattctagaatgtttcagaacccatcgtgtaacacaggtgccaatgtccaactgaaaaaacctttaatgtctggagctctgcatctctgcatcttttttttttttgagacacagtctcactctgttgcccaggctggagtacagtggtgcaaatacagctcactgcagctttgatgatgtcctgggctcaagcagtcctcctacctcagcctcccaagtagctgggaccccaagcatgcaccaccacacctgactaattttttaaattttttgtaaagatggggttttaccatgctgcttaggctgatttggaactcttggcctcaagcaatcctcctgcctcggcctcccaagtgctgggattacaggagtgagccaccgtgcccagctaagacctgcatcttttttttttttttttttttttttagagatgaggtctctctatgttgcccaggctgctcttgaacttctgagctcaagtgatcctcctgctttggcctcccaaagtgctagaattacatgtgtgatccaccacgccaggccaagacctgcatcttaagagggggagtttagactgcaggcctcttgcttgtaagtgacatataattttcccaatccatccagaaaggtccttgtatcctgtatgactcatactaattctcagagagtgagcatcagattagagagactctggagtgtaccctgctcataaccttccttctgcagaaaaaaatgtatgtgattcagtggaaaataatgcactatctacacccagcacacccttcctggttatcagattctagccttttattgtctttgagcgactttacagctctgtaaattataggtaaatgatatattgccctgtctagtagaggttctccctcgctttcttgttgaaaaaccagttttcatttgcacattcatttcaatattcctgacctatgaatgtgactgttcttagctgtccccccttttttttttgagacagagtctcgctctgtcacccagactggagcagagcacagtggcatgatctcagctcactgcaagctccgcctcctgggtttaagcgattctcctgcctcagcctcccaagtagctgggattacaggcatatgccatgatgcccagctaatttttgtatttttagtagagacggggtttcaccatgttggccagactggtcttgaactcctgacctcaggcaatccacctgcctcggcctcccaaagtgctgggattacaggcgtgagccactgtgcccggcccttagctgcccttttgagctggttataacatcacctggctcccttatgagttaaataaaatggctaatacctattcattttctatctgtgtgggagtcatgattttaccttcttttgaaaatgaaaatgaccttgcaacgcttccttcatcaggtgtttatgacagctcctttaggccagaggaggtggtggggtcccttgcagggcatcccatgaggtggaattaagagcagctggccggtggcctctgttccccagagtggtctctgaatgggaagggaggggaggggaggaggaagacaggagggaggggttctgcccagtggatgggataaggtcttagcaagacctagattctcgggctgggtgaagtggctcatgtctataatcccagcaatttgggagccgaggcaggaggatcacttgagcccaggagttctatttcagcctgggcaatagagtgagaccccatctctacaaaaaaaaacaaaaaacaaaaaacaaaaaaaaaactagactctctctctggttaagctcctagccagctatttgaccttgagacacaatgtctttaagttttgagggtgaggaagggtgtcaaaaactgacatttatttcctgagctcttgtctgtcttgtctggggtgaggctggagaggtgggatgattgactacgctgaacaggaagctaggtttcaggagttaggcagcctgcctgggatcgagactccttgatgaggat

SEQ ID NO: 303 - DNA, 2776 bp, Homo sapiens
ccacaccaggagctgaagccatggcctcaaagcctgagaagagggtggcatcgtctgtctttatcaccctggcacccccgcgccgcgatgtggccgtggcggaggaagtgaggcaggcagtttgtgaggcccggcgtggccgcccctgggaggctcctgcccccatgaagacacccgaggctggcttggcggggaggcccagcccctggacaacccctggcagagctgcagccacagtgccggctgcacctatgcagctcttcaatggagacatctgtgccttctgccacaagaccgtgtccccccgagagctggctgtggaggccatgaagaggcagtaccatgcccagtgcttcacgtgccgcacctgccgccgccagctggctgggcagagcttctaccagaaggatgggcgacccctctgcgaaccctgctaccaggacacactggagaggtgcggcaagtgtggcgaggtggtccgggaccacatcatcagggccctgggccaggccttccacccctcctgcttcacgtgtgtgacctgcgcccggtgcattggggatgagagctttgccctgggcagccagaacgaggtgtactgcctggacgacttctacaggaaattcgcccccgtctgcagcatctgtgaaaatcccatcatccctcgggatgggaaagatgccttcaaaatcgaatgcatgggaagaaacttccatgaaaattgctacaggtgtgaggactgcaggatcctcctgtctgtcgagcccacggaccaaggctgctaccccctgaacaaccatctcttctgcaagccatgccatgtgaagcggagtgctgcggggtgctgctgagagtgcccgctgggcagtgaacagaccactagccccggctggggcccttccctgacttggtttcccttcctaacctgctcttgcacactttccttctgagcctccatggagaccagcctgcaagccggcccagcctgtccaggatacagtggggctgagcacccccaggccttccactcctctaccctctgggcaccagaaggctcctggaccatgagcttcacccccagaattccctgctgaccctgccccacttccagggaaaagctgggggaggttggacccctctcactgactagctgtctggtaggggtgctaggaccagcctcgcctgtggggttgagctgtttgaggacaaactccaaggtcccttaaaaagtgccttttagaggctgggcatggtggctcacgcttgtaatcccagcactttgggaggccaaggtgggtggatcacctgaggtcaggagttcaagaccagcctggccaacatggtgaaaccctgtctctactaaaaatacaaaaattagccaggcatggtagcaggtgcctgtaatcccagctactggggaaagctgaggcaggagaattgcttcaatctggaaggcagaggttgcagtgagattgcaccattgcattccagcctgggcaacaagagggaaactccgtctcaaaaaaaaaaaagtgccttttaggccggatgtggtggctcatgcctgtaatcccagcactttgggaggccaaggcaggcagatcacttgaggtcaggagtttgagaccagcctggccaacacggcaaaaccccgtttctactaaaaatacaaaaattagctgggtgtggtggcgtgcgcctgtaatcccagctactcaggaggctgaggcaggagcattgcttgaacccgggaggcagaggttgcagtgagctgagatggcaccactgcactccagcctgggagacacagcgagactctgtctccaaaaaaaaaagtgctttttgaaaatgttgaggttgaaatgatgggaaccaacattctttggatttagtggggagcataatagcaaacacccccttggttcgcacatgtacaggaatgggacccagttggggcacagccatggacttccccgccctggaatgtgtggtgcaaagtggggccagggcccagacccaagaggagagggtggtccgcagacaccccgggatgtcagcatcccccgacctgccttctggcggcacctcccgggtgctgtgttgagtcagcaggcatggggtgagagcctggtatatgctgggaacagggtgcaggggccaagcgttcctccttcagccttgacttgggccatgcaccccctctcccccaaacacaaacaagcacttctccagtatggtgccaggacaggtgtcccttcagtcctctggttatgacctcaagtcctacttgggccctgcagcccagcctgtgttgtaacctctgcgtcctcaagaccacacctggaagattcttcttccctttgaaggagaatcatcattgttgctttatcacttctaagacattttgtacggcacggacaagttaaacagaatgtgcttccctccctggggtctcacacgctcccacgagaatgccacaggggccgtgcactgggcaggcttctctgtagaaccccaggggcttcggcccagaccacagcgtcttgccctgagcctagagcagggagtcccgaacttctgcattcacagaccacctccacaattgttataaccaaaggcctcctgttctgttatttcacttaaatcaacatgctattttgttttcactcacttctgactttagcctcgtgctgagccgtgtatccatgcagtcatgttcacgtgctagttacgtttttcttcttacacatgaaaataaatgcataagtgttagaag

SEQ ID NO: 304 - protein, 276 aa, Homo sapiens
MASKPEKRVASSVFITLAPPRRDVAVAEEVRQAVCEARRGRPWEAPAPMKTPEAGLAGRPSPWTTPGRAAATVPAAPMQLFNGDICAFCHKTVSPRELAVEAMKRQYHAQCFTCRTCRRQLAGQSFYQKDGRPLCEPCYQDTLERCGKCGEVVRDHIIRALGQAFHPSCFTCVTCARCIGDESFALGSQNEVYCLDDFYRKFAPVCSICENPIIPRDGKDAFKIECMGRNFHENCYRCEDCRILLSVEPTDQGCYPLNNHLFCKPCHVKRSAAGCC

SEQ ID NO: 305 - DNA, 168407 bp, Mus musculus
  misc_feature (1)...(168407): n = A,T,C or G
ttaaagatatgtgctaccctgctcagcagttgttcaaaaccctttaaaattttatgttgaagccgggtgtggtggcgcgcacaccttttatcccagcactcgggaggcagaggcaggtggatttctgagttcgaggccagcctgcttctgcctccagagtgctgggattaaatgtgtgcatcaccagaccctacaacttgtgatcttgcctccacatcctgagtgttggggttgttaggcatgtaccattatgccagctcatgtggtgctggccttgaaccaggtcttccacatgctgagcaagcactttaccaactgagctacatctccagaactttagaaagtctgataattacttttaaatttactcttataggttgtaccttattttgtgtacatttggctgtaactttttatatttgacacctataatcatcatttttagaattttagcgcaggaaactgtatgacagagttgtaaatcaccctgtcgcatacacttccttatgagtattctctttgtattcagactgattgtgtgttaagcattcctgttgtaacttgtagagtactttgctgagccaggaatttggactgtttgttgatcttaaaccaggtaccagtgatgaggagagcttagttttctgccccctgtctgctcttctctagggcagtaagttgcacgtgtacctgcagtgtgggacccatttattactagtcagtaaaggtgatgctagccttactgaatttctcattttattagtttaaattagacccagaggggtaattattccaccccaatgcatgaagaagtctagtcagtgcaagttgtgcattcaaacccccatgcagtgcatgggaaatgcatctttaatgttatgatgttgtttggcatatttagtttagtgcaaggagtgtacttgcttaacaggacctttaataagctccctctacaccaaagatatacttttaaaaattatacttaaggagactttgtagtattccccagtagagttcatctagagcagcaaaaaccttctcaaataaaactattcctttaaccggtattcatttaagtgggttccactgtacttggtttccatggaaatagtgaacagctaacgttatttataaggtggaagtaaaatagggtgcctaatgggaccccatgctgctctgatgaagagacttagggaaaaaaatctatgctcatgggatttttttttttttaaacaaggttaatggaagcccttatttcagtcttctgtaacagaacatatttttgattttaaaggctagcattaccatcaagcaaacaacttcttttgcggtctgtattgctttcactttcaagttttaggactgcttagcaggatggaggctgtatgtttcacacttctgtttcttggtggttttatttgaaaagttaggagtcctagcgtattgtaatgtttcaatttctcatcagcacatctgagagtacagagaagatagatgctcactagtacagcagtgatggtcaagaatcgatatgttgaccacacagggtttttagatgtaaattgtacaggaatcagatttagtctttaggcctgagtaagggctctgtgtatgtcgtcaacttagtaggtggaaaggtcctgagtttcttttgagacgtgcacggggaagattttaataactctttttaagaaagtgaattgttgccactgcctgttagctaaaataaatgtccattgttttaatctttgaattggatttgggaaagccttctttttctttttttttctgtcattacttcaacaaggcctgctcttagtttcctatgccacaccaaacttgcctttctaaaacctcatcagctcaaagagcatcattgcctttgtgcctgtgtttgcaaagagaagggagagaagggggagagggggagagggagaggagggggagaatttcccagagcctgaagttacctgctcatcttctagcctggttaggccagcagtcctgcatctaagggaagtatggcagctcacagtaaggttaaggagctggtgttttatttagattgtttggctgtcagtggcagcttgggatcattatctgtttgtctgggaagttctggttttcttggctgtcaggactgcagggtttctccatgtttaaaaacagggttgtagtgtaccagggaggagtttttgtgttgtgtgcatgtttctttggataagcttctcactgtatttgagtttattgtgctttaattaaaaaacaattaatttttctttaaatgtacccccctcttactctccctccctccctccttccttccttccttccctcccttcctccttccctttctttctaagtctggtgtttaccaagtgaccttccttagtggcttttatttgaattgtagttgtgcttcagagacaggaatttgggtctcttgccccaattctgagatcagaactcccaggagttgcagttagtgtgcttgcagggcctctctgatgtagagctgggccttccccctcctccttagtgctgatggtctgtgctccaaactcccattagtgttaataggaggcactagcttaagtccctgtacaccaagataagcccaggctcttttataatgccttgtagatacctttgttgtttttgttgatgatggcaggagctttggtcttgaggttaactgactgttaagactgagtttgagttgtcttgggatatggaatgaattactgagtctgatctgtaattaagttttcaccgtgattagactcaaaacatttatagcttagagctgtagaaacttttgatgatttttctactttataatatgatgaagcaaggcctatttctgttcatttcttctaccacaaaacaagcgacttaaacaagttttgtgtatattgtaggagaagtttgtaagtcatggccatcgccatcatcatcactatactgtactgagaagatttcctcccttgctctctggcctctccatctcaggcatcagccagttggatactttgcaagcatattgactttgctgtgcactgctgtgatgcttaaagactgcagccattggtcaagaagtaaccactgtccactacaccttcctgtgaatttgggattcttatgactttcattcatgtatttatagcttaatgaaagatgtagttctaagattgaaagtagtgagtctggagtgtaggctgtattttgtcttcctttatcttttgtggatttttagttagttgtctggatttcttttttaaaattcttttttttttttttttaaagatatttttaaagattcatttatttattatatgtaagtacactgtagctgtcttcagaccaatccagaagagggagtcagatcttgttaaggatggttgtgagccaccatgtggttgctgggatttgaactctgaaccttcggaagagcagtcgggtgctcttacccactgagccatctcaccagccccagttgtctggatttcttagacctctgtgctatgggataaaggggcggcttggatcctcagaagtgttcattctagttttaggctctttgagggcacaaaggcacaaaaggcagtggagcactggaagctaggcagcgttctctaatctgatgaatgttcaggttcttctggggaactatgaaattaaaagcctaagtatctgggctctagtttaagggtagggtcagtgaaatctatgtgtattagtttatttgtgcttttgatttaagatcgaaaagtaatgtacaaggtatcatttttacatgtgtgtgcatatgtgtttcggcatacatttgtgtgtgtgcatatgcctgtgtacctgtatgtgtgtatatttctattaggtctataaagtcatatatatatattacaacattaagtactatgtggttaagttctaaatataggcagggctcagaaagatggtagatatcctggaagtataaagagggtgactagggaatatggtagcagagaaggtctctgtcaatgatgagtctttatctgggctctagtttctgaatgagatttgcataggtaaaaggaaagagaatattcttggtataagaaagcatgtaagggggggagggtatgggggactttcgggatagcatttgaaatgtaaatgaagaaaatacctaataaaaattggaaaaaaaataaagctgaaaaaaaaaaagcatgtaagagtttgggagaggccctttggacttgcaaactttatatgccccagtacaggggaacgccagggccaaaaaggggaagtaggtgggtaggggtttgggggggtgggtatgggggacttttgggatagcattggaaatgtaaacgaggaaaatacctaattaaaaaaaaggaaaaaaaaaaagagtttgggagagggacaattatgattgcagttttaatcttcattttatattcgctgaagctttggtagatttcatgagcactgtgggagtgagccatgacaaaacttggaggaggacaatgctggttagtgggaaaacaagtgggagagcctgggcagggagtgcggcatggaaggactgaggtgcagtcacagtgcctgtgcactgttagggcaagggcgggagcttccctctgagctgcccagccactgaaggactttgagttgaggataatgatgtgccttgggttttgaaaagctgcttctctgctgttaagagaatgacttgcagtggggcttggggtagaggtggggagaccagtgagcaggtcaggacagtggctgctgtcaaaggtgctagtgagctggcccagggaagtagtaatggagctgatgtgagaggtcagagtaggtagcctcctgaaggtggaggtcgctgttgggttggatgtagcatgtcacagaactctgggtgacttccaagtgtttctgccggaagactggggttgccgatatggagatgctaatggctgaggaggagggtggaaggaagagagttaggagtttaattttgtatctgtggagcttaagttacctgtttgtcaggtgttgaggggtggacacagagggaggggcctgcaggactttctgtcagatggaattctgcaccacttatctgtgtttacattaatttcagacttaatgtactttttgttggaagttaggaagggcagacagaaagctgtaaaacttgaaacttgtgtataaaacttagttattgaacgactgtcaggtatagtgagggaagagaaaagactgaatcttctaggtgaggtgacattttaaagtatcttcgaataacgattatctgtgctattctagtccccaatcaaaatttatcattgagcacaggctataaacttaattgttgaaaatttgtagtggggcatattaaattttagcctaatttaaaacatggccaagtgttaaaattttatccatgaaatttgtttattgtttaatgcagattagatgcaaagttcttagatgctttataaaaggtacttaagaagtggttattaatcatccttgatgtatttataatattttacatttcataaccatgccaggaatctgaatgacttgtttctttgcctcctctaattaaagctgctacctgtgaagttttatggcgggggagtcttgagtttgttaaaaaaaaaattttttttgtaaggttatattagcaaaataatattcatctctaaaagcaaaataattgtatttactctagcatgggtattttgaatgttgttttgttgacttgtttgaaatactgagtagcccaggtttcactgtgtggactgggtcagcttggaacttgctatgttttccaggttggtcttgagctctgaattctcgtcttggctgcctcctactcaacaggagctgagttggacatgggcggtcaccatgtccagctcttgagtgtatttttcaataagaaatcccatatttgaaatatttgaaataattaaggttttgaaagacctcagtaaattatgaaatgtagtaaggaaacagacagagccctagcagccttaggtgaggaaataaaacctcagacttaggtatgttctgtacatgggtagggcaagaagtactgacttacatgtcagccttgcattctgcttctcaacattactaatttgtacaaacaaaatatttatctttttttgctcactttgcatttgatagcagttaacaatcggtcttcagaagaaatacttgaagtgttggtgtacagattttaagactgctagtctgagaggaatttgctttcctgcgtgtctgagtctccttgagggttgatgatatgtggacctgcttccctgaagctacacctctgctcacacatgcagaatccgcttgtgggtatctttaagcataaaggatattgaattctcaaacttgccctaagtagcttacatgtgatttttctttaaaactttgctcaaagtatttctccatgtttgatattgctcatttcttagaagagcaaaggagtttgccctgcttcagagcaatgctggctggtggagaaatatgctcagtcactggggcatctggcctgtggattcttctctcctgtaccctttgctttgctttcctgtgtggtttctgtagtccttgtaagcagttttataatcagtgtcatgatattatcacttcatgcttttttctctttattagcttaggattgactctgctcctgaattttggaggaaatgcctgggcaacagatatacatgcacacattgtaccgtcttcccattggcttctcagaagagtttattccttagactttcctcagtgctggattaaatagacgttaagtcccatcctgccctgactgtgttctagtgtcaatgagttttatatatcctgggtgtatgtatttgtttacttttttaaagttaatttatgtctgtggacatgcgtgccagagcatgattttcagaaatggtccacagtatgaacaagttgtggggatcaaacacgggttttcagacttgactgtaagcaccgtgacccactgagctgtctttctggcatccatgcaccatgtagtatttcattttgtttttcagttgaacacaagttcttaattttagtttagtcctatttattagtctttttttcattatattttaaaatggtattattgtatgtctggtgatcagcgttgataaagacagtttttgatgtcattcatctaactagttaacagtgggaggttgatgtatcaggagttatatagtgagagggctagggaactggaaggaggggcctcagcagatagttgctattcagtcagtccatggacctgactgtttccttccttccttccttccttccttccttccttcctttcttccttccttctttttttgagacagggtttctctgtagcccttgctgtcctggaactcactttgtagaccaggctggccttgaactcagaaatctgcctacctctgcctcccaagtgcttggattaaaggcgtgcgccactactcccggcaacctgactgtttcttgggtgctcaccgtgtgcctggcactgttttaggcatcctttgagtggaactgtggacttttcactatagtaactgaaatagttatcttctttttttttttgtgggtctaattatattttatttgaaaggatgttagatgttgagaggcaataatcataaaagctaactttatcattaaaagtcagagttgaagatattttatgtatataaaaaaagagtggataccaaaataccttttagttgttgaagatgcaagggcaatgtaagatttagatgataaaactattcataagcttgtttaagaacacaacaaacaagaaagagaaacaaaaatgaacttaaatcccgccacacatgagtgtaatttctgaggcttcactaacactcacatagcaggacgctcgtctctgaggagagcctcagtgctcctttagaattggctgttaggacttcagcctacatgtggggtgttcatgaagagcagcctgaagagactgaggacatctgcagacgggaaacgtgtttctgttaatttgcacctgttggctctcaatccagttcgtaggggttagctgcagcctagagctgctccccctcggcacagggagtcatctgaagcaggaggacacacagagtctagtttttagtaagtttacagatttactgcatggattttcttgtggttgtgaatccattctaatcctgatgattaaaatagctatttagatggactcctgagaactgtgaagagaactggagttcagagaagaaggaacaggaggcactcctttaattccagcactcaggaagcagaggcaggaggatctttgtgagttcaaagctagcctggtctacagtgtgagtttctggacagctagggatccttagagaggccttgtcttaaacaaaaacaaatcaagaaggacgaggaggaagaggatagtcaagttaatttcttttggaaataaatagattgcattaatcaggaactaaaatttaaataaactttcctttatgcttaatatgactgtgcatggttaacaaacatttctcatctgagagacagggtctttgaaataacctcaaggaaacaagacactattggagtagcataggtcagcaaacatttgtttcaggcatagcctaatgttggttctgtggagtttagataggtttgttgtctaagtgttaaaagctctgttttaattttagttccctaatactgggtgaggatcctaaaactttttctttctagctttatcactgattatgaatgtagcatagaagaattattttgtgtttatagctcatagtcccgagcagtgatataaatttaagaatatagatgaaaatctgactaaaattctgattatattatttatttattgatacttttttgttttgtttttgtttgtttgtttgtttgttttcgagacagggtttctctttgtagtcctggctgtcctggaactcactttgtagaccaggctggcctcaaactcagaaatccgtctgcctctgcctcttgagtgctggaattaaaggcgtgcgccaccaccacccgtctatacttactttaatacgtagctattattttatacattatataatattgtgaattaaggccttgcatgaggcaaatctatttcaaaatttattacaaaaagaccttttaagtggggcaaactaagggcttgcttcttctgctttattgtaaagagatggcagtgtagccatttgaatgaataaagtacatatgggtcttctgtcagtctaccactgatccacacaagtgcacatgctgcgtttacagccaggagcagtgcaaacaagagtaagtgtcagctcacaaccacatgaagctggctggtaacacggtctgatcggaataactagtagtccagttgctgctttctaagtgtggtcctgagttggggtgtataagtatctgtggaaaatgaggcagtgtgctggcctccacgtgggtgggtcacctgtggttatcacccactcttcactggtttttttgtttgtttttttttgtatgttatctgaaacacatacactatcagttgataactgtgagtttcctcgagaggcttcctgttgacaagtcagtgatagtagttagggttagaggaaccaaaatctatgctctgatttgactcagaatgcaagtgcccctagcagtgccttcctcgttgttcaagggtcttctctacttattttcctggtcttgaaaagctgtgttaaagcagaggtttaattgctcttgagttccttctttgctgtaaaaattactcatttcttccttgtttgttgttgagttttaaaatttagagattgaaatgtgtttaattcccccccccccccttttatagtcagaaatctttgagtctttagcgtttgatgacatcacgcgtctgtttgtagtttaactgtgtttttccttctgttgcaggggactggagagctgaaggagcgccagcttctccagaattggtaagtatttttacaaagctcacatagtgtgcatgattttagctggactcaatcaaatattaagtaattttgtaagtgatttttttttaacctcctaaaaaagcttccttcttcaaaacaaggctttatagtttgcaccaaaagtgaatttttagcttcacagagctgtatctaaaatgcatttgtatttctgataaccacactagacttgcatgctcctgaatttgataacccattaaaactcgaaggtcctgttgccaataattgagtagttaggcctgagaattcaaagtcagaagagacaagtttaggtgaggtttccactgtggcctgcattgctgtgctgttccattagaggcctctctgtgtattagctggcaggtcactgcagctgtccgaccttcatctggaagttgaagcctcttgatgtttgtattcttaggcttgacattagattggcttcaattctgagattatgtttttagtgtgtgttgttttgtataatttttaaaagaagagagaaacaaacatgttttttgatcgttactttcataaacttttaaacagcttacaacttatacttactcagattttggatgtcttaattcaagatcctagattgcactagatgatctggcaccttaagcacctggcagatactaactttatttcaattgccttgaaaaaaattcaagctacaattgtgtgattttccagtgtaaagctgcttttaaaaaaaatctatcactcaaatagtaataaacttagtgggtagaataggtaggacaaatttttggtttgagttttgtttcttacagacagagtctcactctatgtagccttagctggcctacagctggctgcatagacttaggctagccttgaatacacagagatctgcctattgagtgctgagattaaaggcatgcaccactaccgtgcccagtggagttttggttttgtggtccttctagtatctctcttactttagagactgggttttgaacataaaatggagactcttgaaccagagaacctcagatcttgctaccatttaattctattgcctttctctcatggaaccttgtaaagtaagaatcacgattctctaccttatggtcttatagaatcatggaatctgtcctaattggcagtttctttgcctacatccctgactggttgttacttattcgggtgcacattgaatactatgttttaaaaaaatgtaggctttgttttctgtaatgaatatgttttgagaaattctgattccacagaaattgagattgggtctggggtgggaaatgggttctgtggtcaaataacttgggaaatgctgcattaaacaaagttaaacaggtctctttactgcaggacttctcagaacctttaatatgctaatgtgcattgtgaatctccaagatggggatatgatatgcagcattcttgaatacttctaatgacagggagcccactacctcataaggtaacccattccttttttatacagctctaatccttagtccttctttatattaatctgaactctatctcccaggactttgctactgctaagtatgatattgattggttatgctgggacatgttcccatgtcactctttctgtggtctatatttattataagcttcttgccaggctctcctgaacagccctccacccccaaatcatcccacgacctttcagtacatgtggcagccagttctgaagtcccagacactgcatcgctgtgcttttgtgcaccactctccaatcttcatttcagatttctataaactctaaattttacttcagtgttccccttgttgggcgaagttggggttttaataggcgtgcttcctttccctgcaggaagatagggagtagaagagtgggagtgtgcaggtagcctgtgtcccagaagctgagtttgacctgtactttgggatgatggtgggaagaggtgcagcctctgaggagaatgttgtgggaattcttgtcttgtcccagtgctttgagctctatacatagtctttagaaaataaatgacctattctcttcccagtaaacccagacaaacagagataatttaacagaaaagaaacatatatcgggggctggagagatggctcagcagttaagagcactgactgctcttccagaggtcctgagttcaattcccagcaactgcatggtgactcacagccatctacaatgtgatctgatgccctcttctggtgtgcctgaagacaactatagtgtactcacatatattaaataaataaataaatcttaaaaaaagaaacatattttattaatattaaacaacagtgactattcagtctaatagtttggaaacactcagctagctacagtggttttagcaaacagcctggtcagagtcctagaacaggcagcctctaaagtcagggttgtcaagttctatgagggagattttctgtgatttgaggagtgtcaccaaagaaacagtactctgaaataagtcagaatatattaaaaatttgcagaataataaggaaaaattagatttcttaatatcactttttgattcatgttaataatacttaaaactgtcaacaaatgctactaaaaggcccttttatttttagcatccataataatttttagcactattggttaatcatcaaagatactatcttatctcactgcatagtaaatatatagtaaaaaattgaagcctggaatttcagttttgagagcaggacaagataaaagggatatatagatttgtatctactttttcctttttaaaatagtaaacttctcagaaaatgtctatgaatgttgatcagactcaaggacatttgtatatgtaggaaatacatggtaaagagaacacagaaatctttttagggacagtttgggagcacaccatgccatgaactttttaaagtaactcttggttgacctatcagatttggctgggaaaagaagtctttgtcagttgtgtaacagagtatttcttagcagtagaaggggtttagagcttccctgcaggtcttagcagaggcccagtggttgtggcttcatgcaagactgttcagggcaataacagccccattagagaatttgagaaggttttttaattttatttttcattttaaaattatttttattagtttgggtacatgagtgttttgtgtgcatgtacgtctgtgcaccaaatacatgcctgttgtgtgaggaaggaacgagcctccatgagaatgctgggaatcaaacctgggtcctgactcaaacactgagccaaatctccagcctgagaatttaacaagtttgattcaaagttaaagcttgaagaagtatgtcaatatctctaaacttggttattcacaaaaaaatccttttctgagaccttcacttgattcagccctcacaacagtcctgccacaggtgacaggaaccccatttcccagaggataatgaatgaatggctttgttttgttttgttttgttttgttctgggggaggcagtaaatggtctttcttcaccatctagctacgcttttattgagtgagatctgataattgttttgttggtttttgttttgttttgttttgtgcatgtgtgtgcatgtgtgtgtgtgttttgagacaatgcttcttacagttcactttggccttgaacttactgagtagctaaagataaccttaaactcctgatccttgtgccttcacctcccagatgttacgatagcatgtaccttgctatctggctggtttctgctctgttttgctttgtagcttgagaggctattaggttacctggtgctttagtgtgtacagcatggaaggcagaaggttggtatgttgtgctaggctgccctcagtgattgagggatgcagagatattggatagaaaatgtctattattatcttgtgtgtttgtttatagtcacctttcagtaactgatttgttttatatacacacaccccttattagaattggaaaaatacaataaattatctctcatacctttctgcggctgcctagatggctcagcaggtaaaggcccttgccaccatgcctgaggactgtttgatccccagaacccacatggtgaacagaagcaatatcttcacattgtcctcagaattccacacaccctccatgtaatacatgcccctcccagtaaataaacactatcttaaaaagatttaaaaagtaatgatgtcctgtgaagctgcatacagtctctaaataatgctgcatacactaagatccccatgtattttaaaggcttcaatatgtgtggcttgtgtttgaaaattatttcttatgtattttaactatatgtataaactaatctctctctttttaaaaagatttatttattgttatatgtaaggcactgtagctgtcttcacacacaccagaagagggcatcagatctcattatggatggttatgagccaccatgtggttgctgggatttgaactcaggaccttaggaagagcagtcagtgcttttaaccactgagccatctcaccagccatagactaatctcttaagacagttgtccagaaagagacctttcggatgaaggatttcaaaattatcttccagtcctcataagtttctccgtgaccagtcttatatgaaacaaaatccgtaattggcatttaaatgcctttgtatatgtgtagtaagaggacaacaccccgatggaggaagtaaaagctgtcagcgcctcattagcttgactggcaggcatgttgtaccaagcacactttgacatttagagtctccaggttagaaccttgtttttcctcttgaactcttcctcccttccctcctcccttctcccttcccactaccctgcttctctcccctcccttcccttcccttccccctttccttccttccttccttccttccttccttccttccttccttccttccttccttcctttctttctttctttctttctttctttctttctttctttctttctttctttctttctttctttcttggagacaggatatcctgtagcctaggctgtactcaaagtcaccatatagctccgaggctggctttggcctttggtctcctcctcctgagtgctgggatcacaggaatgtgtcaccacactcagctacgtttttttctaatgaggttatttgttttgttttattttgtttttgtgggtttttttcttttatgttataaaacttcctgatgttttattaattctcatttattttttcttagttgaaaggagatgtgcgttgtctatggaaaagtttgaaaatactgatactccccaaaagaagaaagtttaatagctcttagtcctttcacctacaaatgactttagcagattatgaagtgccatcagacccacccttggcagcttagaggtggtcattatgcatcttgtgcattacaggcaaaacctaccttattaaattcatgttcctatcgtgagtgcagactggttcctcaaagtcattgttcagtctgtcaataaaattttcctagtatattcatgttaatgttgtttcatagaggaattctcattcatgtgtgtccagtactttgacttaattcaaactttttgttgatcactcttatgtcttatgaaaattggttttctgtacatttttgttagcctagactgtatgaacagtgttaacctgatgtggcgggtgctgtaaggtctccatgtcagtgacctgcctgtttccagagttagagttcaattgagctctactgagatgtgtcatcaacagttcaataaaataggcctttctgattttgaacatgctcttgcagcaggattatccttcacatacaaagaattttaggaaatctttttagacacattttctgatagaactttgcaaaaattaagatcacacggtttttaaaactacaaactgggtatggtaggtcacatttataatcccagcactcaggaggccaaggtaggaggattgtgagttcaagaccaggctgggctctataggaggttcaaggcaagtctggaccacacagtgggaccctgcagaacagaactgtcaggtatagtgaagagtttgagaagggagattacttctgcacttaacattgaagtggctgttatagttttcagattagcagttgcaaatgtgcatgaccatagaagccttgctttccatgagttactaatgattctggtattcgttataattccaaacagtttttaggatagtaagtggctgaaattcatgatatatctccttttaaaaattatttcccctaaatatcctgcctgtatgaatttttatgattaccagtaaatctttgccagcttctagagatgtaactttgaaagaattttgcactttgagaattcaatcttttttaggttagaatattctgattttacataacatagtgtataaaccctagaggagagattgtcattgatgttttaaacccagagagattaagtaaatataatgaaaactagaaatcctaagaatatactttttagctaacgattccatcaggctctgtgagcttaatcttacaaaaggcttcgggacgctcaggctgaggactgtatgtggttgctggagaacctggtggttgtgagtcttctagtcaggtactggttttccttcctcagtattaaaaggcagtgctagctaagctctcataggtataaggaagaaaacagatttttaataacgtttaaatttattcagacaaaaaatgcttttgctttaataaataaccccaaatcatggtcacattttagaaaaaaaaatttaaagaaaaattagccatttcattaagctgcagtagtgctggtgtaggacaggaaggtgagactgggtgtcccaattatgactataaattcagacttttgacatctccacatacagttacacatacgtgtgtaagtaagagtgtaatcaaattcaaatgcaccccccacgatgggagactgggaactccccagtccactctagtttaaaaatgcttgacatgttttgtgtctcagtgttcctgacagtgtcagtctcccctgctagttctcatctggatggaagcggtccttcagctccctgtcctcagtgtgagcacacagtgggtgttcatgtgttcccttgactgtctcttttgctgttgtattccttttcttagttatttgaagtgtgctatagaggaatgcccaaaagagcaaaacccagaaagttttggtactgaattgttttttttttttaaaagtcctttgggggatacagtttttgtgtatgtgtgttacaaaatataatatttctaatttaattataaaagtttcttcattcccaacacaatgattctaaacattttatgatctctacagctgcagcaacaagaggagcttgtaattttaaacggaggctgaagacactgtagaattagcagacataagagagcgtggagaaggcagaggatggagttgcagactctacaggaggctcttaaagtggaaattcaggttcaccaggtatgtgtgtgacagactaccgatgcacactgcgtcactaagcaaaacaggcccagctctgcgttttggtcaagttatgcagtcattctactacttaccacatgactggcgtttgtccagattcactctccacagctgtactttgtatactgcctttaagaactttaataagatggccctgacatcttttcctgaaaagaggactggaaatatctttttcatgtcctaaaggtatttgaaaaaaagaattctattttgctatatttctggccagtttgaaggccttctatatacaagataccttctttgcatgttctgtgtttttatttacttttgctcttttgacagggcctcaggttggccctgaactctccatggaaactacattgacattgaagttgtgttggtccccgtgcctctgcttccccagtgctgcctttcctcacttgactgtggtgagaatgcgatgtgtgcttactgcacacaccaatgcctgtgctcacccctcactctctctgcctcctcgctctctttaactttgatgattccaatctttggtaaagaaaatctggctgctgtcatcaaaattgaaaatgctctaatcctgacattttacctcagataaaagtaaacacgcctttgaagtatataattataaaatgtatatgtacattttataaccattttatacaattgtttctaaagtgtaataacataataaagcacgtaatgaattttaatttgtacatgtcaatatagatatatgtaaaaataaacatataattataatcaagatagaaaactttacccataaatagctaaatcattaacatttatcacataagcaggctaccactgtttcattttcttgacatcagctggacattagatttaaagcacataaataaacatacatgtatatagtccttggtattcaaagtaataaatgatgagttggctacttttgaccatctaacattgtcatgtaatatgggatggaatggatgcatgaagggatcaatctctgtgtgatattttggtttgaacccagaactttatacatgtcagtgagtgctctaccactgagctgcatttccagttagaataaattttaattttagagtttcacctcaaacaactttagtcttcctgtttcaatttctaagttctgggttttataactttgagctaccacatatacattgttaaaagtgtttttaggtatagtagtggctcttgttttttcttgtatgagtcaatgcagcattgatttctgaacgtgcacataacacacacacacacacacacacacacacacacacacacacacacacactcacatttgggcttctgataattgctgggtttgcctattgccccagaattagtgtggattaagacctacaggaaagcttcgaagttgtgccgtgtgtgtgtgtgtgtgtgtgtgtgtgtgtgtgtgtgttgttcttgttgttttccacatggaactctttggaagtccctgctgctgatttggactgtgtgaatcctgtgctcaaagcagtttgtgtatggcatgcatgtgcaccacgtgtgcctggtgtctgtggaggccagagagggatatcagattccctggacctggagtacagaaggttatatgtacgggtgctcagaattgaacctgggtcctctaggagagcagccatgtttttaaaccactgagccatctcacaagtccctggatgaaaatattttaacatagaggaatattgaacccagctcaggacagtaacaagtaacacaacttaataattgtttaaagctggtgtctccagtaggttttgggaatacagtatcaatttgaaatctgtgtgaatcaaagttaattttatggtggtatatgtgatttctatagtttttttctcccccacccccccccctttttttttaaagatttatttatttattatatgtaagtacactgtagctgtctttagacacaccagaagagggcgtcagatctcattaaggatggttgtgagttgctgggattttttaaatcagaaccttcggaagagcagtcagtgctcttaaccactgagccatctctccagcccttttttcttctcttaagaaaatttggaatgcagtttatattcttttaattcctcataagatacatgtctcaaataaatatttattgaatgaattatctgtaattgagctttaaaaatactatctgatttcataatttggaagataaatataacagttattaaaaatgtaactttcactatgatgttttaaagcccaattaacatttataattagagtcagcaaggtggcttagtgggtaaaggtgcttactgccaaagtttacatttgattcctaggaactacagataaaagcagaactgagtcctgaaaattgtttctgacctccacatgtgctctctctctctctctctctttctaagtgtgtgtgtgtgtgtgtgcgcgcgcgcgcacactctctctctttcattcacacacacacatacgctctaaataaaaagtaaaataataaactatacttgttgattcagggatgtgtattctagctattttaaacatcccgaatattaactgtcaatctatctctctctatatttagccacttaagtataaaggtctagccttttaagatgagtatttagttaaatacttttcttttatgtatgcatacatatgcacctgaatgtgttacctgtactgtgtgcaagtggtgctctgctagaccttaagatgatggtgccagatccatgaaactgagttagagggagctgtaagccacctgatgtgggtggtaggaattaaacctgggtccgctgctagagcagcaaataatcttaattgctaagccatctcttcagccccaaagtatagtcttagattcatctttaattattgtactttatttgtgcaatttgcattccaattaatacattttaaactatttattattgtgtgtgtatgtatgcatgatgcttgcttgtggcatacatgccatggtgcatgtgtggaggacaaaaaaaccaactttgtggagttgtttctcttcacctttatgtgacttctaagcttgatttgcgtgcgtgcgtgcgtgcgtgcgtgcgtgcgtgtgtgtgtgtgtgtgtgtgtgtgtgtgtgtccctacacagggcaagggttgtcactgtatgacttattttttgagacagagtctctcacagagcttcaggctcactgatacctagtctggccaagcgctgagatcccagcattctcctatttctatgtctcaattctacagttacaggtgtgtcacaacatacctagtctcttcatgagtgtcagggatccagactcaggacttaggcagcacattattgattgagccatctccttagtcctttattttccgattttttggggggaagggtggaattagaggtaaatccaaaggatagtctttattctgaaaactggtgctgttctgattggctgtggggtgatgatgtatgtaattcttgaacatgatacattcaggaagatcggaaatgatgccaaagcatgggccttgggtactggacagaaaccaaagcaagaatggactttgaactaaatgttaaagtgaaagctatcttttgatgcatttctagttagggaattaaattaggtaaaagtcaagctattaaggtaaaaattgtgttaagaagttgcctagtgttgctgtttggagtttggttctttatgtttctacatgtgtggacagatgaactaatatgtatatagtttatggtcaataaatacttaagttataatggccatttcctggggggaggggcatgtacctccatttggttgattttgtgtgcacctgtgtgtgtatgtgtgtgtatgtatgtatgtgtgtgtctgtgtgtgtgtgtgagagagagaatgttttagagtattagctccatatggaatgagtgtaaagcaaacagaagttaacaaactttttctgtaaagggccagatggtaaaatatattagactgaaggtcgtttatagtctgtgtggctgctctgctgtgttactgagtaggcatagcagccacagacagtgtatagacaaataggcatgactcagttccataagactgtttaggaaacaggtggtggcctggatttggtgacatgactgttgttcctttatctttgacagaatatagattatgaaaaatggcagcagtccttcagtggaaagttactttgataactcaattcccatttaaagtcacttgggaaatgggttgtctagtgagctcctcatcttgtcttgtttgtatgaaaagtagtttaggtgcttatacatagaaaaacaattattcatttcctgcagacgtggatcttaccagtcagtttttaaattctagagtcatgagctgcattatcactcagaggctaagaacacttagtgtgctgggcatggtggtggcatggtggtgcatgcctttaattgcagcatttgggaggcagaggcaggcagatttctgagttcaaggccagcctggtctacagagtgagttccaggacagccagggctatacagagaaaccctgtctcggaaacaaaacaaaacaaaacaaaacaaaaaatgaacaaacaaacaaacaaaaaaaccaccacttactgcttttgcaaaggacccaggtttgattcccacatggtttgagcatccacatggtggttcataaccatcggtaacaacagttctaggggatctgacagtcacctctgacatctgagagtgacaggcatgcacgtggtgcagacatgaagtgtaacatcaagcacatacatacatataggcaaaaaccttatatacactcattcaataaatagcaatccaacgaagcccagtgacatggaagaaaacctctttcaacccacccccccccaaacaactttccagttctttgatatccaaatcaaaaaggacagccagactgttgtttattttacgagtattactatacttactcattttacgtgtgtgagagtgtatatgtcgcagcacctctgtagccatcagaggacagctctgtagttggctctctgctcccgaaagttgttttctagggacagaactaaggttgtgagttgaggtttgaaatagtctttacccacttggctatcttgccagccctttgattctagttgtcaagcagtcagctaacagaacctgctgttattgtgactctctttaaaagtaatgaaccccaacctaactttgctgcctcagatctgctgagatacacatactggactaattttaagacaagtgaacaggttgtaatagcccaagaaatgcttagtgaacaatatgacatttattctaactggacaaaagtctttcttccaagtactaaaatacactctggttagctgaggttgacaaatgcataaagtgtgcacactgaaattatgcttcgtgattgagactagcccttcagtagcatcatctagatctgcacagtaaagcatcatctacatccttacaaatctagccacacttactttaaaagctgatttgggctggcaagatagccaagtggatagaggccttgctaccaggcccgggacccacctgatggaaagagagccaacatctgaaagtggtcttctgacttccacatatgcaccatagcacatgtgtacatagacatacaaataaataaaaatataataaaacaactaaactaaaaatgaggatgtattacaacagtgttttggggctgttagcaagtcatattgtttgtagtccaatgtttgtatattaatccatattatcacacctcaaattttaagacttggcttctacttaataaagtagatgagtttgttttagattttagattttagattttattttataacaacattttaaaagtgccttgtcacccaaagagtgtgacagctgtttctattattatatgaaaaattcactggagaaaagctaaccctaagtaccctcagccttcccaagttcttttacctttcaaattcctcttgttactcttgggattgttgttgttgttagagttgggttaggtcagatgacattcatttatttgatgtgtatgagtgttttgtctgtagtgtgtgtgtctgatgcctgcagagtacataagatgagctgatcgaataaagttactgaacaagaggctcctactgtaagatccaaaccaataggcctgccaacctgtactttgctgtatacaaacagccctgttttatatgggtacagcttctttccagaccttgtctgctgtttcaagacagggtctcactatgtatgtggctctgcctgtcctagaactcattatgtagatcccgctggtctcaaacacacaaagatctgcctgcctcctgtgtgctgggattaaaggcatgcaccactatgttcggcctacatcctgcttatttaaattgcagaagtcactgtcctcctccacatcgacaaagcagatactttttcatttcagatataaagagataattgattctttcttcttttacaaagagtgcttcattagccttttatagacatcaccaaaatttttagtctatttttttttggtgatgttgagagagagagaaagagagagagagagggagagagagagagagaggagagagaggagagagagagagaatgtgtgtgtgtgtgtgtgtgtgtgtgtgtgtgtgtacacaaacctaagtagccataggggttattatgtgagactgacagttccttttttctctttattaccagaaactggttgcccaaatgaagcaggatccacaggtaaaaaaagtcctgttgttatgaacttaatttttaaatgtaaaaactattgaaaatgacagtaatctattattgacaattaacaataaaatgcaggtgttagttgaattaaaaacacactttcatcccaagcagcatgtatgttgatattcatgttttataggtttaaagaaagtccagttgtagagtaaaatcgctgctggttcagccttgttactgttgttttgcctttttattaatttctgtgagtatctgtaaaaaccagccaaacaaacagacaaaaaaaagtgaggtttaatagacttcatataacttgaatatctttctttagaaaactacttttgagactctatgctggctttaaactctcctccccgcttgacttcccaaatgctgagattataaacttttgcctcaatacctggtatagattatttcacatcatcagaattagagtttgctaaacttttaaaatctcaaacttactaaagtgcccccaaatcatttttaattgtgtgcagtttatatgtaggatacctgagtactggatttacaacattcacagtaaaaactttagaataattttaaaagaatgtttgaaatttgtattctattttattttttgttttgggacaaggtttcatgttctagaatagctccaaatgccataaatagccaggaatggtattggtcctctaccctccttcctttaaccctcaaagctaaggttatgtaaatgtgccatcacacctggctttgaaaggtttaatctgtaaatgaactcttaaagagggtttcagacataccttacacaataatctataaactgttaaatttacttttataggagctttgacctggacatcttattcttttatagagaaatcttccccaaagttaccttgccctccagtgattcatatttatttttcagtagtgtcttcctggcacccattaaacagtgggatacatgcatctctgtaaagtaaaataaattcctgaagagtagtactgaggcaggttgatttttttttttttcaagtgggaagtaatattcatcttgagaagttctcagtggtctgattgttgtattttaatacaattcattgactctgagaactggtaattttggctcacatttattcctatttgacagtttgccttccatgagaaacatcacttttaatttttattttcttttagtgtactcacaatttaaattgcatttaagggaccaagtggctgcagattgctaggttctttatatttaatggggtgatctatattgtcaggaactgaagtgttctcagggctagcagttctgttagttcgtgattgtagaacagcacattctttacctggaaagtctgagggccagcgacttattgaagaacagtctaggtgacctcagagaagcctaatatcagatacacctgaaaaatcccaagtgaggtaagctgagtacaggagagaatatgcgcccggccctgacagacaggcagaggagtgaagggactgtggatgaaacaaggacataagtctctcactggcgtgacattcaggctttctgctatgttaaacatttgaaaactttaatacccggatccccacccccagaaaaggcaaacgtgctcaagtgtattccgtctaaaatagtactcttttcgattcctagaatttcagcatgttgatttgaatgacgtgctattaaggcagttacagtgctgacggcttcccaaatctaggctgaaataacaaatgtacttttctaaataagagagaggacaagtggagaaagcctcttatccttgttgataatgcggctaagcagcggggtatgcatactttaacctccattttcctgttcttgtctggttagtgaagctttagattttctgtcaactgatactctctataaagaataacaatattttaggggaaaggtactattagagtgtaagctgagaaagtataaaacttgctgtagttcagaacagttgtgaggaaactgcccctgttttatcttaggggctgatgttatgcttatgatttaatgcatgggaaatttgatagctaaaggttgcttcgttacttgtatgcagtatgcacagtcttcccgatactattatgttaacaaatgaatatctttctcacagatattttttctttccaatcagaatgctgacttaaagaaacagcttcatgaactccaagccaaaatcacagctttgagtgagaagcaggtaggggaaggctggaacatatttttaacattgtgttctaaagatatgtgtgtttgaagcttctaagagggctgctggtttgttttttttgggtttttttttttttttcatgtgtgaaaataagtgtgggcagccagactcagtttaattttgcttgagctgtttatctatttttatttttggttgaaatcagtctctagagtatctcatgagtatatgctactggcagatacctaaaagcaatgtgttggctgctgttaactgtgtaaataactgtagtttacccataggggaagggacagagaatgttggtgggcgtgtgtgatagggagtcctgtagcggcagtgtcttcttacctgttgtgaaggtttgagctggcatttcacttatgggtagctccctatgtacgtctcctgttgtgagtgttgtcagacttttatgctagtcttcatcagatgctgacttactctttgaaaactctttgatggacattcctagacttactctgtgtagggcaagagaggaacatcttgtattttgtataaggaaagtgccgctggtactttttgtagagtggcttccatttaccaaccgaggcagctcctgccaccaggtggagtgtgacagttgcctgctgtgagttgatgtttgtagcaatctgaggagcatcccctccctgtcttcttctctcacttctccccctctggtgtagagagcagtttctgtcttacagtaaagagcagctacctgtgaattagttgacagttctgtgctactgaaaccttacagaagagttgataaaatcggtttttagtaactttgagttttatgttgttgtctaaataatagcaacaaacatttctttcctgcagatttctgattgtgtttttcatttcactgaagggaacaataaattttgagaaccgtagatgagatcatcatctaagctgagtgaagcactgttttttgattcttctctctttaatgctttccaatcttgtctccacagacaggaggtattttagagaaggaggagccagagtaaaactgggaggtgacaggatgcagaggcagagaggaatttgtaagggaagaggtaaagaggacttgttagtgtgtgactgggttctctagcatgttggtgacagggcctggctttagagctctccaagttctgagcctccttacagttgcagggtttctctgacaagatgccaataagtgaatcacttttgctgagtttggtgtagctggcatagacattgaaaatgattagtatgatgggggtggagaatacctttaaaagttaaaagaactcagggatgcatttcagagaatgggcaatcacagaaaaatttactttatttaaaaaatctgtttgtgataacttacttttgtgataggtttgtgtcttagtcactgttctattgctgtgaggagacatcatgaccaaggaaagcatttaattgggggtttgcttacagtatcagaggcttagtccattatcatcatgtcagggagtggggtgctggagtagtaacaaagaactacatctgatttacagagaggaagggagggagacagacagacacacacacacacacacacacacacacacacacacaaagataaaggcaggaacaaaagaaaagagggaggggagagaggaagagagactaagcctgggaggggcttttgaaatttcaaagacccaccctgtggcacacttcctccagtaagaccaaacctccttatccttctaatcctttcaaagagttccattacctggtgactaagcatttaaatatatgagcctgtgggggccaatcttattcaaacaccatagtttggcttattctgttatttgttagtactcacctgaccccacttagagaattgcaactgcctattcatcagctgacaaaaccctggctctgaacttactaggtagctctctatgtagcttcaggaagacctgctgtgtttgtgtttgtttaactataaaagtgctaccttgatagaatagggcagggcagggtttaaaaagggaacaacaagggctctctctcactgacagcattccaaccagaaaccttgctggttttcatcagactataatctaaaagttttattttataatggatttctaatgccacctgtttgtttttccttgtcagaagactacttagactttggcaaaacttttctttgcactttagtaactaaaatctgaattaccttatttacatgactaatagtttaacttaatattacattgttgttgtgagaaaaaaattaagtacaaaaacctctgaagaaccctttcctttccctctgctggggacagtgcttcgaggcactcagaatggtctagtgtttgacacactgtcctagactttcctacaatacagcctctaacaaaactaggatgtcttgaacccttggcaataggattgtttaccttcataccaagaaggttgggaaagctcctaaatctgcttactgtatgtgctcagacagactttgcggggttcatgctttatagattgtctaagactaggaaacacgccagcgggactgtggtgcttccgtgtgtgccaagtgtgtccgtgacgggatcaagcaggcttttcttattgaggagcagaaaattgttgtgaaagttttgaaggcacaagcacagagtcagaaagcaagataaatatgcagcttttataagtaataatatttttaaaaaaacctctgaagagcagttatagacttaaccctttgtcatatttgcttccatttttttctgtatatatctatttgtaaacaaataaaaaataatcattttcttattttgccttattaaagaaatacaacattgcagatagtcaccaattcttatagtagacatattcgttcttattcattaatacaactttagtttttgatgcactttgggaaaagatggtcttggtcctctatggcaaaactcagcgaatttccttgaattcgtgtttggaagttcttatggctttcaaactgtaacttgagatttgtgaacagaaattctagggtggatttagaaggcagcttcacctccagggattcaatttgtgtctgatagttttaactcaaaacattcctagactcacttggctaaataaactgtatactacatagtcaattaaatcacggtttagtgacataaaatagcctctcctaagaggcatttatgactttatctgcattacagatacctttgtgttttctctgtgtatatacctttcacacacatgcaaatgtgtgtgaaaacagaaccagtagaaaatgttgggaggtggtatgttacatttccctccttatttccctatgtgtattttctgaaatcttcatagtacacaggcctcatttttaaaatagcaaataaataattaatgttatttcaaaacaattgacaccaatctctgatctgtacatggaatagttagcatttgaaaaccttgtgatgttttcatcatcacagatgatccctctaatcagagattttaactgtggggcagtgtgtggaagtagctcttcatttcctcaacaggactcattcttgttctgtactcccctccatttatatctgacagaagcgtgtggtccgtggcagaacacagacattcagattctggagccaaaatgctcatttgcttcagtgttctgttttaattctaatttctcatagaaacaacacttccttccctcgtttcttttcttcttttccttctttttttttctcttggcagtgccgagctttgtaaatgataagcaagtgactattataactgcactcctggcccaacaagcagtcttaacattccaaagtgttccttgcccctaggaggatttaggcccttgttggtattcattcaagctggtattccctgcctcagtttgccagcctgtctccctggtttcatctcactttctccctgttgcatccatccactgagcagcgaaccctaaagccccttcctctttcatgaccttattgaagccttttattttctttgtagttaatgttatttacagtcaggtttgtctgtgaacggctgaaacccccacatacaggtggcttaagcagccatacttggacttctctgccatccgagagctcagcagtcgactaggctggaaggagtatttgtccagtgtcagtgaccaggcacctcctgttctgctgctctgcaattcccagcctgaagcttcgcatcagagtccaaaatagtagctccatctggtgagggggtcagcacagagggagccctttagttttaaggatgtttactggaagctttatgtgccacttccagttaaatctccttgatttgaacatagtcacatggcctcactagttgcagggaagactgggaagtgtagtttatttctggaggccgtggccagataaatttaggcactgtatactgaagcaaaatacagttttacccactgtagcataccacagtttgtgattacatatctgcttataattactattttaaaaatgtcttactaaatggtttcaagagcacagggtgctgacagtgggactgggggtgtttctgactcttgcctgctcttgggaccctttttctcctattgggttgtctcacccaaccttgatatgagggaatatgcctggtcttattgctgtgccgggtcttattgatgtctctgggaggcctcctctattcttgggggtagatggggtagtgtggggctgggggagaggggagaattggaggacccgggaagagggaagctgcagttggcatgttttatatgagactaaattaaaacaaattaagacagggaatttgtttcatttccttcttcatttctagtataatacttcctgtaatatctaccattttggggagaggtagcccatgctgccgtgtgtatgcagattactagtcttcgagttccgaggatcaaattcaggttgtcagacttgtgtgactttaattcttttaaaacctattgtttatttatttatttgtttatttatttattatatgtaaatacactgtagctgtcttcagacactccagaagagggcgtcagatctcgttacggatggttttgagccaccatgtggttcctgggatttgaactcaggacctttggaagagcagtcagttctcttacccgctgagccatctcaccagcccttaaaacctatttttaatggtggtttttaaatgatttaacctcttttgtatcctaccacctaccagaggtagtgaaaaatgaataggggatagggagggatgtggacctgttcagaaaggagcaactccaaagaacatttgtgttttctggaaattggcagttcagctcacacgttagtggcagcagcttgatctagttgcaaacacttcacagatgcagtattaatccagttcggtaaagttgggatagcaaacatgaattagcagcggtggcactacctagcagagacagccaggcctccgcctctgctcagtcagcaggagagaccagaaggagcaccagaagttctcagttgtgtgtgtctcagccaaaagaagatcagcagagacaagagaccaacaagtattgcacagctactataagcaagtcaagctcagcctccatccctgtactttttatattctctccaaacatctcgtgtcctccatgggtcttgccttagcactgggcatctgtctcagctgacatcacttggcaaatcagcagagtccatggaagtggcaagaaactgcagcacatcaccagagtttttttggtgcatttctctctatggagtcctgacaaatggagctcaacgatgcagtgtaagatgaaccaatacatgtgtgttgttagcaaagaattatccctttcacgtgcttgctttaacagaacatccttcctcctgtgactgcttcagtgaaacgttccttcatgagtctgctttagtctttcacctatgtctgcttcaggaaaacactccttcatgagtttgtcccagcaaaacaccttccaacacaactgactctccaaagaaccgttgccacttcagacttggctgcaggtgccctctgaggtatcttattggcccttttataatatttggagagagtagtgtgtaccacagaaaaatattttgtgttttttaaatagattttatctgactgatcttttctgtttacagtttttttttttctattttaaagagcactctatcttgatcttttgattcaatctattatgagtgttttcttgttttttgagtgttcctttgtttgattgttttggaaacagggtcttactacattgccctgtaggcagttaactgtgtagactggataggccttgaggtcagattcacctgcctttgtgtcctaagggatgcaatctaaggtgtgtgtcagcactcctgtctttaagtgttcctttaaacatgatttttccacaccctctagtatttattcacaatttaagactgtttacccagtgatggtagttttttctttctcttttctattttgagtatttttcttttttttcttttcttcgagacagggtttctctgtgtagccctggctgtcctggaactcactctgtagaccaggctggcctcgaactcagaaatcggcctgtctctgcctcccaagtgctgggattaaaggcgtgcgccaccaccacccatctattttgagtatttttatgattgatccttttcttttgtaaatcgattgttactctgattgccttagatatggacctggtgtattgaccagctcttctcatagcagttctatattacaaaccagttttactgagtagcttataataatatactaattttcatactagatctgcaggtcacttagagttttcttgatccaggatggctttggccagatagatctgctttcatttttgggttggctgggcctgcctccatgagtgtaggtatgcttatgattgccttattctgaagcttagcatgaagagactaaagcttccttcatggttatcaccagagcacaggccaaactactaaattcatactgagactctattgcattagactgtgaccatcctgtgaatcaaatcaagccatgtgaccaggccttgcaaagttatatgataaaaggtatggatgaaaattttaaagcaactgaaaatgatctacaactatatttggtcaaaggctataagaaaacatctatcaaattaaaaataagtaacaagctagtcatgtgcttcatgtctatattatcaagttccaggcaggcctagactacatagtgagttctaggctagcctgggctgaacaggtgggtgagagataaagcagctcatgtcttctttcctatgcagagtctactcgcacacagaaaaggactgggcgagcaggagagtgaccaacagtaggaggagaggaaggatgtgagcgagtcaggcaggttggatatgactaaggtgtatccttagtgtatatcttgtgtgagaatgatagacttgaaattcatccagcgctaactagaagtattaataaacaagacatagtaattaaaacaaaaaacaaaaccaaaaacttctttttctagtatttccaaataacctccagaactctttcctacagaaggcgttttggaaaaacatagtgctgtatgtaccatgcagattgttggcatgcgtctgtgcttacctgaggtcggatgtttcatggaatgtgccctttgccatccagggaatcccagagatttgccctttactcttagttttcctttcctttcacccttctttttttccttactctttttggaaagataaaatcctttattgtctctgactctctgtttgtttctccgagtctgttaaagttactctgtcactttatacagactgttttaacacagtagagtaggtacttttctgggtttaacaaatagttggcatgtatggaactatttccaattgatcattttagtaaaattgattctgaagtatttggaaagatttctgtttgctgtaactgtttcctttgcattgaacaagtcagttgtgatgcacctctttaatcccagcacttggcaggtgaatatctgagttcaaggcccgcatggtcagcataatgacttccaggacagccaggcctttttttttctcactatagtgagaccccatctaaaaaaaaaaaaaaaatcaatcctatgcttataataacataatttgagccaagtcactgtattaattggcttcatgctactatattgaaattcctgaggtaattaataaagaattttataggttcagagtctaagagcagatcgccctatgctattcactgtagtaaaggcagaacatcctagcaggagcaaaaagcattacaaactgctcttatcacaaggcaagaagcagagagagaacaagactgggtcttagtgacgccaataaggccctacattctgaagactcgtatcttcttccaatagggctatcaccttgaggaccaggcctttgcatgagccttttgggtacactttagttttcatgccacgggtgatagatagtaagtgacttgacaatggtaagtagataggaataggcctaggagtttatttctagtggggtagtggttaaggttttatatttaaaccatttagtgtatctacttccttacgtatgggaggtttgtacagcagtgcctttagcagttaatgaacatgtgtctgttgagtgcatccaattttggggaacgtgaattctgtttagataggaattgctgcctttagttgtaccactcactttatctgtgtgactccttcatccttatgtgaagcactgacttctgaggagctagagcatccacatgtaactcaggcatgagtgcatctttgtagtacacacactgggtcattgcttttgcagtatagccttcactgatgtcaatgtcctcttcattcagttctagggagtgaattactttctaggattttatatgttaaatgtttttggaaataggacattaagcagaatagttatcatttcttaagttctcattgatttgtggttactgtgttctaatactggttgcctgacacttgactatctctggtttgaactggtacccttagaatgttctctctctcataatttggctagtaagattggctaatctttttagcacaatttataactgctattttcttagagatcctattattaagactagagacttatcttcttatttacccaaagcttacgcattccgtgaatatcagtccagttcatgttgcctatgtaatatttatgtgaaactacttggccatttgttactgccacttggacatcagagcctattcctttgcatctaatgcagaaaatacaatatttcagattttttctggggaaatcttacttgtttatttgggcagagatggaggaaggacttaaatactagcaaaggatgtgaaggttttaagagcaaggtttcatgtgtgtgacatggtttagttcccattgctgtgttagctagcccatgcttttccctttgattcttgtagtatagttgccagtattttttacttgtctggttaaatatttgatatctttaagagagaagctttgttgagtaatgatgctatcattgcaccagagtacggcagaggaaatgaaggcagtcagtgactggatactgccctctaacaacaatgttgtggaggaacaccctttgtcctctcaagagcttgttccagtgctggcaatggaactgaaagttcaacttgaaattcttatccctcatatgaggcgtgttatatgttgacagaagcagctatactctacagtatgttctttgcctctttgctgggctcctccttagcttggagcagttgcttcaagccagtgaaacctaagctagtgcctattctggtggaactgttttcaagaacctggatctgtctagatctttcatggactggtgactcttgtatttcaaagtgtttagggattctggctcttaggacaacattattctaattttggttgaatagtagtgtatatcagaggctttacaggggccagtgtgactctgactccaccttacaactatattaggaacttaatttgtgtgtttgattttctccatttattatgttttcactaggagctgtccttttttcttatgcaacaccctcctcccctacaacttacacatacttgtggggcctcaaactctcttgtagctaagtgtgaccttgaacttctgactctccatgactcacctttccaagcactgcaaatgcaggcatacaccaccaggctaatctactttctgaaactttccaagaatctgatgcacctgtttaatccacgtgaatttatagagagattactgtggagaaaggcatggcaccccaggaagggctgagaatgaaaatcttagtatcgctcccataagattggtccctgtaaggcatggaagctcattagtacggacacttgagcagttctttctctttgctcatcttatatccctctcttccactcactccctgtaagcccccagtgtcagtcttttctctcagacctcatgctttctgcaactgtatttttcccttctttgcctggcacattcctgtttactttttggggacccttttgatagtcctctagagaactttccgtggcttctctccaccctcctctaggcatagcacacgtgcctcttggtttggttcatactacagtactttcttgtaaccattgagtcattgtggtcatcagtaaggtcggtagggcaagagctgttgtcttagtaacatctgtactcatgaactctagcatggtgtgcaagaagaaggtatgcttgaatatgttaattcattaagcattcagaagggtaatgaggtatccaagcatgtccatatcatggaggttgaccattgaaagattccctttcagattgcctcatttcttcctttctatgtagaaattaaaaaaaaaatgtttcaagatttatttacttttatgtgttttgaatgttttgcctgtatatctttgcaacatatacatgtttggtgccttcaaaggtcagaagagggttatatcccctgggactggtgttacagggagttttgagccaccctgtggttgctggtttgagttgaaccctggtactctagaagagcagccagtgctcttaaccaccaagccatctttacagtccctagagagagtcttaatatcatttcttatgttaatgttttaaggatgttcagagtaggttcacatcagtctcataaaagaaaacttttatgaagcaaagttgtgtaaagtaataaatgagtctgaggttaactgctctaggctcttcctccagttttgctacataacttccctctgaaatccttcattctccaccccatgcatgcctgccagtgtctgcaaccattcagacttgttcatctagagttatctaatttcttggttatactgtgttatttcttcaacctaggatatttttctaccttccttccttagtgcaaacctagggtctctgcctttgtatcagtacttataggatagtgtggcctaggaatagccaaggtatacaaaacagactgctatagaatgtggaatgtgcgtgttagctatgagggcatgttatggaagtatggtttaactaaatggaaagttaggctaaaagtgaaaaaaaaactttaaaacataaacagtataattctccttttaagaaatataaaatattaaacaaatcatttgtttttagggatatagtcatttatacttgaaaagtatagaaaccaatccaaggtcatctagaattatttgacacagctgttctcagtgctttcctcccagaagtgagattcaagaggatgagcatagaaacttgctgcttttaacgttgcatgctctttaattttctttgtttgtttgtttacttttaaggagtgtatgctagattggtttttttgtttgtttgtttgtttgtttgtttttgtttttgagacagggtttctctgtatagccctggctgtcctggaactcactttgtagaccaggctggccttgaactcagaaatccacctgcctctgcctcccggatgctgggattaaaggcgtgcaccaccacacccggcttttgttttgttttttgagacaggtctcaatatatagccctggctggcctggaacttgatatgcagaccaggttgggctccaactcatggagatctaactgcctctgccttctgcatgctgggattaaaggagtgctaccttacaaccatgacaatactgatacagaaaatcacacattttagtgtgtgtacgtatttatatgtgttggcagatggttccaattcatttttatacattgaaacacctgggtgactagtgtccatgtcaatgaatagaacgttaatatcaccacggcaacattgttgttccttctgcatttcaccagttccctctgcagagactctaacaggagagattaatttggggaactagatctacacttttctgtctgatgtattctttttagcattgtttatgagattacatctgtttcttttgacgtttaaaattgttgaaataattatagattcgcaggtagtttctttttgaaaatttacatcattaaaaaatactttgttgtttccaggatttttctactttaaggtctgttgatgtagtgaattgctctcttttttggtaaactaacagtctcttggtctatggcttttgcctaactcatatcatactttttttggggggggggagggtttcgagacagagtttctctgtgtagtcctggctgtcctggaactcactctgtagaccagactggcctcgaactcagaaatccacctgcctctgcctcccgagtgctgggactaaaggcatgtgccaccactgcctggctttaaccacttgcttgtcagtctccttcctctatgttgtgaacttctatgaactatatccttttacccaaaaaaacaacattaacccccccccccaaaaaaaaacccacttagtgcatgtggttttcacacagtggtgctgaacagtttaaagaaatgagtcctgtctgccattcccagattggactaaggcctacagagttctctgacctggatttcttatctgtcaccatcaggtaaaaggaagtccctctgaaagtgactgatgggagtgggctcaggctccctgtcatgagaacgtgtgtgttaggtcatcagctccacaatacctccaggaccaatgaatgctctcatcatctttctctgctactcacagcctgttgacagatactacttcttgtcactggatggttgttgaagctccatctttgcctttttatgtaacaacatcccaggcaagaaaaggcctatttcttaaatgtcttttcctaagagcaaggaaaactttagttagaagcctgtcattagactttatatctttttggcacacctctgcctcctgcaaacaattagctcttggtaggaagcgtccgagactgattaataccctaaagctggcgatccacctctcaagtgtttggaggctggatagcaaacaggattgctttttgtttagaaggaatcggatcagaagggatagggactaataaaagccgaaaaggcaattaacattatctatctttctactcatgtaaattagatgcagtatatagataaagatgcttgcactcacagactataatttttcagtagccatttgtgctcatcactggttttgtggattattttagaagtctacttttgtaaccccagttagcaatatgcctttagagcaaatccattttgctgttgctaaaacaatacattattagaaagtaatttatttcaaatgtaaattacagatatttcaaagtagtctgtaagccatcaccatcatcatcccatgcggttgaagcaaagtgacctggtgtcctttgcttactaatgccatcacatttcaggaatgccaggcttagcaaagcccacacagtatgacatattttcattttttaaaaacatgttgagcactaaatgacagaccaagccatacatcttcctttcttttcctggcacgctaagaatgaaataagcaggcaggaacagtttcctccataactagtgccctcgtggtgcttggttggtggaggggctgctttgccaaactctgtctccaacggcatttccaaaggcgatttgcttctgcttcagacgtagacaccggtgagtcacagggttaggccgccttcttcacagcagcgctgtctgcaggtgacacgatgatcagtttcccagcatgcctttgctctgaaaaatgaagctccagaaattttcagttgatttgtttgtcacctttcttcctgtcccatctttattaccttttaatagaccctttctagccctttctgctgtaacaaattatgtcattttgaccaaagatgttaaaggtataggtctattgctgtctcagcattatccagggctcatgtcttctggtgctgggcaagtgaaaaaagctccttcccttacacacagaagagctttctttcagagttttgttgcctgagaatttagtgaagctaaatgttcatacaacaagcaaatcagaatgagaaaagtgtgtgttctctcagggttgtagacagatgcatataaacagctttcaactgttacctctccctaccatgacttttgtcaggacttgatttgggctagtgtgttcaactgatagaatttgaaatattctcttctgaacatgtcatctcattttagtaaagaagtttgtcatgaattgaaatggtttacacagggttttgagctaatccacaattattacctttgattaagaatagaataataatagttttatttatttattttattataccagttagcaattcatcttttccatggaaaatttatttgactttaaaaaaaaaaatctgtagtactgggttagaaagatagctttgtggttaaaggcactggctggcttcttttccagaggaccccagttcactttctagtggcagcttacaaccatccataacatcagatctagggatctagtacccttttctggcttccagggctaccaaatagacatgctacacagacataacacagacataggcaaaatggttgacacataaaaataaatcataattaaaaaatatctgtagtgagttgtgtattggtaactccctgggtgcaatcccagcacttgggatgttgaagtgagaggatggagcatttatgaactgccttactatatatagtaagcccggtctcaaaagccgtcaaggttgagtggaggctcccaaatcaagtcctgacaaaagtcatggtagggagttgaaagctgtttatatgcatcggtctacaaccctgagagaacacacacttttctcattctgatttgcttgttgtgtgatgtggtatgaatgatgaagtggtatctactgtttgtcaggaatgcttctctttcatagctctgtaccatgacctgataagattagataggacttctcaaatggcttggtgcctttctttttctaaattttacttgactagttgtcttttttttttttttaacccccttttgttattttagagtatccttccaaagagaaattgattagctctccaaagactgttaactctctatagagtatccagagatcttctcctggtcagttctggcttactgtatgattttctagatgaaattattggaactcagctattctctttctttttttttttaattaattaatttatttttttttttgttttttgatttttgttttatttttgagacagggtttctctgtatagccctggctatcctggaactcactctgtagaccaggctggccttgaactcagaaatccaccctcctctgcctcccaagtgttgggactaaaggcgtgtgccaccactgcccagctattctctttctttatgtattgtctaaggctgctttcttgtattacatcagtagactaatctcaagaaagatctagaaagctttatgctagttactgtctggtcggttatagaaagtttgcttgacaccttactttaggatctagagaaacaatcagaaaaaatactaaactctgaaatgttagcatgtgttcacagtctagggcagaggactatcatggactatattgggctctgtttcaatgaaaccaaaagcaaagcaaacaaacaatgaaggagcagtctaggagaagagtgagtgctgtattgaaataggcatatactgaagacctagaagtgttcattaataagctgcaccccttaagtcttagtgctgatggtatgacatcattacagaagtcaagttgaggatcctatctactgcctccggatgttttcttatatgcctgtttcttggagatcctgttctttttcccctagccttgtccccagacaagcactgtctacttcttatgctgtacatttccttacaaactgtaggattttaacagatagatttttgggggggggggttgcggtttgagacagggtttctctgtgtagccctgtctgtcctggaactcactctagaccaggctggtctcaaactcagaaatccgcctgcctctgcctcccaagtgctgggattaaaggcatgcaccacctgcctggcaacagatggacttgtaaagtgtatactttgtattgattctgattttattttatttttagctattacacataagcttctatggtcattcataagtgtctatatgaagctgggctttcatttcttgggtcagtatctcaggatgttcagggttgtatggtaggtattgtttctttttagaaaaaaatatttatttttatcttatgtgtatgagtgttttcccagaattttgtctttgcaccattgttgtgtgacaaatttttttccccgagaagacacaacacagatgtgtactcaacccagatcctatcatctaccacagaccaaaggacaaaaccatggaagtccaatttgaatgagtttcattgggttatttacaggaatatgggtgaggaattacttacaggagcagaaatgactcaaagacgatgcatcaccacagcccacaccagcctgggtgacagctcacaaatctgggaacctggagcacaaggcacagcatacagaaagctcaacagtttggagagtgtcaatttctagtgactcttccaggcagcttggctggcttcttccaggtagttggtctcctctcagaatcttccttgcatctctgcttcatgttgtttgagaggaactctcagcttgtattgctttactctggctgggaaggcctagtgaatctggttagcttcagggatttcctaaagttcttttgagttatttactttcctgcttaaggaggtgccctgtaggatggaatgtttcagtatggaagaaagctgttacacaataataatcatgcttggcctagtaccctaggagccagaagaagacttagagccaggacccagtatagggatccttggaactgggcagagttacagatggttgtcatctgccacctgggtgctgggaactaaagctgggtcctctagaggaacagccagtgctcctaaccactgaggcgtctctttaggccattttaaactttttaatagatgcccaaatgctttccaaggtggcttgccattttgtattcccaccaggaagcatcagcgaaagctagtcactaggaatcttttatacttcattcttaaatcttaactgtcaggcattgccattagcccaacaataaggcacatgaagatttgggagaggtactgcaagggaaccaaaagcttagactcttgtatcagaagagagagtgcatgggatgctgggacagtggaacaatgaagaaaaaaaagaagtttgttcacagaaagcttgggaaaggaaattaaagccatcatcctgtaaagagatggaagagactttaatcaacaaaagagaggaatgttgatgtggatcaactcacagggccccatgcttgaactaatagacattttgaaactagagactggatgaaaatggagaagagaaaataattccgtgactaaggacccagcctctagaggacaaggaatttcaccaccactgaagggcatataatatgatatatgtactctactttatcgcctagtgctatgaatagaaaaaaagtacccccctgttataccaaggcagatctttgtaaaacagtaaaatcaggaacagaatgcctaagctgccttagaagaagaggaaaccatttgcaaatggcagattggtcatcagaccacgttgaaacccaggaactaggatttactgagaggatgaggatggttctgaaaaccaagtaggattctgtatcaaaaccatctcttgatcatgtctgggggtagaggaaaggtagttttaaaaatggaagatcacaagatgtaactctcatatatcagctttgagggtgttttttttttttttttatcaaaataagaaattaaaccaagaagatgaagataggtatccagaaaattcagtacaaaaaggatgacagaatatgtttgatggaaggtaaatctggatgactgttacacaaaagtcatagaaaccaagccaggtggtggtggtggtggtggtggtggcactcatctttagtcccagtctcaggaggcagaggcagacggatctctgtgagttcaagaccagcctggtctacaggatgagttctaaaatagccagggctacatagaaaaatgttgtctggaataacaaaacaaaacaaaagtcttagttaacaacatcaggttggccaggaggatagaagaacttaggaaagatgtaacaaggaagatgaaggagaaggaggatgctaaacaggcaggacgaagaggaggctaaatagggatgttttgagccattatttaactttttgtagcttctttagggtgcatggggaagaatgaagacgggaatagagaaaaccaggtaaatgatcaaatgaggcagattttaggtccaggagtaacaaaatgtgccagaatatatgtgtaattgtaaggcattaattaccctaccaagcactgttgcataaataattctagtattataaacattcactactagtttagctagaagttacagttcgcctgatgggcttagggtaggaggaagagtagtagaacactgtagtgcatacactgtgtatgcagataatatatatgaatgtaatatctatgaatatataggaaataaatatctgaaagaagttcccagaagaattgaaagttattttgtgaaagaataaagatatataagaagagagttggttctcaaggcatttgtaattttttatagtaaaaactttaatgttacatatatgggtcctttgcctgcatgtacaaatgtgtaccacatgcatacccaatgaccacaaaggccagaaaaaggcactagatcccctggatctgtagttatatgcatgtgtgagctgccacataggttcagggaatgaatcccaggtctctgcaagaacaaccagtgcttttaaccactaaatctaacctaagctctgtgtattattttgaaacaaagtctaacctaagctctgttattattttgaaataaagtctaacttaagctctgtgtattattttgaaacaaagtctaaccatacttagttaggttgctatggctagcaactaccctaaactgttactttaattctttttcattactggaaccaaaatacttatgagaggtcttattcattttaggtatggtgtcagagcccatgtgcttagacagaatgtcatgaccattggagctggggcacagaagctgtttacctcgtgacagacatgtaaaaaaggggaaatgtgagcagggccagtcaagataagggcacatccccagaaacttgtttattctctagtgtctcaatatgcagttgtgttatggatccatcatagaattggccatggattagtttagagctgttataatctaatcgtctctgaaagtgccatcacagacatatccaaagctgtactctatttatcttctaggtacatactaacccaagcaaggctcccacctgtcacaggcctttagagcaacttaagcatctttctgaggaaaagcttgatggctgctacatttggttaagatgttactgggagttcacaggttagaaaaggcatatacattgcaatcagtttcttttctagatggagaatgtaatctaggccacagcatttgatagtgtttaccctttacccttaaactgatacatttaaaatgtaaatctactgaggtctgagattttgcccattttgtttattgatgcactggagctcagcacctgtggaatgaaagcctatttcttgagttatttcagccttgttgtatgtgtcttgaaaggtttccctgagctcttcagggatatgggtatataaacaattaaaataagtgtggaatcagattctctctggtaaccagaaaggggagagtcttctcttggctgagagatattggcgaagtgctttcaacagagctgattttctgggctgagtattggaactcaacagattttttttttctccaccagaatggaattaagtgtaagttgggtttgttttgaaacctgtatatatcatttgctcctgttcttgtatgttatagtataatcatgtagacttaggaaaactaagttgtttccatgaaaaccatatcgaatgctttgggatgagtgtttcaaagtatattaatttcatatatgaaagtatcataatgatacttatatggttataaaccacattgctttatataattaatataccctaatttttgtcttaaaattattttatgtgtatgtgtgttctgtctgcatgtatatctatattccaggtgcatgtttggtgcccacaaaaggccagaagggacacagaaccccttggaactagagttacagtcagttataagttgccctgctgggctgagaatctaatccagttcctctgggagactagcttaagatcattcaaatgctcttaactgctgaaccatctcaccaacccacacactaaattttttttttggaggggggtttgagacagggtttctctgtgtaaccctggctgtcctggaactcactttgtacatcaggctggccttgaactcagaaatccacctgcctctgcctcccagccatacatatatattttaagttcttgccatactttaaaagttaaaaatggaaatgttcaagaatgctactgtcacagttatagcttataagaaacattctgcactcttacccatagagctctttactccaggggtctggtcctgtactgcaagaaacaaaggttcatttaaattaaaatgaagtacttgggtatgtttatcaattttttttatgaatccttgatatatgtggcttttttcccccactagatcattacttactggttaagggagccctactgtattactacaagttgctactaaaagtgaagtgtgatctttcactgttcattgattcaggtatacgtatggaatgtgtattttgcgtagccattatgcacagctctggaacacagctgatagggcttctcttcttgagcttaccagccaatggcatgttcctgtatcaaaatgattatcttaacagtcgcagaatagttatcaaaataaaatctagtcttggtgatgaaggccaaagccagttacctatagagtgttgggccttaaccccagcttataccccgaataaacagaaaagattttgaaaaatgttgcatctagggctgtgctgaatgagagtttctgggagggggccagaaatgcagacatacttaagaacaggcaggataattgtagttaaggtagttgacaatgcccaaactagatctgataatttcagattgatttgacatggcattctcctgactcatctgggaccagtctactagactgagtttgtcattgatgagttattggaatcttcctagagaacaaactttacatactataaaattcagggattaatatgatattaatactttggttttcagcttttcctttgagaaaaaacattcaaaggtaagttgacgtataggtagaagtttgcaactttaaccaaagtgttttagctttcagcagtgagagctctttatggctcagaagctttactaaggatattttatatctgtctatagacatctagatagatacctagatatacacatatatagtctatatgttattttctttaaacccaagcaaggcttatgtgaaacattgggattctttttacttgaattaaaaaagaaaaaaaaagtaacatgcagtcactatatgtggtgagccaagactaactgatgttaaaaggtatcgacaacaacttgaaaaagagccttcttcatctctcctcctctcattatgcaacccagtctacctgaaacttgcagcagtccttctgcctctgtttcctgagttttgggataacaggtgtgcactaccacaccctgcaaagtaagaactcttaaggacatgtccatttgcttctattggtgttgcaaggtgtgacacatgtatagcttttctttggtgttcttttgaaacacagttgcacatttatatgttttgctgcatgcaccgctcagaagactgcagagtagtctctttctttaagtatatattttcccttgtattgatactttctagatcaggtgtatatgccagaggagattatgactctggtgtctctgagagatctaatcttgtgttccgtgaagtcaactatttatcagatcatgaaaccaaattctagaatatacattttatctaattatgaattttggatcaaagagacaatgtaaatagtttacttttgcccttagaataacatcactttgaggcaggccacacagacaagacacagtgagggtcttaccttgtgtagcactagctttcttttgttcttgatttgccctggtgtgagaatttgccttacgcatcccctagtgcatttgtgtgcacatgagcactttctgcttgcttcttgaaggtgggattgctcgcttccctttttgtgatctggttgcttaccccttatggtaagcatggtgatactgtctgggcaaataacaccggaaggcagaaaggccttgctaacagaaaggggaagggaaaaggaagcacttggtagtttgtgaggcgtaagctgctttgataacgattccagagccctaccagggcagtgatgagaaactggtaaataactatgttacttcatgggttctagtgagaaggaacagtttagccccttagtatcttattccttctatcccttccttctgtttagttaaagtaggaatgactcctgtgtagtgcttagcagtttgagaagtttgcaaagtaaacaaacatgtcctctgcccagggttcaggaaccagatatagtaaggttgagttatttggctggtatattacaagaactttcttgcttctagtaacagaagctcaagtcaacatgattgaagcaaaagaaattctttggcttatgtagctagccagtttgaggatgtggcgggtctcaggtgtggatgaaatgtgcagtcttctctccttggcatcattggcagtgcacagactaagcttgttggctctagcagttgtcgctttgtacttgtttttttttttgtttgtttgtttgtttgtttttgtttttgtttttgttttcttccccaccaacatttcctatccctagaagtgccagcctgaggcatggataggattttcaggtccattcttgagccaaactttgttcactgtggtctagggaccatagtctcttttatcagctatgctcagccatgtgccacccctgaagcagggcttgggtgtttactgttacattgattgttatcctgggagcaacttgggagaatgccttagctttggagttttctcatagctggaaacaatgttgtggagaagtagacttgatagtgccatttgtagatttttttctgtgttcccaacatcatattagactcctgacttctgagcgggaagattttctttcatttacccttcccagccgtgtttctcccctctgatcacattcctttcggtttcttggtgaaaatttgtttttcatctaatctctgtcttttctgcttatgttctgctatgaagtgagttggagagcaccccccccccttgggttgaagcataactaccattctcttctttcaaagacagtcctactgcagagcttaatatatcagattaacaagaactccaaatttcctagtgtagctaagaagcctgtctctaaagagcagagtgggagtatactgtctcaggttcagttgagtgtctctggaagcacgagaagcctggacagtggaatgtgggtttagagactttctatacacactcctgcgagggctgtgggaatggaggcaggagggaagtcaaatgctctggttttcattctgtcaccagaactaaaagaaaaaaaaaaaaaagaaaaaaaaaaaagacctaactgtattttaggcccccaagcagcagtcaaatgacatgccacctgctgacctaatccatttcattctggtactaggattgccaaagcaatttgctcaattgcaattgactgtttactctggaaaacaacaacgattagatttaatgttagaaatcatacattttattacaaattaaaacttttaaggataaagttaatccttttggaaaagaagtcatttcagtatggtgtgaatccttcagaaactagctgtacttttagaaagccacttttcaatgcttttctaggaaggacagactgctgatgagacagacccaagacagcagaagctgagtgaagcagggaactaggcactatgtttaactttaggtaaaatttgcattttactatgggaaaacaaactgtgtaccttgccagggatgaactcgtgttaccccagaggctgctcacctgctgaacggagcagagggtgtgtgctggtgcagtcctgtgcactcgggcgagtgttactgcaagaccacctgtggctggcttctttctccttcagctttaatttcaagaataccattttcccttcatcagaatggagcaggacagttaaaacttgcaaattacagtttcaggacttggactctggtcttgaacattgtacttaatagtcacctatagaactgcagctgacacggtagagttgtagacgcacggacttcccactcattcagagatcctgccataagtaagtaccaagctggcagaatgcaggtgtctgcttccagttccaaccctcttctagttcctgttgctctcaaggttctccagctatggaatttgcttccctgcgtgagctgctcagaagccagctctcctgctctgcccaacacgctcacagtcggcagaacaggaaatcacactgatcagcacaccactctgttgatcaaaggaagtcaaccacttttcttcaacaagacccagcggtttcagtcactatgacttctcttcccctgccgagagcaaggccactggaaagctcctggcagtgtgagtctgtgtgtagagagcatggctgttccctttgccttgcctgtggccaggagaggacaaggtggtgaggagcaatggagagaaacagcagccagagtctttcctttcggaagctgcgagtgatacatttcttgtcggtggcagtccctagtggccgcccttaaatttcttggggaaaaacttaatatttgttttaattacaaaagagccgagcccctcagcaaattgagcatgtggtgactacataaaatatatgatagaatatggttttactttgagttaatcacaggtctggcaaattagaaaatttaaacaagtcacttttttttttaatgcttaatcttgtaattgtgttcctttttgcagtttgctgggtagttttgttttttgtttttgttttttagtaaggaacctgcagacctcaatgctaattaattgtatataggcaatagtatatgctatttgtggctctttccagtgtatacgtctcgtcctcataagctgttggcattgtagtacagtttataatatagaatgtggaaggaaccctctgaagaggacagtgcctattcattgctgtgtttgcaagtgagcagtatggcagccagcaaggacaatgctgtgacaggtgggaagagcagatgcagagatgccccctctgttccctcctctcccccctcttcagcttgacttcatggttttctgctcctttccgtttagaagccacgtgtcccctacccaccccaccccacacacatttctttggcttgcaggagccactatacaagaatacactggaagctagcctgtacttgacctgtcctgagcataggctgtctgggctcagcctgatgtgcaactgaaaaggtgaggacccgacataggagaattcatagagcaggttttgacagcttattatctgaatttgaggaatgatagaggacttctaaattctggctctgcaaattctgtagtactttgtatcagaaacagaagtcacattttttgtgtataaagaaagctgcttccttaccttggtctaggcttgggtctaagtgagcagggagaaaaggaagccaatgccccaacagtctgtctctcctccctgaaagtgaagctctgcgccctgctgtgaggaatgcagccggcagtggcatagcttgtcatctgccgaactacttgagctattccctgcacaggcatccagctaaggatttcctttctatggtctcccttcaattatcttctcctcaggcattgctggtgggaatataaaatggtacagtcacttgaaagacaacagtctggcaagtttctcaaaatgttaagcatggagttgccatgtgactcagcagtctcactcctgggtgtgtacccaagagaaatgaaaacagatgctcaggcgaaagctccaacatgaatgttcatatcttcattgttcatgatagctcagaagtactaagacctccatctaatgaggaatggttaaagaaaatgtggtatatccaaggaatgcaatggtatttagcaacacaaacaaatgaagtgctaatgcttgctacagtgttcttgaatcttgaaaatgttagggtaagtggaagaaatcaggcacaaaggctgtacattaaatggtcttgtttatattggatgtgttagatatgcaaattcatagtgacagtgatgggaaattgaccactgttgcccatgggctaggggaagtgtgcaggtctcagagtttgaggagtttctgctgatgcattcagttctttttggggtgatgaaatatctaaagtttgctgtgcttatgatcacagcactctgtgaaggtgtctgaagctattgagttgtatacttcaaatgagtggatttattacatctgaactatctcatagagctgttaaacatttcatttacatcttgatgaagatactgaatgttttcttaaagtagcagtgttagaagccacatctcaagaatgccaagtttgtgacagacatcacttacttgtttggtgtgccactgttttcagttttcattgctttatctggcttgatcctgatcagaccccactctgcagatgaaactgatccacataagaacaaatggctttacaggactgtacagccaaatggtgggacaaggattcactctcaggcttcgtgcacactagtcagtgccctcctgtggcatgtcagtgacctgggatgcctctcggattgattagccttaactgtttttacttctttaatagaaataaaaaaaaaagtcacttttggtctctgatttgctttccttatctggaaatggagataatggtgttttcacttttaaagtaattttctccttctcctggtttgtttatgtaaaaatggatgttgggggcattccctgtcttgggatcatacataaagactgctaaaagacagttcaaacttctgcctgactggacaagtgcttcacagtaaaccacaaaggaatgttgtttctcctgttttatgctttttgactgcacaaccttagcaggattaataataaccacttatgtccctgttccccgaggagcagagccactgtcctgacagcatcagatcagccctcatctctccatgctgtatgggaactgatgtccgaggagctggagtggagtaactagcttgcctgaagctctgtctcaggctgcctctctgctgtaccagttgtgcatttatttgtccctagtagtatttgtttggccagttacatttatttccatgggtttgttactgttaaacatgaaaaaaggctagaatagtgccactaggtggacttaactctattgagagtaaagctctttgttttgacctggctgtgccatccttgatccaggctgcacagcagttcagaacccctaaatgcaacttgaacccttacattgattctgagaagcaatgccaattgtgtgtcctgctgtatagctaggaaaggagcctactgaatggagatggttctcatttgtcagacacgtgccacacagcgaagagcgacttccaagccatgcagcatcacccagtgtttacatgtagaaagtttgttttccatcaggagtggctccctgcctttaccaggccttttgacaggatgtatctgagagacttgggttgagaaggacctctgtgacactgcctagaagaagcttttcatggccacaagaaagcagggaaacactgggaagcatggggctctgactttctacgtctcttaatgaggtggctttgcagggtttgttgttgctgttgggtgttttcggttttctcttttgctatggctacatcttgtttgacttctctactccagaacagagttgtatgttagccttgttggtgtgttgacccagaggagagagggccccgctgccattggtgttgttttgtgtatagttaggcagacctggattgctgctgctgttactgctcactgattgtgtgtgtgtgtgtgtgtgtgaactgaatgtagcacatgtatgtaagctcagaagcccacgtggaagcaaaccctgaaaactgcaaaagatgggagttggggtaaagccttcagcttttaaataagcttggtaatctggctagctgaatgccagagctcacaaaactgagaattgcatttctgaagataagataggccccttttgtatttttatctttttctcccaaaatgtgttgagttttaatatggtgctttatctctgtaagcaaggaaacagagccagtggtgagctcatgagctgctaagtccaacccaatagtttctcttcctttctctgatgaccacatcctaagaagacagaccgtgtacagattccttctccttaaatgcctggctgtcatttccacactgcagcatgaagttgcttaggggctcacaaagggtaatacgaacttttcagaagtctggtgtagggaggcccagatagctctgcaggtaaaggttgtggaagtctgtagacctgagtttgatccccagatcccacatagaggtgtagggagagagaggtgtggtggcacatgtctttaatcccagcatttgggaggttgaggccagcttggtctacaaagtgaattccaggatagctagtgccacatagagaagccttgtttctattaaaaaaaaaaaagtgttgggagagaactggattctagaacgttctctctcgcctccataccacggcatgcacacttgcttgtattactaatagtatagtagtaataatggtgccatctgtatatacatgctttagagaactgatagtggtttgaagaagttaagactcctgccttctgtcattgagctcagtgttgcagaaataatccttacgtctagtaaccctttttaaaaaatactttgtgatacttcgaatccttcttgtagttctgtttattacaactaagaacaaactgcttatttaagcgattctgaataattttactttccagcttgggtaaatcatattaggaactcataatagggtttttaaatatgtcagtggttaaacagactactcactgcattataaaagttaacatgtgcacagaacaggacactgcatattaaagagttagcatgtgcacagagaacagacatgataaagcgtgtgtgcagtggagaaggagtgagaacccaagtgggagagtcagagacaatagagatctgtatagcccagatttacctcacacgcctgatcttcgtgcctcttcttcccaagtgcttggattgcaaacacatgtctccatgccccactcaactgatgacactctaagtcagtagtcctatgaaccaagacgggtagacacaaacacaattgtgaatacacataaaaagtgttgattaagaaaatagacgtggacagttatggcagggcctctacctgttacttgacttgtttgatggcttcggtcagtgcctgttgcttaagtgggactctttcacatctggagggtaagtaagcttgtattttgaggaaataagtctttattggcctgaataaattcagaggattaaatcagttctctctcttgtagacagatgtcagatctatagttataagagaacagaaatttcccttataattagaatcatgttttctgattgtgagatctaaggttatttgccttcaaataaaatgtttaagaacatgagcacagagctatgcatggtgatggacgctttcaatctcagcataggagaggcgactttgaggctagcctgctctttctagcatgttccaggacagccgtggctatagcagtgagagcttctgttgaaagttaaaactgtagatttggacaagatcagctgaccctaaaattcctacttgcgtcttgtttgtttgtttggtttggtttggttgtttgagacagggtttctctgtgtagccctggctgtcctggaactcactttgtagaccaggctggcctcgaactcagaaatccgcctgcctctgcctcccaagtgctgtgattaaaggcgtgtgccaccactgcctggcttcctacatgcatcttttaccgtagtatggcttttctgatagtttttttaaaaaaaatattagttaaaggcacatttagatttgtgtgtgtgtgtgtgtgtgtgtgtgtttatacaagcacatgtatgtatgtgagtgcattccacaatgtttgtgtaggtcagagtatatgtaactgtttttgtttttccactatgtgggttccggggatggagcctaggtatccagcttggcaacaggcaccattacttgctgagccatttcactagctccacattttgcttcaataattgtgttattatacaggactcaagtcctctgtagctatactgaatggtggctaatgtccgttggtttccatgtgtcttgttttatatgttgttacttgtcccatgtaaagatcaggacctggctgaaacttgatttcagtcagttttattctgctaggttttcatcttctcacgtgtagtgcaccactaatgtatttttactatatgatgaggttaaaaccaaagttacagctgttaaccaaaatcctaacctttcttccatttgcttgatttaatgcaaattaaatattatgcctgatagaaatcattaagtacataatttaaagaagttgccgtgatccatctttctccagtttctgcccttacatccaaatgtggaactttaagtctgaaagggagtggaatgattaggaagccacccttctgaaattctaagtgagcactcctctccatgtccatgtgtgacatcgggtcctttgagcccagagccagcaatgcacaccctacattcagggtgtagtcttcagtccttgactgatttgcctgatttaaatattcatgcttcattagaaggaaaaactgctcacttctaaaagtgagccaggttttttgttctttggggttttttttaatggcccctttggcactttttactatattaatactgccctagagaaggggtagtttggcagaatgcacccttattacttcaggggcccatgaaggggagagcattgcagatattaataactaatggactgcaatagagctttctttgcttctttgctttcttttctgggtgtgggctattgtatgtgagcccgagaacatctacttgacgagtatgtgtgataatagaggtgatggaggtgagtcagccgtgtgctcagatgcatgatgctccacaacagactgcacacttgtactcttttgttttagtttggatgtgagaacttttgaaagccatctttgtgctcattttttggtcatgaatctcactcctacaacactcattttagcttagggactagagcacactttttaaaagtttattttattttattttattttattttattttattttatgtgtgtgcctgtgttgagttgcactgtgtgcatggaggccaaaacagtgtattggatggataccttggaactggatttataaatgaaccacatgatgagaatgctaagaactgaacccaggtcctttgcaagagcagcaagcacttttaacttttgagctatctttctagccccatcaagtgtactttatattgatctaacttcttacatctaagggatcatatggaatttaaacatttatatgtcatattttaatcattacagaatttaaaaatttcatgtcttttatgaagagcaagatagtcgatgtaaggaaagagaaatatgtaatagggaaagaaaagctatgtaagataagatataaagaaagaggaaagcaacatgaggtactgagtggaagggatcaggatcctgactgccaggcgtcttggtgcatggggttgctgcagcagagcatcctggcccacagagtttacccatcacagctgcacaggctgggaatccaagatcaaggtgccagcagatttagtgtccttgcatggagaggaacaagctacaccaagcctcttaaaaaggtattaaccctgttcatgaggatgggccctcactgtctctaccattcttgatagctgttacatcggagcttgggtttcaacaaagaatcttagaaggataacgacttaaacattgctttatgtcttagtcataggaaagatgacactgagagttcaagtgacttgtccagatgaaatgttacatatttcttcagtcttccttacgttgaccagtgtttgcagaaagtgtccagtgggtttggggcaaccttacagtgtgtccttgacccatcccgttggattaactcatgtgctaaggaactcttctggagtttcattagttgcacagactaatttggcaccttctagtatattcttcattattgtcaagtcctatctcccagtataaaaatcactaaagacccatccagttatcttttcttttttcttgttttttgagacagggtttctttatgtaactagaaccctgaggtccctgtacttgctttgtagactaagctggcctcaaactcacagagatctgcctgcctctacctccagagagctgggattaatttaaaggtgtgggcaaccatgcctgtcccatccaattattttaaactgattccagtatccctattgagaaatgtttggttatgtaacattcctacaattctttttttttttttccatttgaacatatgaactggattgaattgcctagcaccctgaaaaataactagaatgttataaaaatcataactttgatatttttttcattcatttagacagtcatgaagatgatttttgtaaaataatgttaaatatagctagaaagttacattctaggggctctggggagatggtttaaatgcttgctgaataaacacaaggatccaaatttggatctttagcaccttcataaaatttgggcatggtggcacataactgtacccagtgttgggaaggaatagatgagaggactcttagggcttgctggcctggcagtctaagcaataggtaaactcttaagttcagtgggaaaccccatctcaaaaactaatgttggcatgatgaggaagatacctaattgatctcttgcctacacacacatgcatccacacatacacaccaggctacatgcctccactcataatacaccagtctgtgtgcatccacccatataccccagcctgagcacacatagactcctggagattgaaaacatggctttgtactaagtcacgccccaacatagaaatcaccagtataaacagccatcaagaattttagaactatattaaatgagtcttactctctaggatctcagagtctagagttttaaggaattctgggtcataactttgctataagacacagaatccttttgaaatagcaatgtttcccaatgcatgtgttaagaattaaatatgatgccttattgtttaagttcagatggctcatgggagaagaaagctgtgttgctcctgaaggtggaactatacatggagattgtgggttgatcacaaggatcactgcactgttctttgaatttttccataggtttgaaattttataaagaagtatgaaaatcaaaatgcttcctcatttgttttaagtcagggtctttgtgtgctggacgcactgtaatataacaaaccaggcagcaccagtggcttgggtggccagtcagtgcatacatcaatttaatacattaaattgtatacattgaataaaataaaataaataaaaataaattatatacattaaataattaatagtatgcagtagaaattgttactgctcagtactcagatcactattggcacagctgtttctctgaacgtcgtaatgagtctttcctttgactttctggtcacatgactgtgtattccaagtagtatttttgtggattgtgagactttagtttttaagaagataaccatttttgcttctgtgcttaaaatgtgttgcagccttttgagaaagagaaagaggtaggaagttaaacttttatacaggtcctttaggaaaaagaaatgtttgtgtttcgtgcttgccacattattttcaccatgggaagctggtgagggaatcctgtttattatgttgtatggtcaccactggtgccctgatgcaggtggaaccaacctggaactcttcactgactccatccagaatgttcatgtatgtgcaagcgtgtatgttcagtcttcatggatccttgtgtgagcatgcacgcacgtatgtgtgctcatgcactcttctattttgagctccaagagtgtagttcttcgagtgaatagatttatatttaactaaaggggaaggaggagctattcctgggctgttgctgtttaaatcttcaattcatgagagaatctgggctataatgaaaaaatgcagtgatgtttaaactcgaatcttctactctagcacagtacacagttttgtgtaagatacttcaggattgagcaagcatttgttagaagcaagattcttaatacagtcacacgttattttcagtgtgttgggctgtggtagctgctgagccccgagtttctaatatacaagaatgagtcacccactgttctcttttcagactcactttggtttcaacaagagctgccgagcttcaagccctcacccccagccccactgtcctgcagtcgttatgtaaacattttctctcctttttatagttgtcttgcctttactttagaattagagaatgctttgagcagttaccgtcaatgtaatgtactattccctctgcttattattgcgaggagccctgccatcacagtggagggattttggtccacttccactctacttggcctctctttttcctccatcctttactgaggtagggccactatgcttaatgaagttccatttctttatacagtgacttgtgttatgttattcctgtctccataaatccagtagtgcatgattactgctgaagttgttcagaataaaccacatctggttaacctgttattttgcatgttttctcagataactcagaaactagtacaaagagacatgacaggttaaattctggtactgtgacagtctcatgtgtctttaaaatgggttataaaaagtctaattcccctacctccattgccgtttgtattatataaactcatttgagggctttttcttagttttaatcatagggaaattttcaagttatttctgatgttagtcagggactgaggaaggaggctgcaggctctagtttgggccaggagtctgacagggatattaagtttcatgttgcttctgtaatatcaacctttgttttttaactattcagaaactgaattcatccatgttagagctagaattgaaccaatgcctagcccgagttttaagatcttactgattcatagaaggagtagactggtagactgttagaggaggacatgccacaccctgtggtgctcagaagacccacagcctgggggagtcagttctttctccaccatgtgagttctgggattgaactcagggaatcaagcttcgaggtaagtactctttaacctgcagacccatctctagtgtggttagtcacatagctaactcccttacctccttaaagagccttaaaacatatctggcacatgtagatcagtaaatggttttgtaggaatggggatgtatttctgtggtatagtgcttgcttgcctagtgtgcataaggcccttgattcaatcctcagcaactttccaagaaaccaaaccaagcaaaggtaataaaacaagagtatgcaaataaatacacaagggaataacagaatagacttgatgtgagggtaagttagtaaactagaagaaatcggatgtggcatcagggtcagagatgggaaagtgagaggtaatgaacatagaaactggatataagacttagcatttatagaataagagtttcagaagataagtggccatcaaattatggaagaaaaaccactgtctcaggaaagtcagattgagaaagtttttatcaatcaagattgattgggggagagggcagggaaactcatcctcttgcttaaaatgttaaattctcaagtaaatagaacacaccttagatttcgcctcagtccaggacaacagcagctgaaaagagtgacccatgaagaacaggagtcagatccacaggccatctttttcctgcactccctctgagaggtagaggatgaggcaaggagagaatgtgacccaggagctttggacttagagaagaaatcgtggtggtgagaggataatagagtccagagtctgttgtaaggacagccgtcctgatactgtagaatcgtctcttccagacagagtggtcagaaggtcagggaaaacaagcaaaacaaagtcaattccctgaagggatgagcagatttaacaaagttgttctgggtagtctccctagtgcagtagggtcagatgggggaagggaagctgctttagtcattgttggcaggagtgtgcttacctagttagagaatgggagtcaggatgtgtattacagctagtgggagtgaggtgcccacacaaggctaaatcagaccagaagcttttgtttactgagaaaagaataataggaacagttagccaggtccctggagttggagatacagccctgtggtcaagacttgctggggtcctgggttcaggactctgcactgcttaaagaaagagttcagtcacaaaagaagtgttgtaaaagctctaagtgttgtaaaaggtaaacatagcaaggaatgtgcaacacctgtcccctttccttctcttctggactcccctgccccagcttcccagtgttctatcctctctctcttattccaggctccagtgattggcaagctttttctcagtaactaaacactgttctttctgggccttcacactttctctcctttctgaggccctgtgccttcctccttctagatgcctgcacatgcttaggccttaggatgggaactgcttcctgctggtcagctttggctgactgttcatctaatgcactttcttcctttgtacctgtcattttaaaaataagtattttctcctgcgtctagttttatactccaagagggccaggacttcatgtacttactcaaggggtagtctctgtgtctgacataatgtaatgtactcactaagtacaatcagtcagtgaatcaattgctagaatcaaaacatactaggaagtgattggtggaacagtacattgttggtaaggaacaacagatgagctaaataaaatgtactcaagagtcaaactattttatcaattgggattttgtacatactagtaatggttcaggtcagccaagaaagaaggcttgttcaattaaaccgtctaagaacatttaatgtattttagactgaataccaagtgtcttgactttcaattgcaagttacaaactgaactcagactagctttagccagagaaggctattggaacgatacaggaagtatcatagaaaggaaagaaaagctacagcctctccacctagagttcaggaagcagcagggcacgctggctccacagattagcgagctatggaaatactctcttgtgttgtgctctcagtccttgtctagtgtggtacagcagctccgtgtgacagagactgcagccttcaggctttgttacctttggaagaaaagcaaactgtccagccctctttatgttgaaaatccctgggcaggtactttgatttttgtgacttgagtcataagcccattatcccagcctaaagctaagagcaatccctacatctaaggagatagggcaatgtaaagacttgaatgcaggttgcagtttgggctctatggggacttgtgtgcatgtgtctcagggtgacggtgtgaagaaagcctttctcaaacaaggtaggtgtgcagctggcctctccaaggttccatatgatgagctcatcggttgctctgccttgtttgtttgtttggtctgctcttaacccctgttgagtgtcttatgcaaaaacaaagtggttagaattttacctaaaataaaaagttgttaaaaactaaaagaagagctgggtggtggcgcactcctttaatctcagagcttgggaggcagaggcaggcagatctctgaatttaaggtcagcatggtctacacacgcacgcccgcacacactgagcatgcctgcacacactgaaagaaaatggagcagggcagggggagggtataggggactttcaggatagcatttgaaatgtaaatgaagaaaatatctaataaaaaatttaaaaaaaaagaaaatggaatttttgttacttttactatagaggtggaagattgttgttagcatatgaaaaccggaaaccatacaggaagagagttaataacctaagagaataaaagggaatacttatatgaaaatgtccttatgcaacccaaaaagttgtttcataatcattagaggtaagtttattaaaataggcatagcggggtgggagagttggcttggtggctaaaacactgattgcccttctagaggacctgggttcaattcccaacacctaccaaggctcacaaccatttgtaactccaggtccaggagatctggatacccttttctgacctcccctgggaccaggcacatacaggtatacagacatacatgcaggcaaaacacacatatgcacaaaataattaacaataataaaagcatacatattagagtccatggttttaagcagacaagtaattatgtacaatgaatatattttagtgggaaagtgaatatacacaattttaaaaaggaaggaactcttctttatgtaagtaaaggcagtaaaatagaaattaaaagaatgacaaaatgtctcaaactcttgttacacatctgacaaagtttcttcagatttatatgttaaagagttcttgaccgagagacaaggatgagctcccaagggaacaggaacaatgacccgcaactcacattcaaacagtaacacagtcatctgcactacagagaagaaaacatcagcggacaggaagtgtatgagcaatggcggccttctacaaccagggagataagatttaaaacctagtctctgagcaatccccatggctccgtggatagaagagcatgcagccaagtgtgggacccacatggtggaaggagtcttctcttcctccattcaaatgctgtgtgttccctacctataagtaaattaaaacaaagcaggcctataatcccagctacgcgggaaactgacaggaggacgacaagttcaaagtcttggcagtgcacagattgaattcagagccagcttggacagattgttgaaactttgtctcaaaaaaatataacaggacccagtagctggtatagtggcacatgcccttaatcccagcacccaggaagcagaggcaggtggatctctgtgagtttcgagccaacctgcactatacattgagttccaggccagccagtactacataataagcccctgtttaaaaaaaaaaaaaacattaatagaagtctgggatgtagcttagtgataagctactcgcccagcatgtgcagtgttccaggttcagttcttcatgccacagtgatatacacacgcacatatatacacacacatatatatttaatatacatatacatgtaaaaccatgagatattgttttaccacatgggcaaagtaaatatacataatatcaacaataattattgatatggagttgagaatcctgtgtactagtggctggtttgccacatggggagcagcatttgtattttgtagcaaatctgaaatgtgcacctatgtgtcttattctagagcatcattgtccagtgtggctgcaaatgtaaagtagtcttttctagttgctgcgttacaacaagaaaataggtaggagtcattttaagttatgatcatcagttttaactacatattttataaaatgtactatttcgctgtaattttaaatctaaatacttaatttaaattctggaatctaaaatacttcaacatatgatcaacattgtaagtctcctgtgagctgttttacatttttttctttacaaagtcttttaacctggtgtttgtattttctacctgtagcatgtctcattttctatagccgcatttccatgttcaatagccacatgtggctaacagatactgtactggacagggtagctctagaggtgcccttagtgatgcacagagggacttgtttacagtggactttttcataatagctgaaacagaatcaatccgagcatcttttgacaaataaattgtggtatatttttagagtaaaatgatatactacagttacaaaagaaaaatgaatgaactacagatttgttaatcatcatggggaattttgcaatactggaggaaaattaaaattacagaaggatacttaaaagctattaaaatataattgggacctgtgtagttgaaatgagaacttggctaatgtatgaggttgtgaggccctaggttcaatccataacaacacacacacacagttacagtttgcaggtacatatgtagtaaagtcgtaaattaaaatgagtgaaaaattcagaagtagttttcttacaagccagagaacgatacaactggagagaagtggcttgcagatagatagatgacacatgtcattaatgctcagtatatagttgatattcagtttcactaatcaaagaataatgataatgaagtggatttctttttgcctgtgaaacttgttaaaaatgtgaagatgtggtggtgtggcttggcactgatcccagtgcttaggtgacttaagcccagaagcttgagagctcgaggccagctgtgctacaaagcaggtgctgtgttgagcagtcctgtctctgtgaacagttcgtgtacttggagagcagcaatgcccacagatgataagactgtgcagccctttggctaatagaaatctacattttaaattgatttcagtgtttttgtctttagttttgggttgggagtgttgtttactctgatcatgaatgtttggtatatgcaaggccctaacttcagtcctctgcaccaaaagaaaagatttaaatgaaaatacatttctgtttttctgtgagatgctcattttatgcagctgcagttatcctaaggataatggatggtgttctattccagtggatctcaacctgtgggtcgagacctttggggtcacttaccagatatcctgcatatctgatatttacattttgattcataactagcaaagttagaggtacgaagtagcaatgaaatagtgttatggctgcaggtcaccacagcatgcattgtagtgaagggttgcagcatgaggaagggtgagaaccactgctctagacttactaagttagaccccagtgccagccagtccatgtttgagaaacggctagagattggcacagttcccaacctttttcatctgagttttgagactgaacccaggctcccatgcacagtgtggagtgttcagacgctgagctgttcctctatgcccaaacatttttctttaaaccagcatttacgatcaggttttgactgatttggcaatcagcaaataaaactattgtctttattttggtgtagaaacgaacaaaaagctgtgcatttggggaaattgggtagctatgtgaccctattacaatctagacctcaaacctgctgctagctttaatcaggcattcatgtctcattctgagtgagagtcgcttctgagtattcagggatactttcactttgaatagagtgctaataataaagtctctggaagagaaaaaattactgagtacttttctgaacagtgtttggtctcagagttaaaaccagaggaaaagagtcccagccaggtgctctggatttgacctgcctccatacctattaatctgaagagagcctgagacccaaacagtggaggaaacacacagcctttcgtcttccacatgtgtctgctttagacagagtacgtctgtgctgcttttctctcctaaagagtatagttcccactagccttctcttacgcttgcagctctgagtcagtctgtctatctgtctgtctgtctgtctgtctgtctgtctgtctgttttagccaaggaagtgacatatcagtccaaactgtggtttcttgattatgaacttggcaggcctgtgaaagatgggtagccaaggagctaaagggatctgtaaccctataggtggaacaacattatgaactaaccagtaccccagagctcttgactctagctcatatgtatcaaaagaggcctagtcggccatcactggaaagagaggcccattggacttgcaaactttttatgccccagtacaggggaacgccagggccaaaatgtgggagtgggnnnnnnnnnnnnnnnnnnnncgccagggccaaaatgtgggagtgggtgggtaggggagtgggtgggagggtatgggggacttttgggatagcattggaaatgtaaatgaggaaaatacctaataaaaagtattaaaaaacaacaacaacaacaaagaaagatgggtagcttcagttattactgcagttgggaactaagaaaacatgtttctgacacaggcaggaggcaaaagacttgctgaggagagtttggaatggatgtattgcagaacaaaactcaggatcaggcattgattgaaatggccacatgacaggaagaaataattctgcaggtttgagctcatgtgctccctgatagactgtgcgctaggtgctcagtactgcctgacatgctagtcctccgagaactctggcactggagttcttcatggttctatcttgtttgctgtgtcagttactgacctgagagaaaatacaggtgtgtcaggattctctctgatcagttacccccatttccttcacatcttgcccagagtacaagttgttcttagaatctctccctctcccttctcactcctccctccttcctcctctcattcctctcctctcccttcatccctttctcctcctatcttcccctcccctatttttccctctattgtatggaagaaaaaaatattcaagttctttaaaatgtgatcttaaaaagatttaaaaatagttgaatgagaacataaaatatttcatcactttttgattgggggggaaggtgtatgtagttctggctgtcctagaacttgctatgtataccaggctagactggatttacagaaatcctccaaatgcttggattaaagacttgtgccactatatttttagtgaaaattgattttgttatttatgatacaattgtttgaaaatattaaatttatgtttctggttttacattcaaggctgtttaaaaattatttttaggtacattcagagagtagactaatgataatatatagcaataaaaaatttttttaaaagtgactggagaaatgtacaaaggagcaaatatgtagaatgaggttaacagtgagcattatagttaataggagtgtcttgcattcaggatagcttgatataagtagattactgctgtgttggaaggttggctggtaaggtaaatgatggacgtgttcatatctgttactacagtaaccattttactgtatacatgtgttttatatcttgtacatgaaatgtacacagtaaaatttgtattttcaaaaaaaatcagttaatgaggctcagcaggtaaaggcacttgctttttaagtcgtacgatctgagttcgatccctgaaacccacataacggtgggagaaaagaatccatagagctctctgacccctacctgcacagggtggcatatgtgtgcccagcatggtcgtcagcatcatacagaaagctttaaaaaagtagaataaggaaaagtatttctacatctcaggctaagaaagaacacttcttattatgtatttaaattctttgtacagatgctagtatgaaatcaggtgttttttttttttttttttttttttgagacagggtttctctgtgtagccctgactatcctggaactcactttgtagaccaggctggtctccacatgttcagcgaaaaagccctagatgaaaatattcatctagattaagaaaagacaatgacatgtccgaatacaataaaggaagcatttttatttatttgttttttccagacagggtttctctgtgtatctctggctgtcctggaactcactttgtagaccaggctggccttgtactcagaaatctgcctgcctctgcctcccaactgctgggattaaaggcgagcgccaccactaccggctaaaggaagcatttttgatcagagtaacagctcatagagaaaatgtccttgttttgacactcactcaagaaattggaaaataaaagctaaaaatgtaccttggtcatagtctccactgagttgtctacagaggggcgggattttaagcctgctgtagttttgaaagtcttaaaggagatggagttcagatacagtcagcagttggctctgtctaaagctgcaaagcacaacactttgctctgttagctgggtgtgtcagggcttccttttttcaaagggtatctttttacctttctatcttaagaatgcatttccatgtggatataattataaaatcaagttataaacaccatacaaagaataagcctttgaaataccttcagaaataaaaagtattttaccttcatctttctcccattcttaatgttcttcttgtcttttgttattttttattaactacaaaacagcagagggggaggaaacttggagtagttcttaactaaaaagaccccagtggccatttgttattgtatgctgttggaggtgatgtggattgtattgctagctttttagattatgtttaagaaaaatgtaaggatgagtacagcaaagaagtatttgaatcttaaactcaaaaggaaacataaggtaatcactaagctgttttcagaatggtcacttagttgtggctgtaggaaagagcagaatgttgtttggcaggatctttgatgtgaggaaaatctccgttgagtaattgttagacctgatgaaaatccatagcaagtagtgtcaagtagctaaagagcatccacagctgccaagtgcagaaataggacatcatcattgacttctccagtcaagcccttaactcctcactgtcatgacagctaggacattcacatgctataccgtgtcttaaaacggaaaaataggtgaataaaccatgagtatatgggtatgagatttgggttcaattagcctccaggttcaattaacctccagggttgaaggtctgatatctgttctctttgggctcatgtagttcttcctgggtatagaaagacatgttaaagcaaaagaaaaggtaaacacctcggagaacaagcttttaaaatggaaagaaacccttccacatagacagcaagatgagaattacagctgaattgggaagccttagaggaagaaatttttttccaaaaatgcagtagatataatgttattttaattataaagcaatgtatatttattgtaaagtcctctgccaagttaccaaggcaaaaattgcctgcaagttcaccagtgttcatattttgatgcacaatgtgctttattttcataggaattaatgtgagattattccagaagaaccaagagggatcactgtgtatattcttaaaaattgaaatgatgttgcatcctgacgccagataaatcctgggaaattgaagtttgggtggatgagtaagaatgcaggggctggagaaacagctgagcatcgagagctcttgcaaaggatcccaattcaaactccaacacctttactgggtgcctcacaatggcctgtaattctagctttagggactccaacaccctcttggcctccatgggcactgtaattaggtgtacaagtccataaccagaccacctttttttaaagtttttttttttttttaagaatacaaatgaagttttggaacaattgttttttgtagtatatccttcaaatccatctttaaaaaatatgtccaagctccttctggttcagactttttgttagcttaccatctattacatcaccccaactgtagtaaatgttaacctgtttgtgttattagattgttgtgaaattgtagttaactgataccactttatctcggcaccatgaaggttggatgttggatgttggctagggagtgatatttctgtggctgccaaaaaatacttcttaatatacttaaaacaaataggaaagcaaaatattgtcgactttgcctgttatcttccccgtgtgaattacatgccagaaggaggatggagaagataggaatgatcctctaagaggtgtgtgtgtcctcagcactgatttctgggaagaaagcttctcactcaggaacaaaggcgtctcctcctcccatggctttggcagcagccctcgtgtgctgggagggaaatagcgagtgtcttgtgcacttgggtgttttaaagatcttaaggattacatttagttgattggtttgctactttcttgaggagttgtatgcattaaagacttaatcaaattgcattgcattttgtgtgtttcctgtgtaagcgtctgcattcaggtgtaggtagcactgttttccaagcccagaaagggcagggtgctcagttgcctttataaaggcaatttcttgcttgactgcgattgagtgcagaattataataccaagggcttaatttataacagaaaatgcaggagtgcaaacctgttaaaccccctctacatgtataaataaggtaaacaatggcagattagcatggaatactgtttgatgtgaataatcttaaaaacaaatttccttggcctctgcttgtcatacctgttagcacagaaaacttgtaggagtcagggcatcatctttgaaatacaaaatcagagtggagaagcagaatggcccgagacagctgctgcctggattgtcagcctatttataatctgggaggctcgacacaagattcgctagattgccactctgtgtgctgtgcacagtgtgctgcatcagatggcaatgacgatttgcctgtgtgtgtgcatgcgtgcggctgttcctgctctcagacttctaatttttcagcaagggattccttttcctgcatagcaatggagcatgccagtcaaagcagattttggagttgcaagcattgaacagtgtctcctcaggacctgggcattcgtgtggtgctggaggaagagttctggtgggccaggcatttaaagatacctggccctctctgtattcttcaccaggctgcctctgctgagtgaatcatgtgggacaggatgtcgcatttcagtaccttttggctatctgtgcacgttagacaataaccattgccaagccaggtctcaggtttttaattatggattaaaatgcccacaggagctctgctcatatgttaatttcgctgtttgactttaaaggattttttgtttgtttgattttgttgtattttgtaatttggattataaaaggcagtcagccattcaatgtggagacagtttaccacataaacttgctttggaggcaagcagggtaggaaaaggtagctgaagcctttttacgtttccaacgtgagaagggaaacagcctgccttccccggtgctctccctgaggtatatgttaatagacagagccttgacacttgttttcatgagacccctgaagccctggaatggttctgagtcccagctactgtcagctctctgtaccctgcatgatagctcttggtgtctacgtcacagattgtctgcaactgcattttccttccaggcagtttcccctaaggcacattttactacaaatgtatcctgtgctgctgctgtgctgaggtgcttcagagcactcccgtggaattttaattttaaagtaccaaaagatttaaagctacatataacagagcgagaggtattttggcttgtccttagctaggctctcttacatatatgatttgtcccatatatgattagtttcctctgatgccccatcagagacatgtagaagccaggatgtattcactaagaagagatttccttttgcttaaaagatgttattgggttattggcaaaatctgaaggtcaataggtcatctttgtctatcagtgctaagtttttccttccttcagcagtgcgttttgggaaatttaattgtattgcagaagttggaagggttttgaggtaacactctagcagttatgggtccattaccaatgcatgcaactctgtttacagaacaacctgatttattttgtagccaaataggagcaacttgcaagtgagcccagaaaaaacagtatgccccctgagggtggtggtgggtgggtggggcacagctcaggcttaacacccagagatttggggtgagagacatatgtgacttctctgtcatcataacttatccaaaattatgtcccaattgattcttgttgttgacttgagcagggtcccttggagccacactggcccttctgagggtggccttgagcttttggattgctgcagttactgctatgctctgtcacacacatctcaaaatggattttacttgtattagaatattgtcaagattctagagaaccatcctcaaattgaaggactcttctagccagagcagcagctgacgagggatgagggttttattatgctcttatcagcaggatacctctgttaactaacctgatgctgtggacgaggcagacttggtcctgaagggggatgtatggttcatcagaagtcatttcacatttacctagaaagaatttcacttgcctactagacccatctgtataaaacgacacagtgtactttgaccagggcagaaattctatggaggtagggcacaggaagaccttcatctcctcttttgggttaccagaccctattataagataaaaggttttaaaagtaaaattcacagatccggagagggcttagtggttaagtgtttggtgtacgatcatgaggactggggtttggatcccggtacccacaaaacaagctaggcatcctgtgcaagcctgtaacttcaatttgagagaggcagaaacagaacaattgttggggctttacacttccagcctagccaacaaaatccctcatcgccaaggttcagagagagaccctgtcttaaaggaataggcagagcattaggaggaagacatctgatgccctgttctgacctctgcacacttgaacaaatgtgcatgctcctgtgtgtgtgtgtgtgtgtgtgtgtgtgtgtgtgtgtgtgtgtgtgtgtgtgtgtgtatcttaaaaagtacacctgcagtactggtatacaactttaatcccagcactaagaggcagaggcaggtagatctctgtgagtttgaggccagcctggtctccaggactgccagggctacacaacgaaaccctgtctcaaaaaccaagcaaaccaaacacacacacatgcacgaagtgtgtgtgtgtgtgtgtgtatgtatatcttacttaaggttactgttgttgtgatgaagtatcatgaccaaaagcaagttagggaggggaaggtgtcttgggcttatattttcatatcatagtccatcattgaaggaaatcagtataggaactcagacaggcccagaacctggaggcaggagctaatgcataggccatggagaaataccacttactggcttgccctctctaacttgctcaccctgccttcttatagaacccagaaaccccagcccaggaatggcaccacccacagtgggttgggccctggcccatcaatcagtaattaagaaaactccccacagctggatctttttttttttttttaaagatttatttatttatttatttattacatgtaagtacactgtagttgtcttcagacacaccacaagagggcgtcagatctcattacagatggttgtgagccaccatgtggttgctgggatttgaactctggaccttcggaagagcagtcgggtgctcttaccactgagccatctcaccagcccccacagctggatcttatggaggcattttcttaatcaaagtcctcccctctcagattttagcttatgtcagattgatataaaactatccagcacaacttgtatgcatgcactttttaaaaaataaaaattataacttactgtctcttgtgagactatgccggggcctagcaaacacagaagtggttgctcacagtcagctaatggatggatcacagggctcccaatggaggagctagagaaagtacccaaggagctaaagggacctgcaaccctataggtggaacaacattatgaactaaccagtaccccggagctcttgactctagctgcatatgtatcaaaagatggcctagtcggccatcactggaaagagaggcccattggacatgcaaactttatatgccccagtacaggggaatgccagggccaaaaagggggagtgggtgggtaggggagtgggggtgggtggctatgggggacttttgggatagcattggaaatgtaaatgagctaaatacctaataaaaatggaaaaaaaattataacttacatgcctgagagagatgactttttccccatgatctatcagttacatcttttagagaaagttctttgtggataggcagtgtatgttttctttcttggtgtgtcttgtgggtagtgctttagtcaattttgtgcttctaaaacatagactggataagacgatgagcttgtggctccaaaagccggacagtacaagatcaaggggccccatcttgtaagggctgtcatactactcttaatacagcatgggggaggagagaaaaggcaggggagaaagagaataagaggtgggggtgagagcacacaagagaaagaggatgtgtgacttttcctaggagatgtaataatatgtttgccccaagatgagtaacccccaacagaccgtttccatcttggtaaccacaaggttgttggggctccctgtaggatccacaccacagggaattccctccagtcagttactccctccgatgtcgtggttattagaatctcaggaagatgggcatctcagggttttcttccttcctctgtgacagagtgttaatatgccagatatcctcaatgtctcttttgggttattgtagctgctgtgcttcaacccagaggaacaactgcgtgcatcagggcagagcctctcctcatgacctagtcacctcttaaaggtcccacctctcaactcttgtattgggaattaacatttataagacatggtatttcgggaacaatgttcaaacataaggaatgaatcactggtaggactaagaagcaagtgaaacagtgtaacaagatgttgctcttgagtccagccctttgtggaaatgtttcatttgaaagggtgttcagtaacaagggacaatagccttctaggctagtctggaaagagggtagtcacaatgatagagaaggaaaagggaaattgaagaaatatgatcagttttgaggagagaagggtaacttcttttttttgtttgttttgttttgttttgttttcgagacagggtttcttgtgtccctgactgtcctggaactcactttgtagaccaggctggcctcaaactcagaaatcaggcctgcctctgcctcccaagtgctgggattaaaggcgtgcaccaccactgcccagcatgagaagagtaacttcttgtagttgaggtatgggaaatcatagaaaatactaagttactgaaaggaactttatgcctagatcaggccttataatgagaaggagaaaaggagaaaaaccagtaacctggttggccacaaaactaagaaacatccccatccatcacctgcccttggcttggtgtcgcaggagggagggcaaggagactgcaggagctgcggctgcagccttccctaactgtgtcccttggaatcggacaaccccagcatgctgcaggcattctatgagaaaagcatcttgtgatcagaaaacttttcaactgtgcttttcaatgtttcttctgtgtaagccattaatttggtgtttgcttaactctgtagtcatcttttcagaacttgacctcatagctcaagggacaatagaattccctgtagcatcctctctaaaaagagtggtatttcttcctagtttgatacatggatatggaaatggattttgacacttcccaaatgttattatggcttctaacatgttgctaattaataagccctcttgttctatactgaattgcccactgtaacacagactcatggaccaatccaagtagatggggcctaagtagatatccatcagtctccccctgcagccctcctctccatttaaaaggctcaggctactgcttattccaaacttgcacagagtcctggcttcttttccaacgtaaagaataaaaatgttttcattctttatcttcagttatgtttctttctctaaactaccaatctattatacagggcataaagcttcactgtccactgaaataggagttaacagtgttctattccatgatagaaaagtggtcatatgtgcatgtgattaactttagttcttttcatttgtttggctttagagacagagtctcacagagtagcttttacactcttcctgcgttagcctcctgggtgcagtagttacaagtgtccaggatcatactgttatttgtttctctcatatgtatcattaaataagatatttggggaccagcaagatggcttagccagtagcgctgcccgcctctgagcttgatgacctgtgttgaatccctgagacccaggtgatggaaggagaggactgactctttcagactgtctctggcatctacatgaatagcaccgtgtgtgtgagccttcacacacacacatacatacatacacatgtgcagacacacatacatacacatgtgcagacacacacacatacacatgtgcagacacacacacacatacacatgtgcagacacacacacatacacatgtgcagacacacacacacatacacatgtacagacacacacatatgtgcaggacacatacacacgtacatacacatgtgcagacacacacacacatacacatgtgcagacacacacacatgtgcagacacatacacacgtacatacacatnnnnnnnnnnnnnnnnnnnnacatacacatgtgcagacacacatacatacacatgtgcagacacacacacatacacatgtgcagacacacacacacatacacatgtgcagacacacacacatacacatgtgcagacacacacacacacatacacatgtgcagacacacacatacatacacatgtgcagacacacgtacacatgtgcagacacacacatacacatgtgcagacacacacacacatacacatgtgcagacacacatacatacacatgtacagacacacacacatgtgcagacacatacacacgtacatacacatgtgcagacacacacacacatgcacatgtgcagacacacacacatgtgcagacacatacacacgtacatacacatatgcagacacacaaagtaggtcagatgaaatgcagaacggttgccctgtcccttctggaggcagactttgtctgttggctgtgttaatgtttgcctgtcctgttgtccttcctttccttccaaagtgcttcccttccagagtctgcctgtccgcagaaattcccaaaatgggaatttaaataaataaacaagcaaacaaagaaacaaataaattggctttggcttttaacttctgtgatgtcactggtccagtgtgaacactgctgttcacacacagaattgtggtagtggtgagtgtatagttaattgtttagaattcagtgtatttttaaactctgcttaatggtttcctttatatatttgtcatgcctaaagagtttctcaactatgcctgttatagttttatcatgtcagcattaagtacagattgtgttcatatttgagaaatctcataatttatagggctgaagaggatagcatttcttatttgaggtcttcaggtggtattagagacgagagaagagagaacatgaaagtgggagctagctgtatctagggtctgcctcagaagactagatagttgtagacgacagatgaacagttagatagtcatagacgacagatgaacagtagtgcacacatgcagggcagtgctgccacccctgcccgtgcatcagtggcttccctcctcctgctggaccagggccaagcagactgtcagtgcaggcttgccttttccttggtggcagtttcagtgaaaaattggtttgctgcaggatactagccgttacttcagggaattccagggagatccccaaacatgtcacaggatatttgctctacagacccagcatgtgtaaatgaaattccatgttgggcatgtcaggcagaacagaagacactaggaaatgtcacagcaggtgctgcaaacccaggaaaagtaatcatagtccagtcagaatgttactaaacagcagaactgcccattctctcatgcttagtcatggagaagtgaacccctgacttcatgaggtgactctacctctcagtcactctaggttcttgtcattcatggcaaatgacccttttcaaaatgatagccagcaaggaaggtgaaaagttagaacagtgaacaaatgcggtttggggtggcgccaccagtgacttcagtgatgctaacctgagcatccatgagctggcatctctgtttcttgtgttgtgcagttctttctgcctagactagggagatgctttcttctgtgtagtgttgacttagtgcaaagcttccacttaactgggacagagtgaaggaaaacagcaactacagcaaaaaacaaaggaaccagccaaatctcactagagaataaagagactaaatctctccggtaagactggaacacagttgctaagttaatacacaagtgaagcctttaggtctccacagacatattacaagtggacatagtacaattcagagcaccagcaagaatagggtacccaccacgcctgaacacccaacaggggtggcagcactgccctgcatgtgtgcactactgttcatctgtcgtctatgactatctagtcttctgaggcagaccctagatacagctagcaccagggtcagtgctgagacacagcagagtagttttagccaaatccttttgggccttacttggaacagattttgtctagaccgatcatattcatgtgctatgtagacttggtttagtccacagaagtttaaaaaatagtctgattttcaggggcttagaattttttttttaaatagaagcagtggtggcacacatctataatcccagtacttgggaggctgaggcaggtggatctttgaatctgaggccagccaggtctacagagagagttccaggacagccaggactatacagagaccctgtctagagaaacaaacaaattagattagattttcagaaacagtatagtgagcaagcataagggccacttgcttagttttgttttgttttaagagcaaatctgggtactttatgaatctagaagagagagaaattaatctgttagggaaacattgtgtgagagatggtgtctggctcttcaggaatagatagggtttaactcctgggtatttacccccaacccccaaccaagttcacgtgatacacagagacactcgcacatccatgtgggtgacagtagctcagctgtggcatcagcctgggtgttcagcagcagagacctgggtaaggatgtgtggtatgtatgcacaatggaacttttccatctgaaaagaaccgagttatagtgtttgcaggaaaattgtgcaattaggaataatcatattaagtgtctcagaagaacaactatcatatgctttctatcttttggttcctagaattgtatacaaagtcatatatacaccattaaaatagaaataaaattttctaggggaacaaagggacttatagatgtccgcatacaatatacactgaaatggaaaacctaaagcataaattgtgtggggcagtcaacaagatgactcagtgggtaaaggtgtctgctccttatccatggtcctcggaacacacatgaaggctggagagagcctactcctgtaggttgtcttctgtctcttatatgcatgctgtgacattttctcacacacaagaacacacagtaaatgtttttaaaaatacattttaaaagcttgatgtggtgacacatacctttaatatcatcagccttgggaagcagaaacaggtagattctgtgagttctatggaacagccagggttatgtagaaagaccctgtctcaaaaaaaaaacaaaattaattgtaaggagaaaaaaaaaaaaaagaggggacacttggagaaatggcttagaaatgaaaaatacttgctacccaggcttggttgccagtagctgtgtcactcacaattatctgtaacttttgtttcagggtatccgatgccctggtacccctgtgggtaccaggcatacactcacatatgcaaaataaaaataaataaatcttaaaacaaacaagaataggtaggttaggtttagataggagaggtatttggtagtagataaggaatacttgaagcaagggtacaggcagagacatgcagttcatattctaggtataacaataattcaaagcgcttgaagacgtggccattttggtagatgaagtacagttgttgagggctttaaatgtcttacccttgagtttggcattatttctgttactaaggagatgccagggaatcttaagcagagaaatggcatgggaagatctcttctttaaggactttgtgccagcaaaacatctttctgcctttcatggagagctgtctgttaggaaagatatggaaaccgtgtcagtgtaaaacctgaattgtggagtggatcagaagtacaaggcactgccaggactgtcagaagtatctgtgtgagggatgaggagataaacatgcctcacactggagcattgttgagatggggaattgtatgaagttctgagcaggccggattggaggtgtcagtgttatatgtggtaggaatgtgaggctagtgtgcaggagcgaccagggctggaggtgcaaactttgttgggtctgtgaagctcttggccatgtgctgccctttctgtagttcctcttctgtgagacaggcacttctaaagtggagcacctcagtttgaaaacaccaaatctggaacattccaaaacctgaaacttgaggagcagtgtgccacatagaggattttagattttaggttttttagattagagctattcatcaagtaaattctatgcacatattccaaaatgccaaaactctgacatatgaaatatctctggaaccaaacattttagataaggatgctcaacttgtatctccatataagaagtgggtaggggctggagagatggctcagcagttaagggtacttactactcttacagacaacgcaggcttgatttccagcacccacatgacagctcacaactgtctgaaattccacttctgatgccctcttctggcttctgaagatggtttatgatacacatacattcagacaaaatctcatgcatataaaataaaaattaaatacaaagaagtgagtaaattgaataaagttaaataactgtctgccccatgcatcctgtgacgagaactagaatcttatccaagttatgtcatctgccatagtctatgatgagaataactctagagttgaaatgtaatgtagttacctgggagtgagtagataaagtggggcacgggagaaggtgagggcagaaacttgaaaagcatccggtttgaagagttccaagagaaatggaccaatgaactctaagagtggaaggaagggaagagggaggagcctctggttggggatcaagggttctttccagcagtggtaagtggctcaggagtgggactgtccagtcaaaaggaaggaatgtgagggcacacggtagtttaccccaggtcccacctggacaggagcagggagactgtgaggacatgatggagtgagagaccttgagtgggcactttgtttcagctttttgtacatagtgttctgaaattattatacctaatttacaagaccctcttcttcctttttgttttggtattttgcatgcacaattttaaagttaaaataaagcaaggcaagatttgaggtactgctttgtagttagtaaataaacactgctccagagctagtggtatagcttgctaattggagcacttgctcacagtgtcaaaggcccgggctctatatccagtacaagaactaaaaccattccaaagctatccccacctctattctgatttgagaatagacctcatgaattcagaaaggagaggctttgattggtaccaagtgagaactgtcttgaaatcctgaaatcctggagcctgaagatatgttagaaactgccattcttatttccacagttgagctgtggaagtcttataaacgccctaccactcagcaggctgagacctgaagaagttaattagaagagttcattcttgccctccagagcccacactccagagggaagaaggaagctccagttctggggatgtctaggaataatgaagtatagctcagggctttcttgggagattctagagagaatgagaacatttttacccagaggaactatgagctgggttgtgagctgggttgtccatgttagagagtcacagcactcagtctcactgctttcattgctctgtgccccagcaattctgcctcagcatatctaaccctaacccactccagtggggatgccagagtggacaaaagaggggaaagaaagccacgggctatggctttgcatgctgaatcatgaaaaccgtctatttctgaagctaagaagagtcttcagagtgttgggttgtgattattgttgagttgtagtgctgtgagttatcagcagatgagacccccccccccaggtcctccagatgtattcataccaacattcccaatggtgtaaagcagtgtgggcattcaagtaggaaacaaaggtttgtgtcctggttctgccgtttacccaagtcactaatctatgtgagcttcactttactcttctgcaaagtaaacctctccaggatttttacaaggcagaggcaatgtaatgtaccaaagaaatgctctgtacactgtaatgtcagctgtatttatagaatgctgacatttgaaaaatagttgtatgtcttagactaatgctacacctgttcccaggtgacttaatcattgaattattaaacttccattattaattcttagaaatactcaagaggctttatgagtatgagatagagagctttagtttttctgtttgaaagatcatttcttcagttaactctcaaactaggatattccttccttcattcattccttcttcccttcctccctcccttctctctctctctctctctctctctctctctctctctctctctctctctctcctttcctttcctttcctttcctttcttccttccatctttcttttttttttttgagacatggtctcactgtgtagccctggctatcctagaactcactgtgtagaccagcaggctgacctcaaactcactgtgctgagattaaaagcatgtgccattatgcttggccagccctttccttttggggttatattgctcagtgactctatagtttcttagatttctcaaaagtttttgattctgggctagaaacaagaataatctttgtttagaggcttgataaattaggatatttaattaataatttaaaaaatggcataaagtaactgataacatgtctacttcttaaaaattaatttttaatttattctttgagaacttcatacaagtatgcaatattatgatcggaaccctcccttctcccctgccaactccctctaaattctgactcatccctccctcacttcatgtcctctttcttcatgttcattcatcccacttagagttgtccgtgtgcatgtgggcatagggtgacccatagggccaccggcatcttaggagaggctacatccctgaagaaaatggactcttcctcacaacagccaacagttaacaagagctttcagctgtggttagggtggtatgagcccctcccccattcgtgctggactgttgactagcttgaccttgggtaggtatcagcagttgctatgcctttaggagtgcaacagccatgacaggccaagggtagcattccacagcgctccttccatcatccaggggttacattcactccctcttctgcaatgctccctgagtctagcatgcacaagtacgtattctcagcacttagaccagttgaatctctgtgttaaccactgctcactgcaatacgtttttttctgacaaaaggtagtacagggcagatctatgaaaataaacaaatatttagaaaacagtttgacaatatgatcatttagcaaaataacaatagtaggttactacctcaggcctgcgaccttcccggcatgggcttttgatgaggattatggtattaggcatgaaatccctcttgtggagcaggcctcaaattgaaaagtaattggttacccccaacaggatgacactgttgcacttaagaacacatcttgtctgacagtttagtattgtctcatgcggggtccagtactgggtaagaccattggtgaccttttggccactagttgcctacatagcaccttctggcactgtgaaagctagccagcaggaagtaagtttcctagtcactttgggatagagtcctctgtcgtgcagccaaaatgtatgacgttttcagtgatagggtcttactatcccattatggtaggcacagaggggagggggcaggagaggctgggagacacagaagggcaagggttaactaaaatgcagagtgtgtgaaaagttcacatggaaactaccatcttacaacccagttaacagtaattgacaggaggagatggtaggatgcatgtgtaacaaaagaagagaataatgttcagggttaaagatttaagtgagagtgtagagggagggagggagggagggaggaaaggagggcaaagagtgggaagagaatgtggaagatagccaaaaccaagaatacatggaaactcactagtttgtaaaggaattttaaaatataatttttttgttgtgctttattgtttgagacagggtttctctgtgtaaccctggctatcctggaactcactctgtagatcagcctgcctttgtctcccaagtgctgggattaaagctatgcaccaccaactaactgtcaggctcaaaacgtaaatttttaagtggaggaagtttggacagtggtaacttgcagaggttgcagtgctacttcagaaggtgtgggttattaaatgagctgccactctctgtgctgggtgtgggcctccgacaagttactggtcaaggagatggtaaaagtcggcaaacagcaaagtctgctgccattgttcttggttttctttctctctactgtttagggaaatgttatctaggccagaaaaaaatgcagtatagtatcaaatgacccccactcttagagtgtgtgcattctagggtaaaggataaatagtgcacataagcacttaactaacagaatctgtgttgcagggctgcagggttgggttggttggggcacaggaacatggcccctggaaccagatctcctggtcagaactgtacctctttgctgggtgctacttttggtgccctggaaagttccccttctgggctttagcttcttcatttgcaaactaataatatctgtctctttgggttgcttagaatattcaattatgtaatacacattgaatttagaatggtgtttgctattataccataataactagagctgctgttattgtcacatatttagatgttattgtatggttcagacacgggatgtaataaagtctcacacagcattggctgttagtcaagaaaaactttggagagaattggaacttaccagagccctcagaggtaggtggacaaatagtgttgggagaaagacctgtactctaagatgagcatcaaaaacagaagcttaaatgtgggaatcagtgtgttttttaaagagtggggaaggagtttgagggatctcagttggcacagtacttgcttggcatccttgaattctgggtttaatccatgtgtggtggtgcattggtataatcccagcactgaggaggtaaaagcaggagaatcagaagttcatggtcatctttgctacttagcaacgttgaggcttgtctggaatacatgagactatgtctcaaaataaataccaccccactggtctgattgtaggttctgattatgttggtgggatgactgttgggcagatcagtcatgaaatgaaagtaggtaagtataacaagtttattaagctaaaaatagcattttactctcacaaatttgcttgtgtctaacaaaaattactttaatcaatggatttacttatgtgggtatagaaacataattttccccactttttcaaataaatgaactatgcaggctagtttcatgtcaacttgacacaaggtagagtcatcagagaggagggaaaatgcctacataagatcaggctatatataagcctacagggcattttattaattagtgatggatgggggatagtgggtggtgtgacccctgggctggtcctgggttctataaggaagcaggccgagcaagccataaggaacaagccagtaagcagttctcttccatggcttctgctcggctcctgtctctaagtccctgtcctgacttcctttgatgctgagctgaataaactctttgattcccaagttccttcaggcctggtattttatcacagcagtagaaagcccaactaagacataaactcggaggtgtgccttgtctaggagcactagcatcagatttactttagtagtatcacacatggctcatctgtgggatcagaggacaacatttgggaaatagggttttttttccttccactatgggacctggagactaaacttaggttgtgaggtacgactttaccttcttgcccttttgtctgcacacactgttcttttgaactctgatcttagtcctatcccgactgtatcttgctttttctcttcctttttactacacaggtagactggatagtcagctcggccaccaaaaaaaaaaaaaaaaaaaaaaagtttccattcttctaccattgaccagtggagtagctgttaggattggcattctctagtgaaacagttctgggtcaagatgtgtgatatatgccatgcattttctgactcctctgagaaaacaagaagagaatttttatgaagtttagctaatctcagaactcagtctatacatggtccatagtagcctgagtagatctacaatggaaaactttgatctctttaataacacccatacataggaaaatttcagttgaagatcccataaatattgcaacttttattagattgccatctgaccattctatgttatttgggggggggggggcagagagagaaaatgaatgaatgagaatgggaaaacactaaaacatttaaagttaaccttcccagaaagataaccgggactggtgttcactggtagagtactcaattcctcagctgcatatgaaaatggtaaaaccagaatggagtggaatgggctctggttaacttctgcatgccgttctgtgttagtttctacctgccagtcagtgaataggaaaacaatgaacaggtcttactcaaagctcctcttcttacctcaggcatggtaagcccaagaaatacaaagagaaaaagtaaaagccaatatgctattagaacaatacgtaagtaatataagagagattattgtgatagatccctgtacattcttagcaaaatggcagagcctgttatccccagacttgaaaatgataacagtaactcctatccattgaaatgttaaagaatgtgcacattgttatgttatataaaggggacacatctttctcatccaatttcaccttaaatcaatataactgattaatacaataaaaaaatatagtggatctgatattcatgttagcagcttattcttatatgaataaaatttaaagtaaaattctgataaaaaaatgtatcttctctaaagagttaccagttgctggtaccaggcctgtgtgcttgggcttcttaaattccaggtgacctttcctctcttaaaaccccactactactttgtgtattgttggacacataggatgtatgcactgggctagtttggtagatgcaacactcaaatcatgttggaagtaagtaaagttagtatgggctgcaaaggtggctcagcttcgttcttgcagaagactgaagttgctagcacccatgctgggtggctcacactggtgttaagtcctgaggagctgatgcatctggcctaagaggcaccagcattcatgtgtttatacccaaacacaaatacatacacttcattaaaaaaaagtaaaattctaaaaaagaaaggaaaggaaggaaggaaggaagggagggaggaaggaaagagatgctatcattttggttagttactatttttttttaaattaactacctttaggataacaactgcaaatatctggcatagacaattgcttttgttattggcatcgtaacactttaattgacgctcgttttgatttttgcaatatttcatactcttccaatgtacatattgttggtatgtattgatttttgctttgtgcacttgaagaacaggatataatgctgttcccttctgaatggaaactgctagtttgtttggttttttaaactcaccctttttaatgtaggaacgtttgtcacattagtgtagttctctgattagtaccaggaagtagttgaaatgggatgtctggccacaggaagagctggagtaggttcagctgaaatctcactgcacccgctagatggcgttaactcattaagtgaaagcttcctcctgccgctctggcagacttaatatagctgatctgagagttaagtggcgagttctgttgagtggttgtgcctttcacagaagtgttatttattcaacgtaaaatacttaaataaacttcagtattttgtcaggtgcacattaaggctggctctcccttaggctttccctgttgtacatcctatataaacttactgggggtttttcctagtttattgaaatatcataattatttcttggttttctgggagtgttggggaacaaatgaaactgagaagcaggctgaaagcaagtagattatatcagaattaattttaagtaatttagtttttattcataaccactagatcaacaagaaagtaaaacaaacattccagttctctgtcctcctcagagacagttcgcagtggtagactaaaggtggtcggtcatcttcagagatgtttcatgagggaaactcattttcagtttgaagttttccttttctatagttgtctgtagggtctaaatatctgagccatttttgtgttttcttgctgtttttataagttctaaagttgcactttttaatgattattttttatttttcagattataattagtcatttctccttcccttacctccgtcaaaccactcccttgaatttcctttccctctgtcaaattcatggcctttttctatataataaaaagctgagaagaatcagcttttgccgtaagaatcaaaataacgagctttataagtgtaatagaaaggtctgtgttttgttttttttttgggtggttttttttttttttttccttcgagacagggtttctctgtgtagccctggctatcctggaactcgctttgtagaccaggctggcctcaaactcagaaatctgcctgcttctgcctcctgagtgctgggattaaaggcgtgtgccaccatacccggcaggtctgtgttcctgttaatcaaatcagagtcttcaatgaggggtttgcttttatcataaccttggatgagaaaaccaaatgttgtctcttttcaaccagaagtttaatacataagaggaatattgtgactgatgcagattggtctggtcacacctatgggtctctgtggcatgttctaaaatgtaactagctagggggtggggaaggtactgggtgatggtgaagatgataaaaatgtgttacatatgtgtgaagttctcaaggaattaataaaatagcatactggaaattgagctgaataatctcatttcggaagcttgccctagagagctgggcttgtgaggaacagggtcgtgggtgttcagcactctagatcaccccgtgtgctcgcttgcctgttttgctttggttttggttttatagacactaagtggaagcaagagtgtgaataaattgtgagtgactgtgggcatatgtttatagtgaattagagaaggaggggagattgtcttttcagaaggtattaactgctttccaagcagatcttagaggatgtgtgccttagtctgaagaaacagttaagcagagaaagctacccagtcttggtagaatctagtatgacactgttgcaaaatgtaaaactataaccaagtacttattcctttaaaaaaaaagttttatgtagctcaggtctgccttcataggatatgtatctaaaattaaccttgaaatttgatcctcctgcctctacttctgagtgctgggatcacggtgtatgcccagttgatgggggtctgcagaatgaacccaggctttcatgtatggtaggcaagcactttgttaactgagctacattcacaaatcccaaagtatgtttgtgctacgcaatctaacataaaggagaatgagttcttgttggataagaggtcaaatgaacacagttctttaaaagccattaaggaaaatcacatattatattctcttataatttctaatcatattgtttaagaaataccaacactcaggtggccaggtggctcagccagtagtgttctcgacaccaaacttgatgacctgagtttaatcccaggactcgcacggtaaggagaaaatcaagtcttccaagttgtcctctgcccactagtcacacactttgttccatttccatgtgtgtgcttgtactcacacgagtgcacacatgcacacactcataataattttttaaaagaaataacatactttaaggaacataatcttagaacaatggcttccttctgtttctgccccttctcacaagtctcatttcttacccattaaaagtaagatgttttcctttggtaataagcacagatctgtttctgggtccaagatacaacagagtgattcaccttattatgtagaagcaccatctatgatgtcagatcatttcttagaaaactgttgtagtcaagtgtggtggtgtacacctgtaatcctaatactcgggaggctaaggcaagacgagcgtgagttcgaggccagcctagtctgcttagccaggccctgttgttcataaataaatgaatagagagaactttgactataaagttattcagtgtggtttagtttttatgaaagaataaacactaataatccttttagctgtatatgtacctggattaaaaagaatctactgccagtgagtgatgcttcaccctttaatcccagtactcagaaggcagaggcaggcgaatccctgagctcaggtgaccgtggtctacagagtgagttctggaacaggcagaactacacagaaaaaccctgtctcaaacaaacaaatgaacgaacaaaacaaaagccaaaaaaggccacaaaaaacaaatttattaaaacataaaaattgcatatgtgccacatgtgttgtttagtacacctgtactttgtagaatattcaaatcagggcatcatagctgctgcctgaaggaaacatttttaatttctttatgttgagaataaaatccttttctaccttttgtgacattgtatagttagtttcttaacaatgcctagccttggcatctgatgcttctccaatgataatttagtatacttgttcaaacttgaccatatcccagataacctcccagactctcaattttttcttttacatcaaccagagcaagagaaggggggaaaatatttattcattggtatatctttaattttttactttatgactccactaataaaaagcaaaaaacaactgtaatttgaagcaaagattctgaaattaccacttttctaaaaatacaacttaaggctgaaacctaatatatcgaaacatttttgttctggaaatggtacatgttttcataaagatgtatttctaaatggctcagaaatagggaacctttccaaaacatgctgtagttgcctgggtgaagaatattaggttgcaacatgcaaaaaggaaatcctggtgtaggaaacagttgataaagaacacgtgtctgcagcacctgacgaagcctttggcgtcctccggtgcccgcgtgtaggattttgctagtctctctcaagtgaagtaccctctgctctgtggctgctgggaggctcagccctccattttactgctgttgtacataatctgtcgttcttattgctaatctcctctaagtcctgcttgttattccggtgagactcccagcctttcttcactctgcccttcgtgagagcagtattgtaatgggtcacaggccagccagcagacagtgtctgacaagacaaagtctggtatttttaaactgtccgtttattttttttttattgccactattctatggatattgaatatctcaacttcttaattttataagaggttttcttttagaagctatgggagtgtgggctgtcatcctacttttattgaagttttattgaaacttagactaaagtgaggcctggtggcaactgcattcacaaaaggtgatgtgaaagaagggaatcctgtttggctcaaaaaaaaaaaaaatatattgtcccccatagtccaagctatttcctgtgagtattacatagaactttcttagttctctgattaaacaaaacccttcagatacaggtttttctttaaaaataacaaatacccttgctttacaaaatgttatgttgaggaaattattctagtcctgctttataatctcacaatatttctaaacagactcatgccatttggaaagaagtcatagaaacaaactgagcaaaacaagttcagatgcctttgaagtcagagtcatagccttagttaaatgtttcagcagcagacacgtctgcgtgtaattacttagcctgtatattaagtttaaaacaataatactatcctgcgtgtaattacttagcctgtatattaagtattaaaacaataatactatcgatctacttaatatttaaaacacagggtactttgttttgaggactatattttcaatttcaaattgcaaatttggcttttgcaaagagacttgagtaagtatacaaaccaggagctctggggtttgtgtatgtatgtgtatgtacatgtgtgtatgtacatgtgtataccccctgtgctgaatctgtttgcaggttgtacacttgataaattccctggtgattctgtaaggttatgcaacctgcccaccttgccccagtggtaaactctgtcctgtaaatacattcttattaactttgactacaaaacatttcccacctcaaatgttttgatgaggttacatgttttttgtttgtttgtttttcaaaatgatacttttaaaaagccaaaagtgttcactgggggtaactctcaaatcacaattaataaatacaaagtgataaattactgatagggaatagtaataagtaaatttcacaaaatgtaaatgtaggctacaaattaatttctttttgcagcactggcatcttgtaattattttgagctgtgaaggccaaatccaatcgtgagtatggagcaaaggacaaatcactcagaggaggtttactcagtgtttaaccagccaggttgcagtgactcaaatcactaatgaaattcctgttatttgggagggattaaaacaacaacaacaacaacaacaaccaacaaacaggaaagcattaagtgaggtagtaattttccagtcgtcagtagtcagatgttaatgaaagcatttactcatgtaaactggagttttatttttatatattagttttgctgtcttatttgtttgtactaaaaatagttactctttatattttcttgtgagatccttcagaaccacttctagaaatggcatcatttgccataagtattttgttttctctccatctagtttttatgaagtagtgctaactctgccttaatttgatttggcattcctgcaattgaacatttgtaagtatcttgtattatggcccatctgggttgtcatagaaaccaaagacctccatcctcttccctctagttaaaaatggaatgcaaacagggcttcaaagtgacgttcttctagtacgagtgacagccctgtgaagtgcagaacagcaaggttgcttgttggttttattttcccatggcctatccttcctgttaattctgatacacgcagctttcctcttgagaaatctgtgagatactaatagaattttaaaaatataagcaccagaaagaggaaagaatgtagttaattcctttcctactctgctaaagaagtgcaaaattagcagtgttttgtcctccctgggttactgtctggtctgttgacaccacagtcagcggtgcatgtcacagaagcacgagcagttgctacagttttcagtttccattattgtcccattatctatttctgtggttatatcaatgtggttttgtctcattagagcctacagccttgtgggttaagtatacaccaataatttattagcatagaaatttattaatatgccaatacagtgtcttgtcattggacctagtgagaaaacatttttatatccacctgagacaagattttgttccataaccgaggctggcctacagctccgtgcttcttcctgtggttataggtgtgtcccacattgcctggagccttatagaatgtcttatggcctcgttctactaggcagggtccttgactgcgctcttaatgcttttcgacctcattccctttagcttctctaccagaaccaagtgtagctctaatttttctccttaaatgcctgatatgcttctaaagcaactgtgataagtaactccaatgcaaaatatatgtttattgttggtatttgttgagttattgatgtggcattattcaatttaaagtgttgaattctcattttctttttttaaaactttgctgtttttcaagacagggttttgctatgtagtcctggctttcccagaactcactctgtagaccagagatccacctacctctgcctcctgagtgctggcaccagtgccaccaccgcaggccttaaattttcatcttgacatagtttggatgataggaagcagcacaaatctgtaatgtgaagtcagcgatggagaactgaggactaagtgtgtactccaagagaaatgctcacaaggatgaatttgagttgtcattctcatggtggagcatgggaagcttggggtcaattccaatctcttctgtttttgaaaaggacattataaagcctcaaatagcatctgtagtcccacatctcagctgatagccagtagtcattttcagcagtaactcaggaagtattaggactattaccccatgttagtgagagacctgtgaatctctgtgggtgtgaggaagagtatgattcagttgctctcatcactatagattagagaacacactttctaaacaactctgtattccttgctgtgtactgtagaggtgaattcttcataccaaaaccattgctgccatatttacagttcacttatttactggtgcttttagttctgttttgtttgcaagtttgaggcaactgtgagagggttaaggagctcaactttgtatccagtttaaaaattagactttctcttagatcattgttgccatttatccatgcctgtttaatcagaccagagatgttagttgttcagcaaatgtcacattgccagcagctttgtggaggccagtgactccctgagcacatggtggggcaggttttcctcagagcacactgtagggcaggctttcttctgagcactctgtgtaggacaggctttcctgttcacactgcattgatcattcctggggagaaaggcaaagcgcacacaacactgagacctgagaggcttgagaagaataatgggatggacgtctcactctgacgtgtagaaatctctggaaggcatcaatcttcacaaacctgtgctctatcattgccaaataagggaaatgtggtcctttcaaatttgtattttaggagtttttctgtacactattgagacagtcccctctgactgccaaccagcaattccttctaaactatattttagtccactatgggtagatttttggattgtccttctcatataagctacattttcgtaaggaacagagcctggggaacatcttctgtcccttgtgggtagatgtataagtcactgatccatggggagactatgcttacccactagcaggagaccttaccttttcccaaagtagtaattttcagttattgtcgactacctgtatttaatgtttttgtcaagaacaaatttctttggctttagtattgcttaaaatatagactcccacatgtttgaccttgtcttttatttgagaccctactttctctatttccttctctgcatacatatagtattccaacagtttttctgttaacattataaggaatatagtagtcttgctatgtgaatatctgtgtcccctgaaacagtcttcttttttatatgtttatttttttattaggtattttcctcatttacatttccaatgctccccaaaaagtccccccataccctcccccccactcccctacccacccactcccactttttggccctggcattcccctgtactggggaatataaagtttgcaagtccaatgggcctctctttccagtgatggccgactaggccatcttctgatacatatgcagctagagacatgagcttaggggtactggttagttcataatgttgttccacctatacggttgcagatccctttagctccttgggtactttctctagctcctccattgggagccctgtgatccatccattagctgactgtgagcatccacttctgtgtttgctaggcccctgaaacagtcttcttaaagaacaggcatatgcacttcttttcacattgatgccaggagggatatttactgaatatccctaccccatatccttggtctgcccataactctattcatagctctaacatcgttcaagattaaggtgagagggtgattagtaaaatacatgcaggacagcaagcaaattaatagttgtggatgattcacaagacgttctaagaaccttttctaaattgcattaaatgtgtgggtgaacatcacagatagaaactcacagaagactgtatggtttgtattgtggttcatcctcttgtcttctgggatttagcaatcttttcagcctctctcctcatgtgcatgtatatcactgggtaacaggctgattgctgctgatggtactaaaatgttttgatagtagcaagactgcactgccttcttcctcatgagcccagtgccgtgatgacctgtttgcacatgggcccgtggtgtatcattttcccttgtataggaacaatagaataaggtctgactctagttgattgaagtggtagttttagattccagtaagaggacctattgccggtgagggaggttgaaattgcagaatgagtttcagcgtgaggcaggtctgcccagctgcaggttgatttgctctgtgagacaaggagcacacataaacagatggcccaacagtgagtcaaagcgatagatcccgaacagacacgctatcttttgcctgattcttaacatgactgtaaagagtggaattttatcctgccacctgaaggctaaaaccaagcatttagtgaaagaaattccatttgtgaagaaatgcgttgttaggcagaggagaagcctaaatatcactgggtctggacactgagaagccagtagttgcaggaacaggcatgagctggctttacttttggtgtgtgcacattcagcatcattctgctgtgaacacaccaacatgtggcacagtaagacgagagtgaattgatgtctctgacactgggttttaaagacacacaagccttttgttgtaaaaacgtatctcatattgaggttaaggagagatttttttcaaaaaaaatacctttgtggtaagcattataaaaatataccacaacctaagtttgtaaaggtttaagcaaggaaaagttcatggaaaaaaaacagaagaatgtagtagaattttcccatccagccatccattttcagcgtatgagagtttctacagagcatctctctgccaaacactttcagaagaacttaagcatctcactaattttcaaaatcaagattttacaaaagatgtaaatacttgtaatcccagcacttaagaggctgagatgggatgctgaggaatttgaggccagcctgggctacatagagttccatacctctctggaccatatagtaaaatcttggctctaaaacagaagagaatgtacttaaagatgcctggtgagtgaacaaatgtgctgcttgaactctgaaccttcagtcctcgttgtaggtcgtgttgaattttatgctcatgcccccctgtatgcacatatgacccaagaggcagagctaacagcgagccacgttgttgggatgactgctgatactcctcaggtctctgtggttaggattgaaaagatgcaagatatgggggtgaaaaacttactctgaaatgctgtaagggttacagagccattggttgaggtggtacaaatatagctaccttttgtttcccaaataattgggatcctattgaagatgaattgtgccggcacctactttctaaactggctttcattttatctgctcaagcatgcacacctaacctctgcttaggacagggaggcactaatctgcttctgtgcacttggaagggaacgctggcaatgcatcgaactccgggggatgcattagtaatggaatttttttttctcactctcaaaaaggaaatcatttatgtggccgctgtctagaagaatgcaaatagacattggttgttgttttctaagttaatcactgagcagaacataaaagagaaataccttaacaactaaatacccgaaatacctactctttacatatctgtagacccagtgtgatctaattcaatgtaggtcaccttgaaattgtgttgccctataagctttagtgtatcttgtactatgttctgtgtctcttaccattattaaactctcaaaaaacaaacaagaacaacaaaaaaaaaaaaaaactactgaagtgattgttttaatattgtgaatattctcagaagatttttagatcacatctgtctaaatcagctcccatcattccagctttctggttttggtttatctttgccttaactgaatctgtgagccagtaacatcgctgcacacaccttctgcttaagtctacagcattaaaggattccttttgttgatgcagtgttcttgcagacttggtagtgccttatcaatgcagccagttggtgctgctggtctgaaagcacaggagagctctcatgcggaaggttaatggggtgtaattataaagaaaaacgaactgctcacctactctatctctctctacctgcactacgagtgacaagtgctctgatcttctgtaaaccctggagcagtggtttaaccatctaaaactatgacagtatgactgtcacacaaacaagcatcctgtgaagtataggtatgcaccctgtgcagaaatgatgccttcctgttgcaggagccctgcttaggacgggagcaccttcaaccacaagaagagctgcttgttaaacattgtacttctgtgtcgcttcttcatttccactcaatttgttccattttcttttcctaaaggagctttcttccctccctgactagctgacagcctgcacacaagtgggtctgtctcactgaactatgaaataacagatagccctgcccggccctccaagcagtctgtctcacctgccccagaccatccttaaaccactggagtggacacagagccttgatcatgctggacaagtgttctaccactgagctacgctggtgcccagccttaggttctttgaagggtgtgcagataatcatctctggtcacgttcagcactgagcagatggagagagctcaggtagcacctgagcaaggtcccccttccatccccatgcaatcctgaggttatgtccacttctatgagttcaagatagacttggagcctaatgttctttagttgaaaatattatgggaaatattttaatagggaaaatatgatgtggcaaggcaagaatagagaaagagcaggtgatgtccaagggtaactaggatcatgctaccaggccatgttgtgaaattgccctgctactagaacatctaaagggtgagctaagcagagctgggttgtagagttgatagagtgcttttgccagctcagcatagaattgaaataaggcagtgaggaaggacttaaattcaacaaccccctgacatcttgttcctacaaagcctgaaacatagcactcttggctaggctgtgctgccccctgagatgagtaaacccagcgtcacatacatgcataggtacatatatacatacgcacatacacgcatacctgtggagggtgcacaccaatgatggctgtgttgctctctggggtttgctggctgacaagtctgtgagctcctggtttagtgagaaacgctgatttagtgaagggtccaaagatgactgctggcaagtggagcttagtccccacaaccacatggtgagaataaagaaccagctcctacaagtcctccttagtttccatttgtaggctgtgtgcctctccacagcagacacataggaaacaaatacatgaaaagcagttgagaaagacagaccctacagccttcaaaacagtaccagaagctggggagtaagcattccaacctggatagtggtgcatacctttgatccaagcacatgtgaggcagatgcagctgggtctctgagctccatgccagcctggtctgaagagggaactgcaggccagttaggggcacacagggagacccttctcaaacaaaagcaaaaacttggaccttttgggagatttcaaattgagaccattttcttaggaaaccacttacatagtagggcatttactttgtcatgggcagcattggtgtagtatgttccagaactttctctaaaatgtctgcttcttgtctctggcagaccatcaagaaagtagttcatttcacccaggtctgctttctgtaagatgtttagtgtgagacatggctcacatctaatactgctatcgtgtttgtttgcttgtttgtttatttgtttgttttttctcaagagaaactttagaattgaactttgttgaaaggttgtgtcagcttgggaaatgctccatctataagtttgtagatgtattctgcttaaacttgatcatctagttaacctctttcttcttctcattttgtctagtgtttctgtgaaaggggggacttcttacatttttttgtttgtttggttggttggttttggttttttcgagacagggtttctctgtgtagccctggctgtcctggagctcacgctgtagaacaggttggccttgaactcagaaatccgcctgcctctgcctccatctgtaatgggatctgatgccgtcttctggtgtgtgtctgaagacagcaacagagtgctgggattaaaggcgtgtgccaccaccgcccggctacattttttaaaagtggtgtcccaggaataagcgatgtttcatctgactagtaatccttaaagtgacagaggcttgcttttgttccccttccaattttaatagcatcactgtgctttgctttattcattgtttttccagtctctctgtagctctggttgtcctacttccttctgcctcctgactactgagattaaagtttatattaccacacccagcaagtcatcactgtatttaaattacattttttatatccaactttccaggacagccactgtgtaaccatctcagatcatagttcttctgtgaggaaatgggtagcagctttagggcagaggaatgagacactttgcgtagtgtacgccacaactctgacattaacaatgcaatggtgctttttaagttgtgggctatagcttgtgggatttggagtgacaagttggtagtgtgtgcagtcgtgctctataaacagctagttagacagagacaagcttcttgctaaactggtgcaaactaacaccttctgtgtcatagaccaccataggacaaacataaggagcaggtgctttctcatgtagcacaaagctaaactctatagattgtgaatggtttttactaataatgttcttctgctatgctcattactgtgtctgaggtctcttctgggtcagttcatgtttaaattcaacattattttctaagttttaatttatgaaccaccatagagatacaagctatcttgggtcacatttcaacacaaatatatgttttataatgtgttccgttcccaagctaaaaagacaataagtatacatgctgaaaggagcctgatatggctgtttcctgagagaccctgccagagccttacaaatacagaggtggatgcttgcagccaaccattggactgagcgtagggtccccaatagaggagttagagaaaggactgaaggagttgaaggggtctgcaaccccataggaagaacaacaatatcaaccaaccagagcccccagggactaagccatcaacaaaggagtacacatggctccaactgcataagtaacaggatggccttgccaggcatcagtgggaagagaggtccttggtcctatgaaggctcaatagatgccccaatgtagggcagttgagggcaggtgggtgggtttgggtgagtgggtggaggaacaccctcatagaagcaggaggagggaggatgggatagggggtttccaggaggagggaaaccgggaaaggggataacatttgaaatgtaaataaagaaaatatctaataatagtaataaaaagacaataagtagcaatcactctcctgatactgtattgttttgcttctgatttaaaatagcagtgacaatgagtctggccagggcgtgaagatgttagccgccaactctgaagatctgaacccacatagtggaatgagaaattgtattcctgtagattgtccctgacctctacatatgcactgggctggtgtgaaagtgaatggcctacaaaggctcatagatttgaatgctcggttcccagttgatggactgtttgggaaggactaggaggcgtggacatgttgctgtgggtgtggccttcttggagaagatgtatcactttgaggactctgtctgtctgtctgtctccctctctccctccccaccccttgctttccatcttgnnnnnnnnnnnnnnnnnnnnnnnnnnnnnnnnnnnnnnnnnnnnnnnnnnnnnnnnnnnnnnnnnnnnnnnnnnnnnnnnnnnnnnnnnnnnnnnnnnnnnnnnnnnnnnnnnnnnnnnnnnnnnnnnnnnnttccatcttgccaataagatgtaaactaaactctcagctactgctccagcaccagacctgcttgcttgccaccatgcttccagccataatggttggaaaccctctgaaactgtaagcaaactcccagttaaatatcttcccattataaattgcttctttggtcatggtgtctcttcacagcagtaggacagtaactgtgacatgcattgtgctctgtatacccgccacatggatgttaaataaatgagcataatcaatttttttaaatctaatcacttaagaattaacattgagggggctggtgagatggctcagtgggtaagagcacccgactgctcttccgaaggtccaaagttcaaatcccagcaaccacatggtggctcacaaccatccgcaacaagatctgactccctcttctggagtgtctgaagacagctacagtgtacttacatatattaataaaataaatctttaaaaaaaaaaaaaaaagccgggcgtggtggcgcacgcctttaatcccagcacttgggaggcagaggcaggtggatttctgagttcgaggccagcctggtctacaaagtgagttccaggacagccagggctatacagagaaaccctgtctcgaaaaaccaaaaaaaaaaaaagaattaacattgaaacatttggcttgagccaggtgtggtggcatataccttcaacacctgcagaggcaggcagatctctgtgagtttgaaaacagcctcaattacatagtgagttccaggtcagccatagtgagtcattaaaaaacaaaaacaaacaaacaaaaaaacccaaaccagctcttctttgtagcatcccctaggcagttgactgtgtcaagaatgaaggtaaatatttccttcctaacaactggctgtcagaagctcatcgcaagcttcatatgttctatgagaagcacatggtcaccgaagtagctgctgagggtctgtgtgaagactggaagcagcgctatgtggtatgaatcagtggtgagaatgacaaacaaggtttccctacgaagcatggtatccagacccacatggcagaatgagcctgcggctgagtaagggccggtcttgttataaaccaaggataactggaaggaggaagcgcaggtctgtttatgttctcaacttggttagtgttaaaaaaaaaagagagaggagaatattcctggactgacagatactactgtgcttccttgattggagtccaaaagagcgagtagaatccaaaagcttttcagtctctgaaaaaaatgatgactgccgacatgttgtcaaaaatcccttaaaccaagaaggtaagaagcctaggatcaaagattcatcgtcgtgttattcaagatgttctgcaacataaccaccaaagtacaaaccacacactaagaaaaacaaggaggcttcagaatgtgctaaatttttggccaagagaataaaggaagccaaagaaaactgctaggagcagattgccaagagacgtaggctgtcctctctgagagcttctctttctaagtctgagtccagtgaaaaacaagtccttaagagtaacaaataaataatcagactatgaaacaaacaaacaagacactggatttgatgtttcaaaaatctgtgattgcaatgtaattaacatgtgaaataaaagtagcatttaactgtcgagttgaaaatttatctcctcaaattgtattacttattggttacatctcttgttttcacatttactaagcactctccaccattaatatgttggatctttaacatttcctgaagcaaagagggcagtacagtatagcttgggggtttaaggagacagaaaagatataactgtgaggagactggcttctgactctggccccttttgtcttttaatataaatatggtggttattgttctgagcatacagtgttcctttgtaatctgtgttactactgtttggccctgacatgcttgtctttattttatatttatgatagtgggtattgaactgggtccttgaatatatgacagaagtgctctgccaccacactgccactcagcatatgtgctgtgcactgggctctgtagctgtctcttgagactaactacagccacatcctttcctattgcaaataaaaggcagtcctcaggctcttggggcccctagctatagtaggtaaagttccattgtagcaatattattagtgtttcattgccatacataccaaatttggtaagaaactgggtgatgcttacctgttaagagtgtgaatgaactaagtgagaaaattataaactgcttttctaataggcttgcagtgttagagatgtagtgtagatctcagagatgtggatgaagctctaatctgtagaggttgcttgtaaaatccactagtgcaaatacccatgtgtgcttgcatgatggagtgtgttaaaacaatcttcctctagtacccaggttgacattgaactcatggcagccttcctgcttcagcttcctgagagctagaattaaaggtatgagctactgcacctggctgaagtgtatgttctgaaagaataagcccaaaggcttttttaattaagacggtaagccacagtttggtcaatatcatgacacgtgtgttctctgccatctgttaaacatccacacagatgattattggaaagggctctggtaatgtgatctctcctgctccttgactcgtttctacagactgttcaaattccttgatgctttgcagaagctgtttgtctgattctaagtaaaactcatctcatagagcttgaggaaagtcttctagtgtctgccaaataagtgcaatcctaccactagtgctcctcctcctcctcctcctcctcctcctcctcctcctagtcctcctctttctccttctgctcctccccctcttccttccccctccctgttagaatcctatctcatactcccctgggaacattcttgccaacagcatcactgcatgttctttgattgaattttgcttattgcattacaggaggagtttactgtgagcttactgctttcttcccgtagttttgttcataaaatgatgttgtgtgtttctgttcacaaaatggcagaatcttcatttaattctctgtttctttaaacagcacataccttttgttcagaactgtagtttgatccctaatgttgtcaacaacacaggtagttttgttttatgtttgtctcatgtggacatagggtctctgctcattctaggctggcctagaatccttctgtccccacctcctgggacagtgctgtctaggatgacgtgctgtgccaccatgcatggctatatagacgataattatatggcacattctgaagactgtcgtgtctgtttgccacttctcagtgttaatgaatatgatgctaaccataaatgcaatagttgaagttcaatcggacaacagaagatccccctccgtcacggagacgctcccttaacccatttgagaaattctcataccaacaaatagaatcttttccaggttggtttctctattcacataaaatttaataccctggtttagtttgagcagtgagtctgcagatctggacatgccttcattgtattttaggtgtggagacaaatgtgactgattcttcacattttagtttcaaaatgtctctgtcagtcctttatttaaagatataaaggtcacagtctcagattatacattagttcttggggagaaagggtaactgtttaaagcattactttgaaagctgttttgagtgggtgtggcatcctcataattggttcagaataaagttgtgtagagctccagctagttgggcgagcctgagcagcagcagagatccgaagcaccagcacctggctgtggtgggaaaggcctagctggagtttcttctgagaggtgctctccagcatttgtgcactgctgtgatggagggaacagggaggggtttgaccagggagtgatgggcttgtcctccgcttctccatctccttctgtgctccagggaacttggaagaattgcttgagataacaggaagatgagcctgtattctgtttaattggatctctatgactgtgtattttcctttcagacccatcttgatgttatgtgaatatgttgatagtatcactgaaggtcgcagtataccaaggccctgtgaactcgcctgaataagccctgatgaaattgggatgcaagagtcaaggaggtcaggggctggtcataggctaggtctatggaatgcttgacagacagattgatagtggacacagcctcacactggcctgttgtttatagaaagtacactgaagagagaaagtctgcaagctatttctttctccctctcatctaccatcattctttccgaattttctttttcttttcctttaattcccatttcttttttaaaaacaaaacaataaacattttttaagatttatttaatttatatatgtgagtacactgttgctatcttcagacacaccagaagagggcatcagatcccaatacagatgattgtgaaccaccatgtggttgctgggaattgaactcaggacttctagaagagcagtcagtgctcttaactgctgagccatctctccagccccaacaacaaatcttttaaaccaaacacctttaatgccagcactcgtgaggcagaggcaggcagatttctgtgagtcagaggccagcctggactacacagtaggttccaggatagccagtgctatatagacagaccctgtctccaaaattatttaatagttattaatactaatctttaaaaaaaaaactttgaagctgtttagtaatgtcaaatgctagtttgtgatatttaatcttttttgagaactttaggataatgagctgagataattagccacattcaaagatctctctcatatgtgaacactgttgaaaattcctgcttataccagtgttacctccaataatggctggaaaacaaacaaataaacaaacaacaaaacaaaacaaaacaaatcaaaacatgatttccttgctcagaccacagtggtgaacttgtaggtccatgtcctggggcagtgagaggaccctttgtgtgggcattgagaacttcctgaccacacttggtaagggcttctgaaacactgtcactgtcttctctcactttcactgcatctgctgctcacctgtgtccacatccctctggactgtgggacttagagcagctgccttgcggatggtgtgcagggtacctctgcccgaggagtgcctctgcactagggtcccctgcagcagagtttttctgctcccatccttggttttgactgcacgtgtacattagtgacaagagacaatactgcccaaaccttgagctttcaagctttcagacatacacaaacacagccatatgaccatggtattgtagttggcaaatacatcaaggacagggggccaggctgttctggtctgggaaatgctttgaaatactggagctgtctttacccagctcacatgatccgacctatccaacccacaggcctttttccttcctcctgaggactgatgcaaccttgcaagtattttctgtaggtttccctccccaccagcaggtctccatggcttgtcttagctctggggaggaacagttatgaatgcactgtggctcacttgactgcactctgcttctggctctgactggccggcacccagctctaggcatgtggctcaagagttctctcgcctgtatctctctagttcttgtctttgctgttgcctgctgttgcacacagcactgggagcaggtcctgggttttgtctcttttttgtagttcacttcagtaggcagtgatcactaaggagttcctaaagacgcctgtagagaataaagatgctcgtacagtaattatctagttttcctgcactgtttccttcagtgtcttcccccacttctctttttctttggcaagttttcctcctgatcctctcttctggtttttgtttggtttggtttttggtttttggtttttggtttttggtttttgtataagttcttggagtctgtctctcctgggagagtgctgtctaggatgacacgctgtgccacatggacgataaggactgtcatgtctacttgtcacatgctcagtgttaaccgtagatgtggtagttgaagttcagctgaacaacaggacacgccctccatcactgagatcacttagcccatttgagaaattctcgtaccaacaaatacatttttttttcaggttgttttctctattcacataaaatttaatacctggttttatttgagcagtggatatctggtggagaggaagactgaaagcaaccttaataaattatttcattcttaaacgtcgaggtgttcagacaggcacccagtgttaactaacatccctgcagtgctcacggttacctgcagcaccccctcccctgaactccagcacttccatttcaatgccctcgatacttgaaagatatcattttgaagaccaaatgttaatttttataaccatttgatagtttattaagttttttactctgcatatgtcttctgtaaaaaacttgaactgcatctaaaaaaataatttcccctaaaaggcagtactattatggggtataatgtataggttggccccctccccaaaaatgtcctttatgtattgtctgaaaagaaccaataacaatattttcaaactttttaagaatgtatttagtattgacttaaatgctttagaaatccattacgtgtatactttactattccaccatgctaagtgaggtagcctgagggtttgggttctttagagaatatgggtggcaaagttgattagagccacatgagtaatttgcaataagcctggctgttctggatttccttaaccctttactgaaagctttattttgagagcaaagggtgtatttgcattagtagagtgcttgaccaaagtacatggcgcccttcgtttgacccacagcatggtataaactagttgtggtggtgacatctgtattcccagatctccaaagatgatcagtcagttcagaatcatccttgactactaaacagtgagtttgagactagcttgggatacctaagaacttatctcaaaaagttaattaatcaaaagtatactaattttaactagcactaagcttcattatctccagtcataatctgtctcagaagtatcaaccttttgttatcagaactagcaaactgcagctgatgagttcactgtgcagcccctctgagccagtgcctggtcttcagccctctgcacactctgtgcagggagtgaggacattggtttacagcatagctctctacagagtggagacgttaaccaaccctgcattcatagcactttcctatgaaatatatttttttatgaaatgtattctttctagagtcgggtgctatagctgaatggcagtgtacctgcctagcacacatgaggtcatccctattctattgcttctcagccttcctaacgctgcatccctttaaggagctagctcctcaggttgtggtgaccccaaccataaaattatctcattgctacatcataactgtaatcttactactgttatgaatcataatgtaaacatctgtgttttctgatggtcttaagccccgatgaaaggttcattggaccccaaaggctttgctacccacaagttgagcacctccgctatacactaaaaagaaaggaaaagcaggcagacagaagagatagattattataataatgagaatatccaaaaacacgtctttttttatagtttaagtacaatttaggatgttttaaattttctttcttgttcatttatttattttactaaggtctcactatgtagctctagctgtccttcgaacacactacatagttcaggctggtcaggaactcagtgagatctacctgcctcagccttctgagtactaggatagcatgtgccaccagatccagtttgactttaaatttctatcccatgtacttaaacttccactctgcctaaacagatagtatatgatgctatgcatatgtcgcatacatgtctaaaatctgtcccagcgaagaagtcatactccatagttatacattttagtaatttagaatactttgagtttatatagcatacagcagtttatttaaaaatgaggctgagagagagaaagagagtgctcctatggattgaacctggggccttgcatacaagagccatgccttaaaccctacttaatgcttcagactgggagagatatatgatgcttgctagaatagttaaaatgtcagatgaaatagtttaataatgaccagtaatgtgccaactacagttcagtgcattctatatagattagcttatttattgctcataagatgtacttttatcgcatttctacagtccaggacactaaggaacaggtgggttaaaaatacccacccaacagcatataaactgggctcaagctaaagcatcgtagctccagtgtgtctgctgtgctgctctgctctctacctcacaggctaaactgatcaatagccaagaaatctgaactggctgtagtggctcaaccctatagtcctggcattgggaggctgaagcagggccctaagttcaaggcccactggactgcataatgaagccacctcgaggaagaggtgtgggctggaaagtaaggaaaaatgaggaaggaggaggagggggaaggcaaaagcatggtctttgcttcactgtttaaatctgtatgcctcctttcctttataacactggtttcatattaatggaaatctataaggtttgttgggttccttgtgttagaatctgtgttaggtatggtgttgatgaagctagttgtagaaagacatcagagaacgaacaacgttctgatagatttccgtttgtcttcatttggtagaaaagagtagttgagcagctgcgcaagaacctgatagtcaaacaagagcagccggacaagttccagatacagccattgtcacagtctgaaaacaaactacaaacagcacagcagcagccactacagccactgcagcagcagcaaccacagcaaccgcagcagcagcagcagcagcagcagcagcagcacgcccagcagtcagcagcagcaccgcctagtctaactgcatcacaggtaacagtatgggtggagcagccaaggctgagtgttgggtagtggctggtcacatagaactggattatatttcaactatcctaagctcaactaacactaatcgagttttctggattttgtttggggtttttactatcattgacataagaatcagtgaaattcacctgcagaaggaaagagacttctaaggagcagaagttttattaaattaaattattgggttgggaatggagctagggggctcaactaacatcctgaggccatgggtttgatcctcaggactatataaagccaggtgtggtggcgcattgctggtgatgatcccaaaactctgaggtggaagcagggggttcaaaaaatcacttgacaacatatcatattcaagtttgagatgctatctcagagagccgcaggagtgatttccatttggagatttctggggtatttgtttatatatgttctaaagtgacctggtcccttctgtaattgttcttctacaattcttagcaattatgcatggagctattccaggacccatgctttggaaaccatgtagaaaggagcattgagaagggggctatgtttttattatctatagaaagtgttcaaggccactgcttgagaatatgcattggttctaataaactggtggagctctgaagtgaggttgcaggtgagccttagagccaagtgggagtgtcatatcctagcctgatgtagctgtggaaatgttttactgaaaagggcatttaatctagcgtagaatgtgaggagagaatcaagatacactgaaagggcatatttggaattgacatttgattaagaaaattattcaagcttgacctctatacatacatacacatacacacacacacacacacacacacacacacacacacacacaaataaaaaagtgagcaaatggatgaatgggtgaatgaatgagactagtgaacagtgaatagtgaatttgggtcttctgaaacacacccacactgagtcttcattatgtatacagaggaaaatggagtttgcttatctacttattatttgtagacccaggactagttcatgtacaaaatttttaaagccaagaattgaaccaattatacaaacactaaagacatacataacatgtagtgtgctatagagccaaatttgaacccagatgttttaaatgaaaaatctgtccattcaaatacttttctgtagtgccaaacactaccatgaaaggcagtgccagtacagtatgaaacctaggacgaaagagaagtccctggggctggtgagttggttcagcggttctgagcatctgttgttcttgcagagaatcagggttcgagtcctagcatccatatggcttcttgtacctgtctgcaactcaagtcccaggcacccaacaccctcttctgacctccaagggtaccaggcacacatgtggtgtatacacggatgttcagacaaacactcatacacataaaatagtaaagtaaataaatctaaaataagttgtttaagtccctgtcttaagtcagaaaacaagagcaccaaacagacttcttcattaatcaccccccatactaatcctatatgtaaattaggcttgtttttctccccaacagggtcttactatatagttctggttgaccagaactgtgtagaccaggctagtctcaaactcagagatctgcctgcctctacatgtggggttatttgcctggatgtttgcagtccacatgcatgcaatgccttcagaggccagaacaggccactggatcccctgagcttggagctatagccagctgtgagctttccaggccgttctttaaggcccctgaatgtctataacttctcacagattgcttctgagtttgcagactcatcatagatgtaggtaagacagttgaaaaaatatggggtttacacaaagtaaatttgggttctacagaagatgttcagtggttaaaagtttgcattgttcttgcaaaggaccggagttcagttcctagtacctatgcccaacagcccacagccaccacagacagctgcactcaaatgttcactctctgtctctgtctgagtctctctgtctctgtctttctctctctgtctctctgtctgtcggtctgtctgtctgtctgtctctctctctctctctctcacacacacacacacacacacacacacaaacacacacacaccacatcacatgcactaaaagaaaaaaaataaaaataaaagaatcttttaaaatgttttaatggaggggactggagagacagctttgctgctaagagattaagagcctgtaccttccttgcagaggacccaaaatcagttttcagcacttgtgtcaggtgactcacaactatgtctaactcctgttccagggaatctgatgccctctcctggcctccccgggcactgcagctacaaactctgactcagacactaatttaaaaattagaatttaaaaattatagtagaatcaaatctttcttttagaaaagtaaatgcagaggcaggtatagtgtcacaatctgagcactcaggaagatgaggcacgagaattaagaattcaaggccagcctgggctccatagtaggtctatctcaaaacaacaaaagtaaacagaaaacaaattacaaaagcatgcctttcgtcttagttactgttctataccttgaccaagacaacatatagaaaagagcatttcgctggagacttgcttacagtttgaggggttagttcacaatcattatgatggaggtgtggctgctggccagcaggtgtggtactgaagcagtatttgagaacttgtattctgattcccaagcaggaagcagaaatagactgagactgggcctgtggtgggcgtttgaaacctatctccctcccagtggcacacctccctcaccaagacctcctccaccacacacccctaacccttcataaacatttcaccaactggaaacaagaaatcccagttcaagctatcacacctttgaagtagcaaggaggctgttgaatgtgagatgatgggagagttacaaggccaggaaagacaagaggagctgcctctaatgcctaataaagcttggctgtttggtaactataggaaggtataaaagaacagatagatgggagtttaagtatagcatatattagatacgtagcttcagaaaggaatggcctctgattgattagagtgggcaggaaggagatgctaggtgaggaagtttcgtattttaaactgagggacccttgctgcaaggcagtgtcttctagacaccacagggaagttgtacgtgaaatctcaacaacatggttgcctgagcaagacctgagtaatgacagcatcagactgtcaaggccacacccctagttggagaactacatgcagtcagtggaaggtgtgtatttattaaaaactgaatacaaaaataaccttataaacaaagaggagggtgagttctatttgtgtttgagtgtacaacagtgacttcctattcaaaatttagcagacactaaaacagatgtagaggttaattagatcccataaaagtatcccttggcgttctggtttgtgcattagatcagctctttataaattaaaatgcctcttatctaacaagttaacagtattaacctagcaaaaatacaaagggatttagccaggctttgtggtttacacacatgttcccagtgtttgagagtctgagacaggtgcatcaccctatgtttgaggccagcttgagctaccaagtgaaactttgtcccccaaaaaaccatttttaggatccagaaagatggctcaacagttgagggcaccagtgctcttgccagggccctgggcttggttcccagcactagtgtggttcacatccattgtaactccatttcctctctgccctccacaagcactcaggcacacatgtggtgcacacacatacatgcaggcaacacgtgcacacacataaaataagctttaaatatttttaatttattaaagtaaaacaaaaggactttgcattagtgctactgcatttatgtctacatgaattgctagctcatagaagtcaagttttgttacaattgaagatgtttatggaaccctagtacctgctacttcacttaaagatcagcagacttgagtagcattatctacccaggtccagacacaactcccatgaaaatcactctttcattctggacttccaacctctctgcatctcctcttcttcctgtggacagctgagacattttcagtatgcttggatgtcaaagttcccttcttgtctaaaccctaactcttcacgagtttgctccatgttcccaaatatttggagtggagtgataagattggataagaaatgagaatcttaactaatccataagtacatttgttaagaagttttcactgagacattcatactaggtatttggcctatgtactatgtataattatataaattttagactatatgcaataaaatcagccacaattaaatacatatagaggagaataaaatcctgattttcagtgtgaagtaacttgtcagatttaatgttatggaaacattaagttaacagtaatatataatctaggtaaaaataaaatataaacaccctcagatttgtgtttttattcggtatttgctagaataatcagtttagagttaatcaaaatattgaaaatgatgatggcctcaactagaagtattccaaatgaaagtccattgaccacatgtaaagcaatatcaacacataaactgttttaaaatctttgacattaggttctgctgagcagaccatcagtccacagtctgtattacactaggattaaaggccatctactatggcttgctcacttacctcttcaaaagctctttgtattcaagcattttaaattgaaagatgaaactgatagcatactgtgcttaaaactctttatacaacagctggctttgtgagatagcctttgctgatgcacactacagcacttccggtgatcaaatggcatttaactgtcaactgcctgtcaaccctaacctgctgcccaggtgccatttcacatttgagaaggcagtggtgggaggcatgagctgcccgtgctgtgccttgggtggttttaattgtagacactaataaggagtgctggtggggtgggtgagtccacagctttacatgttgttgttgttaaaaggaggttttaaaagatgagtatatgtacatgcaaacacatatcaggaagaaaaggtaaagaattctgtatgctcagtatctggatacgtggtgctcacatgatgtggaagagaaacttgaggggttttttttcctggtgtgcagaagagagagggctgctggggactcctgcagggctgggcatgttctcccgacactgtcggcctaccaggccgtaccacatatggcttagaagacatgatgagtacaagcaccagactgaccgtttcaatttctaattgcaatttataaaagtcaggcacagctggtggctgccaaagtgttcactacattttggaaggaaaagttaacgtggaataaatatcagaaccagtaagttggcgatgaatgtttgtgttcctggaaggtctgcatcttgcgtgaccagccatagtgccaggtagatgtgtatgtggtgtaatgaggtggtttctgtaacagacatttgtaatcattctagtaaaaagtcaggcaagtgtagctccagagctccagaaataccctctaagtgtcagctgggtcctcaccaaacgcctcctccaagatccagggcagggccttgttcccacctggtcagtttcctgactgatgatttccacatcagttctccagaggaagatttcaggcagtggcccatccctccctttggaatagaaaactggtgtttcctgtacagcatcattctctgcagcctggggtttactgcctctgaggtggcaattgtgctgatcctcctgtgagtttctcttctgctctcccagggggccctcagaaagatgacacctttcctttgtgccatacaaggcaaattgccagatcagttgaggttatagcaatcagggatagagacagtgtgcaacttacacaggaattaactgactttatgcagttagaaaacccagaagcattaagtgggctcctggtatgtacatttagatgtgtactgtccatttcctaaaaccatatgtttacatgaggcactcactacagtgaattttcctgtttacaagtgaccctaacttgagaaactagagtttgtctctctataataagaagcatgctctacatacgcaaaggctcatagacaaactcgattgcgttgtttcctttgggagttcagcagcatatggttcagtgggatcacatttcggtctcctaatacctgttctccgtgtctcctagaagactgtaactacagcttctatgattaccacaaagacactacctctcgtcttgaaagcagcaactgcgaccatgcctgcctctgttgtgggccagagacctaccattgctatggtgaccgccatcaacagccagaaggctgtgctcagcactgatgtgcagaacacaccagtcaacctccagacgtctagtaaggtcactgggcctggggcagaggctgtccaaattgtggcaaaaaacacagtcactctggtaagccagcagctgctactcacgtgttcacatgagagggttcaggttgtgcattgaagagggtatccattttgggctcctgctgggttttgagctcctatcattgctagaaaagcagactcccctataggcctatcacatgcacatgtgcacacacacatcgaaatctgagtgctgaaaccccctgtgctatattctgctttgaggaaaaccctctgctacattcttttagtttattatccctctaaattgaatgaatccaggaagtacttagagttggttggggcacatttgaaaaatactcaagaaactcggaggttaatgttccaaaggctgagtcttccagagggaggatcacctaaggaaacacgtgaacaagactgtccaggatatttctggatcaagccatttagatactgttgttcttagaagttgatgagagccaggtccaaattgtgctactcagttatcttcttcaaatgacagaactcttggtgactttttgaataacgatcaataatgagttaaagtagcaactgaaggtttgccgctctcccaggagtccttagagacacagccctatccctcaaccagacacgagtagtgccaagttctctatagactgggtgtggtggcacacctttaatctagcacttatgaggcagaggcgggtggatctctgtgaatttgaggtccagtgagttccaggacagccaaggtgacacagagaaaccatgtctcaaaaagccagaaaaaaatgctccctgttgagtaaagcttatatctctgggggaggggagggaaaatccatgtggacagacagtaaatttgattttacttaagatatagttttgactcttaaaatataaacgtaagggttcatgagtgtaagaaagccgtccaagattgctgagtgtgcgtgtatgtgaggagacaggagtgcggttgatcactgtatgggacagagagtctaggtgagacaggaaatagtttctaaagcagtgttggttcacatagtgaactgcatgggaagagcaggtgggagttctgtgttgtgtggaaggcaaatgcccgtttcctttgcgtgtctgcctccgacactgaatagagactgccctcggatttatttatgtttccctgtttcttagcaggttcaagcaacacctcctcagcccatcaaagtaccacagtttatccctcctcctagactcactccacgcccaaacttccttccacaggtgagtgaggcagtgggaactccacccgtgggaagtgtggtgatatcctcaggggcttgcccatgcagtgaaggggcagtgaaactacctgagagaaggaaggcggccaggataataccagtggagggaagcatcgtggcaccattaccttggttgggggaaatatagccatatttagcaaagggaaactttgcgaaaaagactagaaggagggctggagagatggctcagaggttaagagcactgactgctcttccagaggtcctgagttcaattcctagcaaccacatggtggcttacaaccatctgtaatgagatctgacctcctcttctggattgtcagaagacagctacagtgagtctacttacatatataataaataaatcttttttaaaagtgggggggaggagtgggcaagcagcccctttttaaaaaaaaaaaaaaaaaaaaaaaaagactagaaggagaatcaacagccagacgagcccttgtgacacctggcttacaggagttggcataggggtctgcatcgggcttttctacccagcaactagactgactctgctcgaccccaagcagtccatccaatagaaagaccaacacttatgctctgagagtatagctttcagacacagagaaaaaggagtctgtctgtgaggggtcatatagtactagcatgagagaagaccatcctcttatttatcagatagatctttactgttggtagcaaacgttccaagctattgtgtcctgaatatgctaatttccaagacacagctgcagcagcatcacagttgcctatagggtattagcgtccataggggagtacggtagactgaacgtgtggatgggacacagaccattctggactgagaaagtacattcatgatttcctagaatagtctacattcaatgtgagacctaaaaccctagtaaagtctgtctgatatattttgaagaaggaattttttaaatgtcccaggctgagagtaccaagtaggctttcatgtcttgagtggagacacaccatgtacattcaaaaagccaaggagatttgctgtggctgtgcagagaccatgaggctacccaggttagacttaaagaagatcctggaaaagtgtcctggagaagagcgagcctgtggatcgtcaccattgtgcagagatgtgggttgagtcctagcagcaagggggtctatggaagtgtttacaggcaaatacttaactggatgtcttagagattccctctttttgctggtagacaacaggttggaaatggacaggaagcacaggctggacattaaaatgtcatgagctgatcttcagagactctgcctctagtcctaggcactttatatggactgcctggtttctttgggtttttttttttttgggggggggttgttgttgttgttgttgttttttgtctgtctggttttttgtttgtttgtttttgagacagggtttctctgtgtagccctggctgtcctggaactcactctgtagaccaggctggccttgaactcagaaatccatctgcctctgcctctgcctctgcctctgcctcccaagtgttgggactaaaggcgtgtgccaccactgcccagctgactgcctattttctttctcacaacagctgtatgaaaggctttcaggaaagaatcaaaggtttagttcatgtttttcaaactaaaattaattaatgtgatatgttagtagatttcatgaagcttttgtgctttagaaatgtatataggtgtagcaacaaggtcttgctgctgtatcagtagcagccatcacgggatcattttaaattaacctaaacattcagacttagaagtctgtcattggccgggcggctgtggcgcacgcctttaatcccagcacttgggaagcagaggcaggcggatttctgagttcaaggctaacctggtctgcagagtgagttccaggacagccagggctacacagagaaaccttggctcaaaaaacaaacaaacaaacaaacaaacaaacaagaagactgtcatgggccacacttggtaccagtatgcttggaaacactggaagacttgctacttctggtaatgcagattttttttctctctctctcataggttcgacccaagcctgtggcccagaataacattcctatcgctccagcgcctcctcccatgcttgcagctcctcagcttatccagaggcctgtcatgctgaccaagtttacacccacaaccctccccacatcccagaattccatccaccctgtccgtgttgtcaatggacagactgcaaccatagccaaaacgttccccatggcccagctcaccagcattgtcatagctactccagggaccagactccctggacctcagactgtacagcttagcaaaccaagcctggagaaacaggtaagggcagagtgtgtctgcacctgctgtggcaatagccttgcccttgaaacagcagctgctggacgctttctaaatactctttctcaagtgttcttcatctcagcaccaaatcaacatcctatcactttattgtatgataattcactcacattcaaaagagcctttctcctgaattaagttgaattgttttcccaaggcttcagagtcttatgtaaatgtgctccccctgctggctttgatgcagaaattcacagacaggcccctctgcctcagggaggaagcaccccatactggaacagaaaataccatggttactttacccactgagagtccaagtgaagacccaactgggagcgtcactcaggagcaataaacaaagcagagaagggatttcatttcagaaacttccttgatcatcacagatgacatagaaccaaactgtaactttctagactacatgtagcagacattttattttagttcaaacattgaagccctacctttatattttctaaattcagatttttatcataatttagtaaagttagtaagactagaggaaaactggttacctccaaaaataaaaccttgaaggcacaagagcagccttggggagaagggatttctaaccgtcactctttcctgtcaagagaaagagcagtgacaacagtaggcttcagagaaaaacagttttcaagaagttgctttaactagccattggcctgctggggcagtctataatttggaatccaggaggcttaggctgcaagatggctgccacctgctcccagccctggctgcaagccaggactgccctctagctgtagagcactgagctccttgacagggcttcatggtcccatttcccatcgctaaacctcacttgactttataaagaaaaagttgttttgttttgtttttttaatttccattttatttttccttttccttttctgattatatagatataatacatgtgacttaaggatacagacatcacagaaatataagttgtagaagattctctcccccaacttatgcattttctgaaatattttacaaaattttacctgtagtagttagttactatgaacattttcaatcatgtgcttgtctcaaaccatcagtgtcctgggctgtttctaatcactcagacttggtctctcatccatgagaaaatagtctctggtgagtctcagtcttctgcctgagcgggtggccaaccatgattcagagagcccggcccctggtggggttgtcacaggctgccttggccttcttaaacagaagaatcttgcatacacactcccaggcagcagagttgaattataaaactttgtgtttaggaaacacacaagacagctcatcaccattcctgcagagcctgcccaaacaccaggaagtgctatgagggctattctgaaacaaattactaacaccaactaaatcagaagtttttagactgtgtggcagtcgggccttggtgcttaaatatggaaagtcgtgtgctcaagtacaggggcgtaagggacaagtccttgaagctgtgctgagtcttagtcgtgctgtggggcctctgtgcacctcagaaggtgactgcacagtgccactttccatcacttctcttttaccttttgctaagtaaagaaaaagctttttgccaggcagtggtggcacacacctttaatcccagcactcaggagtcagagacaggtagatctctgagttcaaggccagtctagtctacaaagctaattccaggacagccaagactatacaaagaaaccctatcttaaaaaacaaaaggggctggaaagatggcccagcgattaagagcacgactattcttccagaattcccagcaactacatggtggcttacaaccatcagcagtgggatccagtgcccacttctggtatacatgaagacagtgacagtgtgctcatatacattaaaaaaaaacatatatacacacacacaaacacattttcatcttattttttccatttctttttctgattatacaaacagcatccatgattttaaaaatgcaaatatcacagaaatataaattataaaagatactctccctacaacctatgcattttctattatattaattttactaccagtagttaattagtattaacattttctattacatacctccagatattttctatttacttgctaactgaactttaaaacaacagaagcaaactatgtgttttagcacagtcttttctaggtcttgggcatcttttcatgtcttggacttccatgttaatggcatcttatggtttgattttattagcacctaagctctaagttgaaggccttcttgctagtagtatggcttttctctttgctagaaggaatctggtcactgcaggtttagttggcaggccatctggcatagtagtcatacagattagcacagttagcaggaactctctagactaggttctattctcagaatttctgacttcagagctcccactgaccttcttgtaggtaggctgacataaggaatcaagtagaggcctgatcacaggattactaagcctgtgtatatggcattctcaagtcttgatagatttcctcaaaggttatgaccatattcacttactgaagatacgtaaatgaactctagggatgtagctcagtggtggagctctggctctgcatgtacaaggacctgggcttcatctcttataccacaaaaaaaaaaaaaaaaaaaaagggtcaggtgccagctactttgcagctcatggcatttgtatataaaagatgagaaaaccatcaaagcctcagtttctgcatttggatcaggcattgaggctgtgcttcagggaaggaagcatggcagactatgacgattcgtggcctctctcccgtagacatagaaaagaaggcaggaaaagtaaaaacctatactggtctcacatctgcccctggagtcttcttatccaccctcactgaaagatcttcaggtgtggatctaagggaaaagacaccagtttagtaagacatgcaataagttcaggtccacaaactgttctcccagtgatttagagtcatgtgtacactgtgctgtggtctttggctacagcaacaccactgtgtccataaatgtacacatctcagttttaaaaccttcagcaagcagtaatagtgcagtaagttgaaggtcttgctccaatcttggtggctgttgactgatcagactggcagctactaagtgaggtgatggtggcagtttgttaagatgacagagatgtgcttgagtcacactcctttcatgagggatttctttgtcccatgacaaggtttctttcaaaaaccagaatgagtctccaatattctctagagaagattccatctcaagagagcatttacttttccatcatcagagcaacccatcctctgttagagcctagtcacatcatgagtgtgacgccagcacagctccacgccccgcttctgactccagtatcaactgctttctccacctctgttgcttctgctgtagtcttgaacccctcaaaattgcctgtgaagacaagggtcaactttctgttcatgtttgagactatatatgtcttgaatttgagcatctagaatattgaagtctttccaaaaggtttcagtctatggctcctattgctttatttaaaatgtatttctcaactaataagatttgaaagccataattagtccttgactcatgggctgtagaatggcattgtgttaacaggcatgaaagcatcatcaacatctttgtacagctccatcagagctcttgagtgaccaggcattgacaatgacactgttttgaaagggatctatctgagctgtaagacctagagtgggctttcagtgttcataaaccattataaacagatgtgcagctgtccatgctgtgtgcttcgtgtgcagagcacaggcaggtgggctccgtgtgcagagcacaggcaggtgggctccgtgtgcagagcacaggcagaggagagttactgtgcttctcaggggccctaggattttcagaatgagcactggcttcaactaaagtcacagctcatcagcccttacaggagaggcagcctgtcctccgaacctttgaacctgtgcactgacgtctcttgatctatgaaagctgttgcctctacctgagaatctgctgttttgggtcaccttttgtcagctgtctttgtgacacagaggcagtttctttcctcaaattcatgaaccaccctctgctagcatcaaacatttatagcttctctgagccatcagagatgaacacaggtgaatgttgttctgagctagtctttgtcttgtgggatgttgttgctggttggatcctccatagcagtagtaggctgtcactttcctgtagctcaggagaggcacatttaacttccttcaaggactttccttaggacatgtggcttggttgtttggcagaagagaatctcttttaatctgtgttgtttttttatgcccacttcactaagtttaatcatgttctagctttttttatttaaaattatagatgtgtgactttttctgtcacatgaacatttagatgtcaccatggggttatttattaacctaagttcaatattctggagtcctgcagaataggaaggacatgaaagttgataagtgatgtgtgtgatctaactgacttgtcccctctcctccttgagcctccctaaagcaggcatgcttaggagagtcatgtctcatatatcagtactattctccaagtgaacctgagcctgagctgagaacacaagtcaccaccataaagggaattttgtcttgttttcagtccaagtttacgaaattcacataatgccgctacctggacattcatctatggcactcgtcagtttgaaatttgggatgcaaattatttccttaggtttagacatgccaaagacaaggattctatcttttctaacctaagaagagcaggagtcccagcagacacatgaggagggtgtgcgagacaggaaccatagtgagcgatgccctggggcagacaaatgatctgatctttccattttctatagagcatgactgtaaggggatgctgacatcattgctaataacccagcaagtgtggctgggacggacagtagcgtgggaaagctggtgcttgaggaagctgctgctgctcggcaacttaaaagtccagattccagatgctctgaagaactgcctagttgttaaatactggtaactctttaaacacagcataagcaaacaggttccatctttagggcagcttcagtactaaataatgctttattttctttaagagagaggccaaacatttagaatcattgctcttcatttcttaatattttttcattgggactggagagatggctcagcagttaagagcactgagttcaaatcccagcaaccacatggtggctcacaaccatccgtaatgagatctgacaccttctcctggtgcatctgaagacagctacagtatacttagataaattaataaataaatcttttttaaaaaaaatttaaaatattttttaattgcagtgaaatttatttcacaaataattagccattccaacataaacagtttagtggcatttagtacatttacagtgttgtgcaattgccgtctgtctagttgcaaaatattttcattttcctaaaataaaacccagtatctattaagcacctactttccatctatcccattatctgtccctggcagtcaccagtctgctgtgtctgtggcattgatgactctgccgtttcatataaatggaacaatttaatgagtagctttttatgtatgacttctttgagctagcatgttttcaagattcacttactttgaacactgctggtacttctttttatttactagtttatagtcacacgtatattcatgtttatgtatatcacaagttgtctatccatttatctgttgatggacatttgagacgtgtccactgtgcagccactgagaccaggatgtgccactgggaacatttgtgcacggcacctgtatgagccttgtttacagttcctttggatgtgtggctgagagtggttgctttgtcatgtggcatcacatttcctgaaagtcacactcagcaattttcatttccaacaacaatacatgtacattccatttgcttaacatttatgctagtctaagaatattttctttatagctatcatagtgggtataaagaatgcaaatatggtgatttttttgcatttccacaattattaatgatatttgttttctttttatgtttatttgtatttgcatgtatttaaaaatatctattcaaacctttctctatttttttgtttcaaaaaacaatttaggtttatttattttgtgtgtgagtgttttgctcacatgtgtgtctgtacattgtgtatccatggagatgagaagatggcattagatctgttgggactggagttacgggccgtggtgagctgctatgctggtgctaggaactgagcctgggtcctttgtctgcaagagcagcaagtgctcttaaccatcaagccctccctctagcccctctgtgtccacttttaagtgaattattacactttctcttgatgaagtataggagttcttacttagcctgtatactgggcccttagcagacattattcttaaatatttttttcttgttctgtaagttcccttttactttgctattgctgtccttcattgaactgttgtaccctgttatgttgctgagtttactagctttcagtaggggtgtgtgtgtgtgtgtatgtgtgtgtgtgtgtaaggtttttaatttttaaattatgtgtatatatgcatgtgcacatgtgtacacatacctacagaggcctgaagagaattttgggttccctggttctgaagttaacgtgcttgtgagctccttaatgtgggtgttgtgaattgaacccaggccctctgggagagcaggtgctcctacctacccatgagctcttacatcagttcctgagctcctgacagtggcaagggttggtactaatttttcaatattggatgaagctcagatgaaccatctatgtagcccttttgttcggggagactttgattcctgtttcagtctggtgtttctatgtctgtttagactttgcatgtcatgtcgggtcagtttgggtagtttacttgtagagacctgtccatttcttttgtgttacataattgtcatgcaattatctgattattttcttaataatgctctctcctgactgtaagagaaataatgtcatcccccctccccgctttttcatcattttatcttattccttggctctagcagtttataacttttattgagtgtttttcccaaaggatcaatttgaggtttttgttcatttgttaattttgaggcagggtctcactatatagcccagacttggcttgaattcagacatcccctgctctgcctatacccttgctaggtatgaagccatggagggatgactatattatgtccctaagaaccatgattagctcattctgtgggccctttttctgtgtctttcatccctctggctcctacagaccatctccccctcttctacaggattccccgaactccacctaatgtttggctgtgggtctctgcatgtgtttccaacagttgctaaatgaaatctctctgatgataattattctaggctccagtttacaagtatagcagaacataacattaggaatgattgactgcattggtttagttgttgttgttgggtttttaggggtttgtttgtttgtgtgccagtcatgtttggttctatcctaggcatgggttccctctcctggtgtgggcctcaagtggggccagttactgattggccactccccagcaggacaaattattaggtcagaggttttgtggttgggttggtgtcccaatccatctaggaacccttgcctgtttacagaagttggccaattcaggctccatattcccattactatggatcttattaaagacctagtaaggtcacccttgtggactcctgggggtttgcactgcactaggtttctcctcagcccccaaaatacccccaattgcaggtgtctctcctagtactctccctacataccccacttgattccacctgtttctatccccaattgcccccagtccatcttcaaaatctgttttattttcccttcccaggaagatccgtgtgtcccccgttgagtcctccttgttacttagcctctctggtgctgtgagttggacatgattgcactttactttacagttaactacccacttgtaggagagtgtacaccatgtctgtctttctggatgattgtctagttccatccatttgccttcaaatgttaggatgttcttttctttaatagctgggtaacattccattatgtaaatgcatcacattttctttaccattcttccactgacggacatctaggttgtttccactttctggctgttacaaataaagctgtgctgggcagtggtggcacacgcctttaatcccagcactcgggaggcagaggcaggcggatttctgagttccaggccagcctggtctacaaagtgagttccaggacagctagggctacacagagaaaccctgtttcgaaaaccaaccaaccaaacaaacaaaaaacaaataaggatgctatgaacatagttgagctgtgtcctttgaggcagatccattcccaattttctgagaaacttccatatttccaaagtagttgtacaagttttcattatgaaggagttttccctttgctctacatccttgccagcatgtgctgtcactttaagtgtttcttgtccatttgagattcttctgttgggaattctctgtttagatctgtacctcatttttaagtgggattatttggtttgctgatgtctagtttcttttttttttttaatttttattttatgtgcattggtgttttgcctgaatgtatatctgtgtgtgtgtggggggggcggggggttggatcacctggaactggaggaacaaacagttgtgagctgccatgtggaacctgggtcttctgaaagaatagccattgtgctcaaccactgagccatctctctagcccctgaaatctagtttcttgatttctttgtatattttggatattagccctctgtcaggtatggagttggtgaaaatcttttttcattaaaagacagagaaagagagagagaaaatccaaattaatgaaatcagaaacaaaaaggagaatataacaacagacatggaggacatacaagcaaccattaggtcatacttcaaaaacctgtaccccacaaaattgaaaaagctaaaagaagtgaacaattttttttaatagatatcacttcccagagttaaatcaaaatcagataaacaatttaaatacacctataatccctaaggaaatagtcattaaaagtctctgtgatgatttgtatatgctgggcccaggaagtggcactattagaaggtatggccctgttggagtaggtgtgtcactgtgaatgtgggctttaataccctaatcctagctctctggaggccagtattctgctagcagccttcagatgaagatgtagaactctcagctccttctgcaccatgcctgcctggatgctgtcatgttgttgccttgatgataatggattagacctctgaacctgtaagccagccccaattaaatgttgtccttataagagttgccttggtcttagtgtctgttcacagcagtaaaactcttaactgagacatgtaccaaataaagaaaggctagagccagaaggttttagcacagaattctaccagactttcaaagaagagctaataccaatacgcctcaaattattccatgaactagaaacagaaggaacattgccaaagttattttatgaagccacagtcatcttggtactcaaaccacacaaagattccacaaagaaagagaattacagaccaaattctcctcatgaacactgatgcaaaagtactcaataaaatacttgaaatctgaatccagaactcttcacaaacatctcctccatgtccaagtaggcttcatcccagagaggcagagaggaactgacaatgaagatctgtcagtgtaatccaccacttaaacaaacagagagagaaacacacatgatcatctcattagatactgaaaaggcctttaacaaaaatctaacaccccttcatgataaaagtcttaaagagattacagatacaagggacatacctaaacataataaagacaatttacagcaagcctgtagccaacatcaaattaaatagagagaaactcaaagcaattccactaaaatcaggaataaaacaaggttgtccgctctcatatttattcaatacaatacttgaagttctagctagagcaataagacaactgaagaacaaataattacaaattgaaaaggaagaagtcaaagcattgctgttcttagatgtttataacatgcatacatgatcttgaaaattctaccaggaaactcctacagctgatgaacaccttcagtgaattggctggatacaagattaactcataaatgtcagcagctctcctatatacaaacaacaaatgagctgagaaagaaatcagggaaataacacccttcacaatagtcacgaataatataaaatatattgggacaactaagcaagtgaaagacttgtatgacaatgacttcaagtcctaaagagaagaaattgaagacaatataagaagacggaaagatttcccatactcatggatcagtacagcatcaatgcagttcccatcaagattccaatacaattcttatagacattaaaagaacaatacttgacttcatataggttaaaaaaaaaaacagaatagctaaaacaatcctgtacaataaaaacttctagggggatatcactatgcctgatttcaactgtactgcagagcagtagtaataaaaaccacatgctgttggcataaaaacagacagatttatcaatggaatagaatcacagacccagaagtaaactcacacatctatggacacttaattttaataaagaagccagatatatatagtggaaaaagaaagcattttcaacaaatggtgctaatctaactggaagtctacatgcagaggaatgaatagatctatgtctatcaccctgcacaaaactcaagtcaagtggatcagcattaagccagacactctaaacctgatgacacagtaagtggggaagagccttgaatacattggcacaggagacaacttcctggtgagataataagtggaacctcatgaaatggaaaagcttctgaaaggcaaaggatgctctcttttctgtaaggcagatgtaccagcagtggatacccttaactttagttcatcggcccttagtttatccttcattctttaaggacagtttgaacacaatataggattgttagttgatggcctcgtcgccctgcatttttgtttgtttgctttattcatccttttaagaatgttgcccctctgccttcagtctgcagcttaactggatagtttgggttcctggtctctcacagtttgtaattaaagtagttggctggagctacagttatcatgaggcttaactgcagttggccagtttgcttctaagctcagtcagataattcctggcctcaccttttgctgggtatgggcaggagagtagtttcattttgcttgggtatttccatagtgctgggcacatgacagatggctttccccagagcaagaggtccttgagaaaaaggaaaccaccctgcctctctgagtgttttgactgtcttatttttgtttggatgggggctatttgatgtgggtgtcctcagtatgctctgtcatttggggaggttgccctgcccaggagcattgcctccaagtatttgcttacccatggaaatataaaagagaggctccagggagctgttgtttcatgtaggaatggaatacaaaccctgtggttgactttctttctcttttgttctcccacatacaaagtcacaaatgtaagctactcctcagttccccagaccttagtgatgtctccatgactgcgttcccatcgagggtctgctttatggaggaaataggctcttctgagataacccaaaaactatgtagtaagccggccgtggtggtgcacacctttaatcccagcacttgggaggcagaggcaggcggatttctgagttcgaggccagcctggtctacagagtgagttccaggacagccagggctatacagagaaaccctgtctcgaaaaaccaaaaccaaaaccaagaacaaaaacaaaaacaaaaaaaaaatcaaccagccagccaaacaaacaaaaactatgtggttaaggaaggagaagaaggggttaatcgagagattgaaatgggattgattctcctggagggtcagtgctttattgagtgcaggcaggaggtggacgctgggcttgaggtagtaataaggactgtatgaacagcccctcctcgggtcgcttatagtacacatggatccttatagcaggactctgccggagagcagtagttgatgagcaggtcttacatttgctcgtgtaacagtgtgcaaagccagaggcacagtatgggaaaaagccaaggaaaaggggaaagctctttcagatctactacattgtttcacagtgtaacagtcttgagcaccttccatgtcttttctatagggatgaaacctgcactcagcttctgcccccaataatcagaaacttttatttaatggcttgtggttaccttacaaaaagaccattgcacctataatttttactagttttttaaaagtaaattaagtttgtatttatggttctatgtctactgttctaaaactattttatttctactattttactttattcataaaagaactagccattactcaaaagagaagagtggtgcaaagccacccatgtccagctattagtgcggctggtgcttctgtgtgtgcccggtgcttctagaaggccccggggatgaggaaagcttgagcctctcgcaagacaggttttaaatgccctgagtaaaggcagttctaggcagttgttggggttgttctgagaaaaagctcagggtataagaagtttattgtgctatgcagattgtaagaacatgtggacagagcctgacccatatagaatggcgtggatgtttctggaaaccaccacatcctgcagtcaaggaaaaccatctctaatttggtttttctttgcccttaaaaaagtgcttttaacttctgagccctgttttgccttctgttaaaacttgttatgtactgggcaatgggtgtgccatggtggagaccaggagacaagagaggaagctagttgtcattttccaccgtgtgggtattgggcatcaaacttggggtatcaggcttgacagcaggtgtttacctggtgccacatccttccatatacaggaacgcttttatctgattgcatgtatggagtcattaagcccagggtctctagctggacttttatattttacttcgtcctctacaaaagacatcatatgaacttctctgttaatgtttcaaatttgagtatattattttctttttggtcatagtcaaactgtttttaattcttttaatatgaaattctgaatttcacttaattgttctctcctagacagttaaatcccacccagaagcagaggaaaaacaagcagagagccgtaccgttaccccacctgctgcaccaaaaccaaaacgagaagagaaccctcaggtagtaccatctctgccaggctttttcaggtctggcatggggcgtagccacttcctctgtgttctttcacacaatagtgactaccaagtcagatggaccagggcagcttttttagtaaccagtcctgagggcctgagcacgggtgcagaagggaagagctctgaggatgttttatagacatcctgaaggagacgttaataatctttcttgggtgtcctgtgatgctcctgaggaaggccgtgctgtgcttatctcagacgacgtgtatcagacagccagtgccctcagctgatgtcagtttacattgtagactgtcactgtgtgttcagcttcgtcaggactgctttatcacagctctaaatcccaaaggaatcagtggctcacagtggtccactgagcacaagagtgggctgaagacggtgacatctgcactatgacacaagcagtaaacaagcccagctccaacagcaggctgtgtgtccatggacaagggggcattttaccttgacgctcttgcacaggcagctgtaaaggaaacgcaagtggtagtctggttctgttggtaaatagctggtgatggagctccgagaccaattacatcccctctgtcctcagtacaggctccatagtgaaaccataccagaccgccatcaaagcctcatgcttttcttctttctttaaataaaaaaaggaaagctctattgaaccagcccagttttgtgaagcaagtaccaagtgtacttctttctgacgtgaagtcaattttattttttaaaggcccagaacttgaaccaaaaagaagcactagttattgctgaaaaactttaaaaaaaatcattcacaaaaactaatggcaaaaactgagaagaaacagagctagatgtcaggaaaaagaaagcttttgtgagacagggtcttgctgggtagccacagctgagttggcataggctgtgtagcctaggttggccttgtacttggcagaatccacttgcctctgcctacctggtgctaggataacaggcattcaccatcaggcacaaacaacacaatttctttgtaaaaagaaaggttatctcatgtcggtgacaggtgccatgtgtgtgtgtgtgtgtgtgtgtgtgtgtgtgtgtgtgtgtgtgtgtggtgtgtgtgtctgtctgtctgtctgtctgtctgtctgtctgtctgtctctgtgtgtggccagatgtggtggctcacacctataactctgacacttggaagaatgaggccagagaatttgaggccagcctaggagatataataaaaccccgtctaaagctgaaaaagaaaggaaattcatgacagtggggttcttttctcatttaagaaattcttaaattctcatttaagaaaaggtgtggcacacatctttagtaccactactcaggtgagttctaggacagccagggctacagagaaacccggtcttgaaaaagaacaaaggaaaagaaactttttgtgagcttagcccagactgcagaggtgacctggatggatgtgtcaagagaaagagtactgttatttggaatgagtaggttttgtcatggtggatattgcggccagcctctgccttggttatactttaaaggaatggtggaagtagggaatgtggttatctgcctggccactgaatgtatcatttcagcatgccgtgctgagacatgggcgccaggctaagattcatcaccctgcccagttcttgctcttgtcagagagagttgcgcatttcaggccttgtcagtttgctagggaggagtcaaactcggtgttctctatatgctagtccaaatatttgaaataagaaaaaaaataataaaaacactttttcagaactctgaagatagcagtgaagacccagagttctgggtggcctgttcagaaaatgacacaaagtgtcacacttttttctttttcctttttctttcctttccttttccttccttccttccttcctccctccnnnnnnnnnnnnnnnnnnnncgctacagtctgaaataaagaaacttaagataatgccaccaggtatccagaagtttgtagcagtgaaatctgggtctggccagtctgaaacataaactacaactttatcactgaccctgttttatacacactgacgtcttctctttggataatgaagttctatacagcaattctttgcatttacagagatgatggaataaagctttggtttgagttcctttcctcccctccctccctccctccctccctccctctctctctctctctctctctctctttctttctttctttctttctttctttctttctttctttctttctactgctaagaataaaaggtcaagattgttatttaggccgggcgtggtggcacacacctttaatcccagcactcgggaggcagaggcaggcagatttctgagttctaggacagcttggtctacagggtagttccaggacagccaggactacacagaggaaaccctgtctcaaaaaaccaaacaaaacaaaaaacaaaaacaaaaaaaagattgttatttagaggtttattatttactttagtgtatgaatattttgcccacatgtctacagaatgccatggaagtcagaggaagacttgtagttacagatggttgagccaccatggctcctgggatttaaactcagatccttagcaaaagcacccagtgctcttagccactgagccatcttcccagccccagaaggtcaatattttgaagaagctagcaatgtctggctttctctttctaacactctggagaccagggtgggaggaggcctaggcgtctgggatgtgtgtgtgcatgcatttgtgtactctcatgtgtttaaagaccaaactgtactgttagtaactctgtgggaattggttgcctaatagttgatggtgttttatttacagaggacatttcctcctctgtccttggggtgtctagaagccatgcacagtacttcagtggacaatgatggcagttttcagatcacagctgacaaagtgaagaacagcagtcaattcattactctctgcagtttaaaggaccttacattcggtcttaggggtacagatggggtcctctagagagaagctgacccatagtatttaggtttcatgtttaaccacaattcctaatattaagcagaaccacctagcactgaccctgagaccatcagcctgcctggctggctgtggaaatgattgtgcgacagcctcgtggtgaatggtggcgagcttagtactgaagcctgctgctcttgaggggctctagcttctctgcatgctttccactatagatacctttaagaagattcttctgagcaaaaatccaaacaagagtcactcactctagaacagaaaacctctgtggtgactctccgtgtgactccagcccgtcagagccactttcctgctttctgactaggaaacctaagattggctttgtatgatcccagactaaaatatattcttttcttctctggcacagaaacttgccttcatggtgtctctagggttggtaacacatgaccatctagaaggtaagaaaagattttcttagcatggtcttccttttagctttgttcctaaaagtgatgtttgttgaatttctagactagaaaattggaacacaataaagcatgattcaaccagtgtgagcaggatttcctatagaaaaagaattgccccgtccatgtaatgtgtgggcccttcccttcctgtatcattcatgctcctgtcctgattctgaatggaggtagctcctggtctttgtctcacaacagtggcaagtgttcctttgacaagtccttgtcgccgggcgtggtgacgcacgcctttaatcccagtgctcgggaggcagaggcaggtggatttctgagtttgaggccagcctggtctacaaagtgagttccaggacagccagggctatacagagaaaccctgtctcaaaaaatccaaaaaaaaaaaaaagacaagtccttgtctgtgtcctccaacatctcggcatcaggatcccaaggacaattagaaagctcaatgccctgactatttaattcaagagtggttggtaacctgtagatacagctcatgcagacctgtacacatagcagtctagaaataaataagaatggctatttaaagtgtggtccacggcaacactctcattcacagagcagcatgctggaggggtggcacggccttcctactgagaggcatgagtagtgtgcttgcttctgttaaggacatagcgaaacaaagcctttcccccattccttattggttgcaggaaagccagtatattacatagtgcacatctgttccttagcttcttcattcttatcttctaaccaaagccttttcttttctcaagaaatccaaagcaagaggcaggaaagaaagagaagaacaacagcaaacccggtgtacagtggggctgtctttgagccagaggtactccagccagcactggcccttcctcatgccctgacttcacttatggcttgttagtcccttcccctgaaagcctgctaaaagcccttctgtctgtactcagcctcttgagctctgtgaaatgataggcttctctgctcccagctccactgtgttttgtcaatcactgctcacctcgtaaggttttggagtttgagtagaaacagtcctgccttacagttttaattcatcctgatttgactttgctgttgtgaagcagaggcaagcctgtttggaatattctctcagagccaagtgcatacagtcaaactccttagtgctgagaccttgggatgattgtcctgactggctagcatgtgataggcatgtttgcagtgttcgtgataaccatgctattcaatagtcacctttccttcttaaatctccaaagcgtaagaagagtgcagtcacttaccttaacagcacaatgcatcctgggacgcggaagagaggtgagtgtcacctaaaaccatcctgccttgcttttgcctttgctttctgtgatgtgtttcttttccttcttcctccctcttttccattgtcctagaacctagctgctctatccatttaaaatagtttctgttgttttctgagaacatggaggaaaagagagatttcttcgccctctgaacacagggctaagctgacttttcgggtcctggctaagctggctcaggagaatggagtaatggactgtttctgccccaagcctaccaggccatccatgaatagctcagtgaacagaacattgtgtgaaaggaagtgtttggcatctttaagcacagcctagcagtgctgttgccaaggtgtttctcatactgtttcagtcctgttgcagtgagggtagaatggggctgcatttctgtgctctgtagactttccaggaagagaacttagaatcttttgtcagtgagcatctcgagctaaggaagaaaagcaagctgttaaaacagctcccccgtgcagaggctccaaacacactgttctcttcctccacaccttcctctaggcagaaccaacagcagcagctcttaccacacaggtctaaataggtctccatagctcaggcttagactcataaacaaggcactgaaatcactctctgatgttagtaatacatcccaaggtccctttctccatgtagcaatgtgtccctgagttacagttgcagactgcaaaggttgcagagtagttgactagcacgctgctctctgcttgcacacagactctcagagccattggagacttctcaggttaccctgacctttgccttgggcagtgacaggagtgattctttatcagtcctgtcctgcaagtgaccagcccatctagatggaaaccttacgttattgctctgtactggctcctgggtcatagtcataagttacttttttggttttgtgttcagctcttttcttagtgaccacacagttatctgataagagggctgaagccagcagcctcaattaattggtctgctgggagatagtatctgcttagagaacaacagttaaatcagccagaaaaatcgaggctaaggcctgcattcctgtgcttagcatgtgccttgtatgggtacgcagaggacttgttgttggctttttttcccttacagcacttggttctttggagaaagaccgggcaagtctctataactcagactctgtctgaccaacacgggcagtgctagtgtggtgtccgaccatcatggtacctatgcttgaccctgacagactgattgttgggaaaaccttcaccagtgcttgcagggaaatctggcctcactggcatttcctgacgttagtgtgctgggcttgtatatactgacaggttataactcacgggttagaagctattacccaactctcaggagacatggaccttgatttaggcgtatggtaagagtggctgccctagatgtcctgtgaccctgagctctgcttttttagactgtttgtaaattgcctttggggcggggggaccaccctgccctctccttaaacatgtagtccatgactgctggtgttgtgaagcagaggcagctctcagagcactgtaagggatccccagggcttggaagcctgtgaattcccttgacttccctgatactcttacactctagctgttcctagaaactccctcacagtggctctgacagcagagggccagagtaattggctggaactctgccttctcacattgtcttcctccaccctaccagcaggaaggtctgaactgttagcaaagagacacagaaaagcagaaatgctgagtaagtccattcagggagcagagagccatcagcactgatggctgcagaaacccctcggtgactaatgcagaatacacatagatgataaacactgttccagcttcagccacctcctgttagaaacctcaggtgtgataatccgggcatgaccatgatctacccaagatgggtctctttacagacgccagcacctttagctatgctccaagactcccttctcctcctttcttttaggattcatgtagtcgtttctaatgacattgacatctttgcttcttttctttcctctggcctgtgtattaaccttctgtctgctacctcacttccctttccatgctagccaatgaggaacactggccaaaggtatgtaagatcattttcccctgtctttccccccctcctccccttttgttcccttctcttggtatataggtcgtcctccaaaatacaatgcggtgctggggtttggagcccttaccccaacatcccccccatccagtcatcccgactcccctgaaaatgaaaagacagagaccacattcactttccctgcacctgttcagcctgtgtctttgcccagccccacctccacagacgtaagtaacttggggacatgtactctctctgagagctcacatgggaaagccattgtcctgtgctgtgtcctcaccaatctgacccttccttgctagccctggaatagcaggagacactgcagaatgcctgcataccttgccaggcagctttcttatggggtcacagctgttctatgtccttaagagtcatgttcacataaatcaggggagcccagggttcagagtctgggtttgatcaactgtgaatgagctctcagaggagcgtggggacaggggctgtagttgggtggtttctgtcattggtgtgctggagggagaatgtgaacagggcagatgcttccagcttcctcctgcacagtaggcgcacctccagaagggcacgaggacctgtcatggtggaactgctcagaaacagattccagggctctacatgctctgctgagcaagctcatgaggctgggacacaaggaacagctaagcactaccagcacccaggacttgtgttctgtaggaagagagagacaacaatggaacagatatgtaacctgtcaggcacagatgagcacagggaggagaaatggaacagaaggcataaggagcagtgcccagaaggcgaacacatccaccatgaagggagaggggacctctcagctgtgtgtgggaaagtgtgaccagagaggggataggcctgctcagacaaggcgtttattctaagtaccatgggagatcaccagaggactttagtaaagggatgaaataatattccaattatacatgattttttcactgtgatgactctggcacctgtagacatgctgcagtgcgatacagcacacagtatcaccggtagacaggctgcagtgcagtgcagcacacagtatcacctgtagacaggctgcagtgcagtgcagcacacagtatcacctgtagacaggctgcagtgcagtgcagcacactatcaccatgacaggctgcagtgcagtgcagcacactatcaccatttgctctgaccacttgttgctgcattttttttctttgtgtacttgcacccacctgcacatgcaaacacatgcatacactttttttttcctgtgaaaattaagaatcttcacctcagtgaggtgtggaggcacacacctttagtcccagaattcaggaggcagtgacaggcagatctctagtccagcctggtctacagagtgagttctagaatagggctacacagagaaaccctgtctcaaaaaataaaaaatgaaaatccaaaaacaaaaacaaaaaaggaatctttacctctaagaataacagtattctgttgtatagctaccatgtggttataatattgtgggaatttaacattgcttacatgtcagcgtgtaatactaagttcatattccaatgttcccacttaacccagtaattgcatttgtctgaggtcactcttggcatttattatcctggttgtgtcaccttactctcctttattctgaaatggtttcttaggcattcctttcttaaattacagtttgttcatttagagcgtgtatgtctgtgtgtacgtccttgccatggcacatgtgtagagatcaaagggcagcttttgggagtcagttctctcctcccactgtgtgggtctcaggaactgaactcggctgtcaggattagtgacaagtgtgtgcgagtgatgtcaccaggccctttgtgtctgtgtgtctgtccagtggtggcgtcctcttcactgcctcggttattctgctgagtttgccccactgcactgtgccagtccccttcagggtagactgaagcatagggttttgaatgagcctggagtcaggggtgacaggctcctcagtgtctcacagcaggaggtatgtgctgtcagcctcttgctaactttcatctcttgagatcatttccattgaatttttttcacttgagaaagtctgttttcactctggccggaggtggctttgagtctgccagactgtttcccagagacttagcctcctttgatggttcctgatgcttatagaactgtctggattctgaaaggaacactttgtagaaagagaccttgggaaggatggaatgaagcagggaagccaatagggaggtccgaacaagggatgatgacagctgactggtcctgatgcagtagatgcagggatggagaacagggaccagttctgtttgtagtttgaagagtctcttagattaaattgagtaatgaaaaaaaaaaaagaatcctcaaggataaatataaagttcatagcctgaacagccagaaggctgacagaacgtttacggaagatgacaagagggacaggcttgaagccataaagcaagagctgctttgtccatgtcctcatcccttaggaactgcagaacttcctgttaatgtcttagataaaacgatcctggcacaaccctctccatgagaatgccacttgaacccctaagttagagttctggaggcagcaaacaaaatattatctttgaagaaatggggtcacaggagagttctgctcccagcatttccttccttggacatatctcctgccaaattcaccctggttttgaagacttggcgttccttccatccttcctaacctttgccctcgtaactgatgcgggtttcacacaggaagctaacaagcaccaggagtccctccctgtcggaaaccatgtttgctatactgaagacttttccagcttttaccccggtccagggtggtcaaagaagtcagcaggtccctgacccctgtgcagtgctggggaggggctttgctctgagttactatttatgccatgttacccttgtcccttctctacaatctttggctgagttgagtttagtcttttttgtttttacaaactagacctacaaggtctgctccagtcaaatcacaaactaaaagcttttgccaagtttcatcttaaaacgtgaacattgttcttttcataaatctaaagtcaaagtatgcttttcttaaatcaccaaaaatgttcagcacttcccacgttaaagccaatcggatacattttttttttttaagataattgacttcctacttttacagtatcccaacagcagctgtgactaaagtcggcgcacaggtctctgagtgtgtgctgctggatagcataagcccgagcattaattaaacagtaacagttgagagccgagcacttcctggggatcaataaccatccagaagggcttgatagtgcagacccagccagacactgatcctcagacgccccttgtagctgccctcatttttatgagaagggaagatttgctgactaatgagaaatcctcagcacagtaaagccagacttggtgggatagcatgttctcagcaatgtcacagtcaggcactttttgctttttgtttgcttatgacctgtcaccagggttaggcctttctctttctccattcttgaggcaaagcctaccttgacagacgaaccgtcagtattttatactcattctgacattcttgaaattttgtttttaaagtgttaggatagagcaatactcaaaatgtggtcttgagtcactggcactttccaggggcatacaaaccaaaatcgtttccatagtagcactaatgcacccggcatcacttctacactctttctcaggactggagacacaacttcccatgtgagaccatggctatttagtgctgacatgtgttcttgggttgtattttattttcagtgtactgttgctataactttctgtgattctgtaactaactcagaggttgtcagtgattttgagtatacagaaatcccaacactcacaaatgctagacactgtagtcatagtatatgtaaatatgaaatttgaaggatggagctggagggatacgtgcacatgttcacttgcataaacatacaaaggggagtttcccacatgattgcctggatgattggaaagatgtgttccctcagtggtgtggtagaggaggagggactgggcatcactgtctggctgctcactctgtagtcctgtggtaggattctaacagaagctctagacaccctaaagcagtgtgccagcacggacttgctgggagtcctccagctcgtccttcagttccccttccctggcaccttaatccatgtgtcaatcctatccagagaacaggtcgcacatcaacttgatggtggaacacacctctataagagctcttgattttattttccctgtgtcttccaaattttaaatatttgtactttcttgtcgtttgctggtgcctcctgttctgaggcccaacgggttcccctgagcacctagtgaactgccacaaagggtgcagtagagtggactggagctgctttctctgtctagtgaaatattttatgggaagaatgaagccttccaggggatgtgagcagcaaatgccaagtaccggttctgcagagtgttgccaactgtggctgtggctccttcagtttcgtgttagaagtgtgtatcagatctctttgctcctgacttgggctttcccatttgaacattcacttgaggaatatttccctaagtgagtaagaagttcagtaaatcattatttcttgcctgtatttccaagttcttgttaaactccttctaaaatgatagataataaacctgctcctgttagtgtgagaatctgtggtcagtggatcagtgcctgacaggatctggtgttggaaatgccaactgttacctaagcagttgattttggcccagacaagtgaagatctttgctggaaactctaatttataaggttaaatttttgctctaagtctgaagacataaaagaaggccttaattctgaattgccaccctagaaattgagctttgtggaacaggtgggctttgtgccattgaaatctcctgctttccataacactaaaattggaggcccatctctgagccatcagctcacgttcaaaaacacttatgtgcagccacggtgcaaaaggtaacattgaattttcaccatctttatcattttcttaccttttctctctatctcatagggtgatatccatgaggatttttgcagtgtttgcagaaaaagtggccagttgctgatgtgtgacacgtgttcccgtgtgtatcatctggactgcttagagccgcccctgaaaacaattcccaagggcatgtggatctgtcccagatgtcaggaccaggtactggggtggatcacctggatgagggaccaaagaaaagaaagaatgacatggaaactcctgtccttcccatcctggaataggtttcccttctctcttggttctcctcctggttcatgaaacagcatgcaggcacacagcataacctttgctcctcacaggcttcctgatgcatgaattgctttcttctttggaaatgacttgtcttccctttccaagtacagaccctcagcccgtgtggtggcaaaagcctataatcccagcacttaaagggctgagccaagagcttaacaaattcaaggccagtctgagctacatagtgagatgtacacgctcactatgagaaaacaaaagagaagataaattaagatccttaaaagcttgttctaggctgggtctggttgtgcatgcctttagtcccagaaattggaaggctgagtgagactggtggatctatctgggtttaaggccagcctggtctacataatgagttccagtcaaacagggctacaaagtgagattttaaaaaacaaaaacaaaaatcagaaaaacaacaacaacaaaagaacaacaacaaaactaaactaaataaagaaaacctgatttaagatcattttttaaacttttccctttctgttgtttgcaacactgggacccaaaccagagcattgtgcatgctgcttaagcatttagggccttgtgaatgctacttatgtgctctaccattgagctgcatcttaagtccatggtgtgttgaaataagatctctctctgtagcccaggctggcattgaacatgggatctcctgccttggcttcctggcctacaggtatgaccacacctgacttagtcctcatccgtccactctagtgtagtcagagtgccttctcctgctcctctctcacatggtcccctgacaggcgcctacacgggagtgggagagtagaggggactatttagaactatgtttaacatcctttgggtgttttggggggacataacaaagctaaatttgaagcagataacttgtcagatcaaaggcaaaattgcctaaggtgactgccgtcatgctggtgtccttgtgcttctggttctagcggtagagagtggttggggtgtgcatctttcgtttgcttggttgaatggatgttttggttttgtcttagctttgagacacagtctcactgtgtagccctggctgacctggaactctctgtgtagatcaggctgccctcagactcatagagctccacctgcatttgccgtccaccacacctagctcatgtggccttctttaatttttatttttatgtgttcattttatgtgtatctgtgtgtaatcagcttgtgtatctgtgcatgcctggtgtcctgtgccttcagaggttgttgatatctgggactggaggtgccgacagctgtaagctaccatgtcagtgctgggatttaaacctggtgcgtctggaagagtagctagtgcccttaactcctgcgccatctctccagccctcacatcgctctgatgcaggaatgctcccaagtctctgcctttctctacagtcagggatttgtagtgatgcttctacaagcttccttggatcttgtctacagccacagacactggtgtttggtgttatcttgggtctcaagggaaaattcttaacttcttttcagatgctaaagaaggaagaagcaattccttggcctggaaccttagccattgttcattcctacatcgcctacaaagcaggtaagatctgcctacaaagcaggtggcaggggaggtggggtggaggtatggggggagtcactggagggcttccaaaaaagaaaaataaaaatgttttattgaataaagtagaaagtttgtgatccaccttttgaggagactgtgaagtgtggcaccccctataaagcctggctcaagccaccaaggccagcatatccagtaggaaaagcccatggagtcaggttctgggtcctgactatatgacagcagacactttcagggctggtatctttggtgaacaaagccaggcaggcttttctaaagaattgatggtttaaatgttacttttttccccagcaaaagaagaggagaaacagaagctacttaagtggagttcagatttaaaacaggagcgggaacaactggagcagaaggtcaaagagctcagcagttctataagtgtaagccacttctccttctagatacccagtacctccagtctctcctcgtatgaatgtgatcgatttggcagctgcacgtctgccttcagaattaccgtgcagcactcatgtgctatggccatgtgccacctgcacaggctctgagtgccctgtggctgctgtctgagtgggttgtcagtctgctggggaagagatgggataccagttgcaccattgtagcacctcccagtgcctgcacattttgagaggaatgcccacttgaccttgagcaaccgaagtccccttgagtgactcttttagatacctgattttctaggttaagggaaagagttccagctggcaaccagcctagaaggcctggttcactgactggagtctttgacattgggctatctcacccccactcatgcactgcttctaagttatgagtgactaaatgatcctccacagacctcaagtcaggccctgtatccctcactggctctgtttgtttgcttgcttgtttgtgtttgtttttgtttttggatttggtatggtttggtttctcaagacaagatttctctgtgtaacagccctgactatcctggaactcactctgtagaccaggctggccttgaattcacagagatccagctgcctctgcctcccaagtgctggacttaaaggcatgcgccaccatgcctactgtcactagcttttaaatcacgtgtgagcagagcatggcagttgcaagctttaggacagctttcatggcgactttcatgtgtccagtagagttggcttttaccctaccatcggccccatctcttgcctcctgtatcttcctccttcggtagtgtctccccacaccaggcagaacagcacaagttatagaggctgtgtgccagggctcagggactgggttgtgggggcatctttctctggggctgctgagcacccacccttatcgtttgctgcagaaatgtatggagatgaagagcagcatcctggcgcggcagaaggagatgcgcagctccctggacaaggtgaagcggctcatccgccttgtgcatggcgtcgacctctgcagacctgtggactcagaggccacggcgggggccctctccaatggcccagactgcactccccctgccaacgccgcctccacacccgccccttccccctcctcgcagagctgcacagcgaactgtaaccagggggaagagactaaataacagagccctcgaggcggacatgccacagtcctggtggcgaggagacgctagaagagcaaagccggatttcttctggaaagtacagagttcttttggttctttggttccagagagagagaagatgcttgtgccaggtggcacccgagtttgccaattgattcttgttattctgtgtgtacatgcaaagactggaccatgttacatgaaatagtgccagctggaggttctttgccagcaccatgccaagtgacataatatattactctctctattatacaccagtgtgtgcctgcagcagcctccacagccacggtgggttcgtttttgttttgttgggtggggagcagggacgggcggagggaggagagcaggtttcagatccttactgggagccgtttgtttaggtagaaagacaagtccaaagagtgtgtgggctttcctgttcctaaacttttcactaccataaaaccaaaaaacgaaaaaaaaagaaaaaaagataaaaaaggaaatagagatttaactaacccagtgcccagaagagggacgggaagggctgggagggggcaagggtgggaaagtatatgacataagcagtatttaacgttcctggaggggccgaagtgcaagaggagagccccgcccctccctagctcgccccgcccacagcctccagcagcccctcccctctgcttggtgtagtgcagagcccgggtggttctaggccttgttaagcagggaagggagggtgcgaggggtccggagggagaaaggcggatcagaggtttacttgaaaacaagctccatcccttttctatatttataagaagagaaggttctaagcagagcagcacgacccaggtgtgtgtgaatggagacaacccttttctcttcttcaagtttattttgtttctgttcttgttttgtttaaacaaagttttgttttgttgtttatttttcctttctttctttctttctttctttctttctttctttctttctttctttctttctttctttctttctttttaacaagaactaaaataagaaatagaaaagctgttttttcaggctgacggtcctgttgagggtagcggagaccttgcatgatagagtaggcgtcatagtgtcaagtgaggtcggtgagtctgtgtgcgtcctgtgtcatcagtcaggcactgttctggtttgtttgttttgttttttactttctggttttgttttctggttttgttttttgttttttcatgcaagggcaaaaaaaaaaatctttgtacctggggaaaacaactttttttttattaaaaaggaaaataaaagatattgaggtcttcctagtgttacttaaattaagatcaaggtaagaaacattgtaaaaattacaaaagtgctatttgtttcctaaaaacagtgatttttattaaaaaggtgtcagaactggagaaaacgctgtgtagtgacagttttttagcacagagcctactgatcctgatgacattttactgtgttgtatctctagactggtgtgccagtttcctgcagggccgggtccgccccctcctcgctcctccctactcagacttgctgtctccttggtacagggatctcatctcctgtttgaagccaaaatggaatgtgcatagtgtcagggcgttcccacggtctcagaccttgctagaacgcaggctggtgcccacctagcccttcccttggtgctgctctgtcttacagccaccagcattacttatgcctcgggggccccttgggggactgaccagtgaggctcctcactgcctgtatacttggcctccaggagggtataggatgcaggctggctgcatcagggaggaaatgctttgagagtccgtatgtctctaagagcccaggtagccttcaagtccatcttgcgttaaagagagaaatctgaagctctagggggtctctgcctgcccgccccaaggtcagagttcactcccattccactcactcacatgcttcctgggtgttcctgggctagaatcactatgcttgccttgtgtggcctagtgtagacttttcttcttggaaaaatggggttctgaaaggctctctactcatctccccgacaataccatagggaacataactctacgagacgcatgctcccagtggaaatctttatctgatccatgtccttgagtgaagggacagagacctaggctctacccccaggtctgaaagcagcatctctctgagcccgccaggctcccaagtctaggagtagcaggaaagacccctttgcttcttccttgcccagttaggtccatggaaaatgagctggatcctgactgaaactacagcagacaagaggtgcttgtgagagtgagccaggcccatccacaccagccacccattcacttcccagcgtttgagaagagggcaggtagtctggccacacaggcctcagcttcaggcctctggcttcaggttgactgaggggagcagagaaaagccctcttttcttatttaggaactaaggtgctgtctagttagcgggcgttggagatgcctggactagttggatctttggcagaggatcagagaccagctgcaggctgatatcctgtctcagctcccccaacctgccaaccccctgttggacttgtctgggcccataggctggggcttggcacatactacctacctgtgatgggaagaggttgacaagccatcaacaatcactacaggcctttgctccagaagagctgctggtggcagcacgagacccgagcagcatagactcccatcttctgatgtttggaaatgagttgctttgagtcaactggagtgaagtaaaaaaatgtagccctgctccaagcctccactgtgggtcctgccccttccgtctacttgcccttacctctgtcagcacaaagctcttctctgtccctttagacctgtgcgtacctgggaccacctgggacatacacacacactgccccttcagagccgcttccaagctcccatcctccctcccctacctgcgtgtgttgctcttgtagccacatgtgtaaggctcgctagcatggcagtcactttggagggccttggactgggagtccccttgtccccagggtcaggctggcaggtgtaggccatagaggtcagcaccatcgccttcctcccctaaagggtcctctctctttctgagccactgtcttgtctgcctccgctgagcttaaccagttctcgttttttcccttgcttgtctggctttgggaggtaaggctgctgatgacgtccttcaagaaagtctcagaagcagtccccgatggctttacctgagtagggcctgcctctataggcagtaacagccacaggcagcctccagctggcccccatcttagtgactggcatcctcttaggggcacctctcctgctgctgcttcttgtctcatgcccatcaggcagtggtaaggtacatgtgtacccagcactgcccaagcgactgtgtctccagctgtctgtctacacctacagctgcctctctgccgcctctctgatgcttcctcttggggcttgacttcttgactctccctaccagccccctccctccagctcacaacctttaaatggtctcttccctttaggccctcctttggtatggaccttacctaactaaagggctgaactcttgaggacattcctcccaggggcaggagtaggacggaccagttggtccttctctggacactgggttctccagaccccatggcttctgttgaatgcaggctactttgctctgtgtaaatgattgtggaccttgtcccaccccacatcccagcacccctggcagaaaacaggagtatcacttctcatcctacctttagccggtgctcctggtcagctcctccccgagaaggaattgggtgacccctagggaagattccactggtcctccccagggaatgaagagtcccacctggcagccttggcccctgcacccctctccagtgttcttgctcttagcccagggtgagttgcagtcaggtgggtgggctgagcagaccagaagtcagcaagctccaccacgcatacagccagccagacccagtcctgtctgtgtccatgccctttgtgatttcagtcttggtagaatttgtatttggagttttgtgcttcaaagtttctgtttcatttgttcggtttttgtttcgagggggtggggggtacagagcagccgatcaatttgtatttatttattttaacattttactaaataaagccaaatgaagcctctcggcctcttggtgttgcgtttggggctgggctgggaaagtgtgcacaggaatccccacctccagcctgtggccctcgaggggtcagacagtcctggaactctggctggagtctcctcccgccagatgatgcccggtgacgccctcagaccctaaagagcctgtgcttccccagccagagcacagaagtaaaacaaaaaaacaaaaacgtgcgttttaaaacttcattgtggggctagactttattgaaatgtcgcgggagaaatggggacctgggttggtccccagcacatacaaggtggttcatgaccacctgtgattccacttccaggggatctaaagccgtcttgccacatacatacagacaaaacactcacacataagataaaaaaaattgaaaaattttattatataagagaattagactagccccaaaccagctgaggcaaaggagggctggatcccagtgtggatcagcagaaggaaccaggaaccccacaaatgctccactctgccccttctgacaaaaattttaaataacttaaatagcagtaagggtggacaccctggtcagcctctacagggaatgtgtaagccatagctagggcagcggggtaagctcaggcccgacttcgggcctgctgcagggcagtgaggtatttcagggctgcagacccatagcgccttgacaagtcctggtggaactcttccttgagggcctggagacagttgcggtaggtggggctggagcggaagcgggagatgtcaagacttggagcgtggggcaagtggatagagaaggcctcaggaagtaccaggaattcatattcctgtaagaatgaggacagaagccagagctgaagtggggagacacaagtagtgctgaactggaagcttgtgccataacccactaggaaggaaggggcagatcacagccagggcattaaggtgccctccttacctgagcatccaactctatgatgtgggccaccttgttccagccaaatcccacaaagcgaggatcataacgggggcagtcacggggtaccaccacgtagggttcatagtcagctgaccactgcacactgtatggtgcctgggcttcccgccagcgggaatagtctgtggatgagtgaccctgtggccactcgtggtacctgtgtaacagaagcaggtgcgagcagggagtaggagtttgtgagctcagggtgccccagcatgggaacaacagggcagaacctggcccctcttacctaaaggtgtgaagggagccggcatccagtaacgtcaacagctctgccttagagtttgggaagctgaaccggtagtgtagggtctcaaatgcaggcaccaccaaagcagtcttgcgccgactgtccagctccagctgctcgatagaagccctggggagaggcatgtgggcactcagcccaggggccttatccctgctgagccgtagccttgccacatggaaaccactgcttgaaacaggacattacctccatggctcagtagcagcccaaagaaaaagcctaagatgagctccattttgtggaaaccactgagccccagaaagaaacagggacacagcaacctagggttcccaaaatatcctgaccgtcacagcgtatacccccatcctccaggcccacctgaggtagtcgtagagggagtaggcaggtaagaagtcaatatcactgaggaagacgtagggtgtgagagcctgggccaaggccacgttgcggagctggttgactggatagagtggaccgtcccggtacactacatggtaggccacatccttcctcatagagagcactggcgacgtttccacaaaatgaagaaattgttgagcctcttcatctgtcaggtacaaggccaggctcatggggcctggccagtgcctgcacagggcttccagcatctgcagcctgaggtgaggtgggtcgtcagccctacgtggccatgtgtgcacagaagcccagggatggctggaactcttccccagagttagctgctgaaaggctccctcctgtgactaagcaccttacaagcacacagagctggtcttttttctaatcctcacaactacccctaggtgggtgcatctacatttgacaaccgagcaaactagaagcctgaaatactgaagcttattcatggttccccaacactgaacaagggcagttctaggcatcagagagacttcaaagcccaagctttccccactatatccaatgtctccgacttctgggaccctcccaggaaccagcaactcactaccatattctctcaaatcctcagtctcagcctatgcagtgctacccgaggctaccctccacatcctcaccggtccatagagagttgggccaccaaggtgacatcgtgaggctggggaggtggcggctggtggggcaggaaggtgatgtgcacccggtgcacagtgagctgctgttggcggaactcaaagcagggctcttcctcatccagctgtgttagggcctgttgcaactgagcagggttccaggaacgaaagaacaacatgtccttcagtacagaggggcaagaccttccaaaggcaagccagcatggccccatctcacctgctcggccccaggagggaactggttggggcatccaaagagctctcttcgcagtagcttcccatcataccccagaaaggtcaagtgcagattacggaagaattctgcgtgcttgttcttcactcgaagcttctttggtgaattccagtggatcacctggacattgcagaggtatcagcaacagtcaggtcagtgtgccttgtgcccctgctccgtgctccgcccctccctcgtgccccgccccgcctcctcccactccgtcctgctgactttgaggtcagctgcttccaggtagcagcgctcagcccgagtgtggtctgacagctgcacgttccagacacagggcagggggtgcaccagatgggggtgctccttgatgaccgcattgaagatgtcctaggcagtaacggcaacagctttgcgttagagttcacatctcagtccccagcctgcccctcagttctgttcccgcagatcccccatacctggtcagccaaggaagtagccatcagagtgagcagctctcgtttggctgtcaccttccacatctgctcccagccagtttgctggagcctgtccagccacagcaggatcacacctgccagcagggagagaggttgccatgcccaccgggacatccggatctatcccgagtcttttgaatgtactttttgtagtatggggcgggggtggggggtggggggtggttgtgtgtgtgtgggggagagcccggaccctcttacattcaagatagcctaccactgaactatacccgccagctgctttttaaattttattttgaagaactaaagagatagatacatgattaagtacacttgttgctcttgcagaggatccaggttcgagccctggaacccacatggtgactcacagcccttgtaactcatttcagaggattcggtgccctctctgatctccattggttgtaggcatgaatgcagtgcacatacatacatgcagactaaactttcatacacataaatctttttttaaaatattattttgaaataggacctcactaagtctctttgactggcctcagccccccaagacgcagcaccacaccaggctgcaaggtctgaattgcacaggcggtcacctaacagtgctttggtcaacactataaagcatacactgcagatggtacatgattaaatgaaataaaaagtcaccagctagcgctggggtagctcagtcgtagtgcgtgtctgtcatgcataaagccctggcttatggcccccgcttggcattaaccagagagcatatacctggagtcccagccctggggagacagaggcaggaggatcagaagttcaaggccatcctcgggtacatagttaagttcaaagacagactggatgcatgagtccttgtcaaaccgaccaaccaacctacttctacctggtacgtttcctccatgccttttccagtttcagctatacagacatttgccattgaactacagctgcctggctgtcagtaggcactcaacccagtaacatgctgggtgttcccaggccacaccacagcctggagaagagtaggctagcccatctgggtatgtgtaaacacaccctctggtgtgtgcacagcaacaaaattgcctaatggcaaatccctcagaatacgtccaaactggtaacacgggactatattttctgatggttcagatgcaattgtccataattcccttgggtacagaggagctgtatatactcctcagctcacagaaacctccccacgtcagggttatctcaactcttcccattatgtggatgggaaaacagagtctcaaagggaacaaagagctggcaccaccatttggtacaaacacaaaagttaggtgagttctctttacccacggtctggtccaaagcactggcagagctcttttgggagggcttcctagcattctgtgcccaccccacccctgaggcccacagcccacccaatcctgcctccctcaccactgtcccacctgtgttaaatcccctgcccaaggcaggccagggcctatggttcttccagaggttgcccaggtaccagtcgctctggttctccacgagaccgaccacctgcttgtctgggaggggagggtggaagggagctgcctggggatgtgggctctgggcttatccagagcagtggcctggggaagctggggaaggggcaggctagggcaaggttgcaggtgtctcaccagaaaaatgatcaaagagtgcccagagctccacaatgtcagaggagaaagtgacgtcggtatccaggacgatgactcgggccaggctgggaggcaggatgctgggaagtactagcttcattagcccatagaggccagagtagtgtttgttggggatccaggagaccaggggctgtccggagggggcgggggtagagataacatagcaagtggcacagcaggacgtagccatcgccccccccccccaaaggatgaaagatttcagctccaggaggtctagtaggacagagtttttcctctcccaccacccactgctgaaaggaagaagaaggtgggcctagctgagcacgagcgcagagttcttcctgccttgagttcttccgcatcatagaagctgaccaccaccgctggcaccatccatgttcggaagagtgtctccaggatgtttctggctacggcatcagttatcaggtggaggtgcagcggatttttccttttgggtggagaaagttagcctaacatggctgtgcgggaacaatacaggattctccccacgggaggaagccctgtctgctacaaggagctcttgggaatgttctggtggcccccttcataagaaaggaaactcagaacagtggggctttgttacgggcaggtttttgaccctcatccaggcctgtctgtacctgtagaatagcagggacttcgttagggtaataatctctcggctggagttgtatcccgcacacacgatagccacatgcaacatctggggaggggacacctaggtcagcagcggccctcaacttctactagctagcttagccatcctggtctagaacagtgtagccccacctggcatccgagcggaggtggggatggggagaaggggtgcctagatgcaacgcctcaatttcataagtgaggaattagaacaggagtggggggcgtgcgttgcaagcgtcctctggtatcccagctgggtagctacatgtcaggtgctgtggttcccacaaatgcccagatggttggactggccaggaacctcggggatggcagcacttggcacaactacctcgcacttgggtggcagtagaagctgcgggctggaggcggagaggttgcgactcctgtacgggtcttcatcgagggtagcagttgtgcccagtccatctgaaaagacacgtggcgtgagcaggcagcggtcacacagggtcccttcttcccctgcccagctccggcgcttacaatccgggtcccggccgaacaggaagaagccaaccactagcaacagcagcagcagcagcacggcggcccccattgcccgggggcgacctcggggcagcatgactgtgggactcagggcggggcgcgaccccgggctgcgggctccatcaccgaccctgcggaccaaggaccatagcaagatgagcactggaccgcggggcccgacggctactcgccctgctgtgcgcagcagctggcctcacctgctccagtggctccgggaaggccctgttcctcctgcgaccgccctgcagtcaggtcccggtcagaatcgcgaactagccccgcccccaacctgggctcaggtttcacctttgcttagctgagctggaaggggcggggagacccccggcagggccccgcccctgcaccgcacggtctgggaaccttcaaccccttttagggtggttttgcaccatggcacggggagggctaaaggccttggggacggctacccagggtggtcctgtgcccactacctgcaccctcctggctctgggactccattcctaaggggaggaacggatgactctcaaagaattggcaaacacaccgcggaagtttaggaagctgagggtagtggggatgggataggaatgtccggcccagaggttagggacacctgctcagttcgacgacaggaggctgggcctgctggggccacctgtagcctgcaggcgtcctccctggcccttagccctacccagaagcagactggaagatgcgggcactgtgcccttttgaaggccacctcccctcctgctggccaagagcctccttgccgctggggcagggccaggcatcccccactcttgtctagaaagctgtgattgtgccgggctccaaggcctggatttcttcctcccttttctctccacccttcagcgggcctccggcacgccttttgccctgtaggggtgcagggagctctggactgtgaaggagacccgccacggtcggttcagcacagactgaatgccaagccctgagctaagtgtttgccaagtctttactcaggtaatcctcacatcacccgaaggacacaagatgag

SEQ ID NO: 306 - DNA, 3308 bp, Mus musculus
aggggactggagagctgaaggagcgccagcttctccagaattggacttctcagaacctttaatatgctaatgtgcattgtgaatctccaagatggggatatgatatgcagcattcttgaatacttctaatgacagggagcccactacctcataagctgcagcaacaagaggagcttgtaattttaaacggaggctgaagacactgtagaattagcagacataagagagcgtggagaaggcagaggatggagttgcagactctacaggaggctcttaaagtggaaattcaggttcaccagaaactggttgcccaaatgaagcaggatccacagatattttttctttccaatcagaatgctgacttaaagaaacagcttcatgaactccaagccaaaatcacagctttgagtgagaagcaggcagttgactgtgtcaagaatgaaggtaaatatttccttcctaacaactggctgtcagaagctcatcgcaagcttcatatgttctatgagaagcacatggtcaccgaagtagctgctgagggtctgtgtgaagactggaagcagcgctatgtgaagactgtaactacagcttctatgattaccacaaagacactacctctcgtcttgaaagcagcaactgcgaccatgcctgcctctgttgtgggccagagacctaccattgctatggtgaccgccatcaacagccagaaggctgtgctcagcactgatgtgcagaacacaccagtcaacctccagacgtctagtaaggtcactgggcctggggcagaggctgtccaaattgtggcaaaaaacacagtcactctggttcgacccaagcctgtggcccagaataacattcctatcgctccagcgcctcctcccatgcttgcagctcctcagcttatccagaggcctgtcatgctgaccaagtttacacccacaaccctccccacatcccagaattccatccaccctgtccgtgttgtcaatggacagactgcaaccatagccaaaacgttccccatggcccagctcaccagcattgtcatagctactccagggaccagactccctggacctcagactgtacagcttagcaaaccaagcctggagaaacagacagttaaatcccacccagaagcagaggaaaaacaagcagagagccgtaccgttaccccacctgctgcaccaaaaccaaaacgagaagagaaccctcagggtgatatccatgaggatttttgcagtgtttgcagaaaaagtggccagttgctgatgtgtgacacgtgttcccgtgtgtatcatctggactgcttagagccgcccctgaaaacaattcccaagggcatgtggatctgtcccagatgtcaggaccagccacagacactggtgtttggtgttatcttgggtctcaagggaaaattcttaacttcttttcagatgctaaagaaggaagaagcaattccttggcctggaaccttagccattgttcattcctacatcgcctacaaagcagcaaaagaagaggagaaacagaagctacttaagtggagttcagatttaaaacaggagcgggaacaactggagcagaaggtcaaagagctcagcagttctataagtaaatgtatggagatgaagagcagcatcctggcgcggcagaaggagatgcgcagctccctggacaaggtgaagcggctcatccgccttgtgcatggcgtcgacctctgcagacctgtggactcagaggccacggcgggggccctctccaatggcccagactgcactccccctgccaacgccgcctccacacccgccccttccccctcctcgcagagctgcacagcgaactgtaaccagggggaagagactaaataacagagccctcgaggcggacatgccacagtcctggtggcgaggagacgctagaagagcaaagccggatttcttctggaaagtacagagttcttttggttctttggttccagagagagagaagatgcttgtgccaggtggcacccgagtttgccaattgattcttgttattctgtgtgtacatgcaaagactggaccatgttacatgaaatagtgccagctggaggttctttgccagcaccatgccaagtgacataatatattactctctctattatacaccagtgtgtgcctgcagcagcctccacagccacggtgggttcgtttttgttttgttgggtggggagcagggacgggcggagggaggagagcaggtttcagatccttactgggagccgtttgtttaggtagaaagacaagtccaaagagtgtgtgggctttcctgttcctaaacttttcactaccataaaaccaaaaaacgaaaaaaaaagaaaaaaagataaaaaaggaaatagagatttaactaacccagtgcccagaagagggacgggaagggctgggagggggcaagggtgggaaagtatatgacataagcagtatttaacgttcctggaggggccgaagtgcaagaggagagccccgcccctccctagctcgccccgcccacagcctccagcagcccctcccctctgcttggtgtagtgcagagcccgggtggttctaggccttgttaagcagggaagggagggtgcgaggggtccggagggagaaaggcggatcagaggtttacttgaaaacaagctccatcccttttctatatttataagaagagaaggttctaagcagagcagcacgacccaggtgtgtgtgaatggagacaacccttttctcttcttcaagtttattttgtttctgttcttgttttgtttaaacaaagttttgttttgttgtttatttttcctttctttctttctttctttctttctttctttctttctttctttctttctttctttctttctttctttttaacaagaactaaaataagaaatagaaaagctgttttttcaggctgacggtcctgttgagggtagcggagaccttgcatgatagagtaggcgtcatagtgtcaagtgaggtcggtgagtctgtgtgcgtcctgtgtcatcagtcaggcactgttctggtttgtttgttttgttttttactttctggttttgttttctggttttgttttttgttttttcatgcaagggcaaaaaaaaaaatctttgtacctggggaaaacaactttttttttattaaaaaggaaaataaaagatattgaggtcttcctagtgttacttaaattaagatcaaggtaagaaacattgtaaaaattacaaaagtgctatttgtttcctaaaaacagtgatttttattaaaaaggtgtcagaactg

SEQ ID NO: 307 - protein, 557 aa, Mus musculus
RHCRISRHKRAWRRQRMELQTLQEALKVEIQVHQKLVAQMKQDPQIFFLSNQNADLKKQLHELQAKITALSEKQAVDCVKNEGKYFLPNNWLSEAHRKLHMFYEKHMVTEVAAEGLCEDWKQRYVKTVTTASMITTKTLPLVLKAATATMPASVVGQRPTIAMVTAINSQKAVLSTDVQNTPVNLQTSSKVTGPGAEAVQIVAKNTVTLVRPKPVAQNNIPIAPAPPPMLAAPQLIQRPVMLTKFTPTTLPTSQNSIHPVRVVNGQTATIAKTFPMAQLTSIVIATPGTRLPGPQTVQLSKPSLEKQTVKSHPEAEEKQAESRTVTPPAAPKPKREENPQGDIHEDFCSVCRKSGQLLMCDTCSRVYHLDCLEPPLKTIPKGMWICPRCQDQPQTLVFGVILGLKGKFLTSFQMLKKEEAIPWPGTLAIVHSYIAYKAAKEEEKQKLLKWSSDLKQEREQLEQKVKELSSSISKCMEMKSSILARQKEMRSSLDKVKRLIRLVHGVDLCRPVDSEATAGALSNGPDCTPPANAASTPAPSPSSQSCTANCNQGEETK

SEQ ID NO: 308 - DNA, 180227 bp, Homo sapiens
  misc_feature (1)...(180227): n = A,T,C or G
ctgtgggaggccgaggctggtgtatcacttgagctcaggagtttgataccagcacagggacaggcgtggtggctcgcgcctgtaatcccagcactttgggaggccgaggcgggtggatcacaaggtcaggagtttgagaccatcctggccaacatgatgaaaccctgtctctactaaaaatacaaaaattagctgggcgtggtggcacatgcctgtaatccccgctactcaggaggctgaggcaggagaatcgcttgaacacaggaatcagaggttgtagtgagccgagattgcgccactgcttccagcctggcgacagagcgagactccgtatttaaaaaaaaaaaaaaaaagagggagaccagcacgggcaacatggtgaaaccctgtttctacaaaaaatacaaaaattagccgagtgtggtggcatgtgcctgtagtcccagctattagggaggctgagttgggtggattgattaagcctggtaggtcgaggctgcgaggctgtgattgtgccatgccactgcactccagcctgggcaacaaagcgagacactgtctcaatcagtcaatcagttcagtagcttctaagatctataccaggcatttcatctattatttaattatacttagagaaaaacatttgagacaagagcctttataggattttaaataacttcttcttatggaaatttaaaaacatttataaaaatagagtgaataatataaccccacgtacctattccctaactaacaattaccagcattttgccaatctttatttatagtgtgtaaaacataacaggaaagtaactttgtgttttcaaaacatgcactacagttagatacattggtatactcaaaggaaaaatgtgtatgagaatgttcttttcatacattgttagtttaatactggtaatcccttttaggataatattttcatttgtcttttaacttactgaagatgtctgagccaccactaacttagtgaagaacgatgcctgctggacagattttagcttttcttactcctgcttttagaagttctgagattattagttttgagcttgtgttcttaggagttgcattttattttatgtacactttcctatctgtgatggttgtatggaccaccatttcttagcataagcaggacaatatataagtcagcttaaagttgcaggtcacaagtcttgttccgcacttccttcttgtgcatattctatttctatttaacccaaatgtgtgtattggttaaggaatgcttgtttcacttataaaatggtttgtcaaggagggacttttgactacctgctatctttagacgtggtaacagtggttagaaacttgctatgtgctcccttgtttgctcttctttgcactgtaagttgtacatatgtctgcagttgtggggcgtgttcattaggagtcactacaaggtaatggtagacttatttctgaatttatttggttgcattagtttaaattagacccacaggtgtaattattccatctcaatgcatggggaagcatagtcagtgaaagttgtgcatgtaaacccctgtgcattgaaaatgtgtctttaatgttatgatgttatttggcatctatcatttagtgcaaggagtatacttacttaacaggacctttaataagttccctctacaccaaagatatatattttaaaaattatacttaagaagactttgtggtattccccagaagagttcgcctatagcagcaaaacctttctaaaataaaacttattcttttaaccggtattcatttaagtgggtttctctctacttggtttccatggaaatagcaaatagctaacgttatttataaggtggaagtaaaatagggtgcctaatgggaccccatgctgctctgatgaagagacttaggaaaaaagtccatgctcatgggatttttttttttttaaacaaggttaatggaagccctgatttcagtcttctgtaacataacatatttttggtcttaaaggctagcattaatatcaagcaaacaacttctttttgaggtctgtattgctttcactttcaagttttaggactacttacttatcagcgtgattgaggcatgtttcagactcctgtttctttgtggtttttgtttcaaaagttaaaattcccagtgtattgtagctgtttccacttctcattgacatttcaaagtactgataaaaagataaatgttcattaaggatagcagtggtgagaaaggatcaatatgttggactacaaagattttttaaaaaatgtaaattgtatggaaccatttttagtttttaggcctaaagtcagggttcttttttatttgtgttgtggagctaaacctgtatagtcagagagaagagattctaattttctttcaggctggaaacagggaaaatcttaatttctctttcctttttaaaaaatggattgttgccaaaaccttttaactgaaataaatgttaattcttttagtgcttgaaatgtggatttggaataaagcttggcttttttctcacttcttcggtaaggcctactctgagttttctaggcctgcagcaaagccttgcattttttaagccccttcaagtgaaagagtatcattccctttgtgtttgtgtttgtgtttagggtgtgtgtgtgtgtgtgtgtgtgtgtgtgtgtgtgtgtgtgtgtgtgtctaatttttctatagcctgaaaggcacctgctcattttccagcctagtgagtacagcagtgctatattgagaagtgaggcaggatggaacacaataaggtgctataatttttatttagttagttttgctcatcctcggcagcttgtgatcactgtccatttatctggaagtactctgattattcttggctatcgatgcagcaggagttttcttctgtgtttaaagcaaggactgtagtatactgagggctccatcagggaggagttgagttttgttttgtgtgcatgtgtttctctggataagcttctggctatagttgggtttactgtgctttaattttttaaaatttggttgttttaatcttgttgaatttatttttgtgtgagatatttttctctagcaattcactaatttcttctgtgtatgttgatgctattttataaaattttcttaatgtgttgttcttttagtttaacttcttcttgtttatttttaaaatctggtatctagcattgacctttcttagtgacttttatttgaattatcttgtgctttagagacataggaatttgggtctattatcccatttctgagcgaacaactcccagtagttacagttagtgcaatagaaagggttctcacagatgcagtgctgggcgttgatcctcctccttggtgcttatggtttacacccagaactcccattagtgttaataggaggcacttccttaaatccctgtacaccaaaataagctcaaactcttttataatgccttatagatacctgagttgtttttttgttgttaatgacaagagttttagtcctgaggttaactgattattaagatagagtttgagttgtcttgggataaggagtgatttactaagtctgatctataattaagaagttttcgttatgatcattagactcagaaaacagcttcgtgagagctatggaagcttgtgaataaggatttttgtactttatagagtgaggaagcaagatttcttctttctatttatttctgctatttcttctcaaccataaaaaatggttctaacagtttttgtttatattgtaagaagacttagaaaaattgttttgttttttattctacttaaaagccttcctgtaattaccctctggcctcaaagtcttttattagctagtgtggctcacatttttcaagcatatagaagttaatatgcactgttttagaacttagacactacaaccactggtcaagtaatagataatcagtgtttactacacccatctgtgaattgtggatttttattacttccatttatttatgtacagtctaaatctttgtagattttagctagtcatctggacttcttggacctctgttcctccatgaaatgaaggtatggatctgccctctgaggtgtccattctagttttaggctgtttgaaggcctactttcctaggtactgaaggaaatagagtactgtaaggcaggcagtggtttctaatcctggctccctattagaatcttttgggggaacttaaatacagatctatgggttctaaataagacataatatattcaatatctttaagggtagggcctgtgaacctgtattttttgaagttttatgtgttatcctgatctaggattgagaactacttgtacaaggtattctattcttttgtgtatgtgtgtgtgtgtgttctagttagggagatgtcatataggtcagattaaaatgtgaggcagtgtgtggttaaacttgaaaatgaatgagaaagaggataaacactttaggagtttaaacaaaggaagaattgggaattaggatggtttgagcagatctctgttaatcagtgagtctttatctggaccctagtgtgtgggtgagatttggatagttagagagagggtaaaaaggtattattcttgttataaggaagagcataagtaaaagttggggagcggaacaattctgattatagttttagtctttattttagtattcttttgctcctgaaactgctgtagatttcctcaataatttgagggagtgagccatgaagatatttggaggaaaagagtgttccagagccccaagaagggaacttgcctggagggtctgaagtacggaaaagaggccagtgttgctggaacggattgagcgatagggagatgggacggcttcgagtggcagaggcccaaatcactcagtgcctgtgggccattgaaaggaacttcatcttttctcggagtatgatgggaagccactggagggttttgagcagaggagtaacaagatctgtcttggattttgaaaagcttactctggcttgcgagagaatataccttagcggggctagggtagaattggggaggccagttaggaggctgttgcaattatctaggtgaaaggtgaaggtgacttggaccagggaggtggtaggagagttgaggcaagggggtcatggtggatatattttgaaggtagaggcacatggttggctgtcggagtagatgtggagtgtggtaaaagaagagtcttaagatgacttttaggattttttcttctgagggggtggagttaccatttactgagatgggaatgactctgaggaggaagttaggggagaggtagtcaggagtttagttttggatgtgttgagcttgagatacctatttgaccagtgttgagtgggcagttgggtatatgagtttggaattcaggggaaggatatgtgctagagataaacattgggaattgccagtgtgtagatccttctatagccatgagactgtgtgagatcacctaaggggaagagttccaagaactgagtcctgggacagttccacattttaaggtgttggaggcaaggaggaaccagcaaaagaaaccaaggagagtagccagagagttgggaaagaaaatcaagagaggatggtctcctggaagtcaagagaaaaaaaattttgaggaggaagaaatgagcagtgggtcaaaagatactggtcaaggaagtgaagactattttctgttggatttaacaactgttaaatcattggtgatcttcacaagaatggagggaggcaaaggccctaatgggttgtgttcaatagagattgggaggagaggaattagagggagtatggttacctctttcagggagttttgctataaacgtgagcctagacggggacaataactagagaaggatatggagtcaagagggtttttttttttaattattattttttaagatagaaggaacaaaatgatccagtaatgatgaggggaaaattgatgctccatgagagtaaaaggaaaagagctagaggaatgtccaggagagggtaagagaggtgggtacaagagggatggttattaagatgttggggccccaaggactaagcctatcaagcgggattctgctttttcttctaaccacttatctgcatttaaatttatttcaaacttacttgctttctgttggaagttaggaagggtagataaaaagcagtaaagccagtggtgtataaaactcagtttgggggcctctatcagcttggtatagtaaggggaagagaagagattgaatcttctgggtaaggtgacattttaaagtgtctttgaatgacaattatctgtgctattctagtcccttatcaaaatttatgattgagcacaggctataaacttaatcatttgaaatttgtagtagggtgaattaaattttagcctaatttaaaacatgatctagtattaaactttttctctgcaagttttgtttaatacagattcttcatatcgcaagggtttcagatattttacaaaaggtatttaaataattattaattgctttagatttatttataatatttaaaatattataaccatattagaaatctggatgatttgtttctttaccagctctaattagagcagttacctgtgaagttctggagaggtgaacaatcttccgtttgcaaaaaattgtatgacattatattagcaagatagtataacacctctaaaagcaaaaataatttcatttactctaacttaggtgttttggatatatttttcaagaacaaatctatcttttaaaaatttaagcaaatatggttaaaattttgaagtaccttagttagaagtgtgaaatgtatgtgagaaacaaactaagtggcttttaaccagcttaacatgaagaaatcaaacttgcatttcagacttaaatatgttttacatatggatagtgtaaaaagcacaaacgtgtgtatagatcttgctttttgctgctcagttttcttaaattatagaaatagaatatttgcttttttttttgacaatttccaaatggtagtcaattaatattcaatcttcagaagaaacactttgggatttctgatgtgcacagtgtttaagaatcattagtctaaaaataatttcctctttttgggtatgtgaacctcattgtgaaaccaattaaagccgtggaccctcttccaagaaaggtgtacctatgctgatatgtatagaatttagcatatagtaggaagcagttgacagacccctctgaagcccattcatggggatcccttaggtttaaaggatttcatgatttgtctttttttgggacggagactcactctgtcgccaggctggagtgtagtggcgcgatctcagttcactgcagtctctgcctcccgggttcaagtgattctcctgtcacagcctcccgagtagctgagattacaggtgcacaccaccatacccagctaattttttttttgtatttttagtagagacttctacgaaataattattattcaccatgttggccaggacggtctcgatctcctgacctcgtgatccacctactttggcctcccagagtgcaggcatgagccactgtgcacggccaggatttcatgttttaagatggcttatgtgatttttctttaaaactttatgtgcagacttttccaaaaatatttcgctagtgtttattgtagtttgttttttagaagagtaactcctgcagcgggttaagagaaagtgaggtctagtggaaaatgaactcagccaaggaatctcgggcccataagctcttctccagcttcactatcagctagctgagtgacctttggggaaatcacttaacttttccgggtttgattttctatgcgatttctgcagtccctacaaatagtcttatgagcagtttcatgacatcatgatttcaggatatcatggcaaaattctttatcagttcaggattggccctgctcctcatttttggagaaaatgccttggagataagatatatgtacattgtgctgccttttgttgaatatgacttttcagcagcatttattaatactttctcaaatgctgtataagttaaaatcccagtcccatcctcatcactttgaatttcaacatattttatatattgtgggtataagcctgtgttgattatacgtaatataattatcacctccgattctgtggtttaccttttcactttcttaatggtgtttttttgatgagcagaagttcttaattttaattttgtccaatttatcagtcttttcctttttactatattttaaaatggtaatattttacttcctaatcaacaacttggatgaaaacagttccagaaagtcattcatttaacaaataatgctgctggaaatcgatgcataagaaattatccccagcctaaaagagctaacatgaaagccctaatagggaagataagccctcaacagacagcttaagtgtctgtttagtcaattcattgacttaacaaacatttattgagcatttactatgtgcctggtactgtttgaggcaaccttttgagtggcacagagtcctgtagatatcagtagtgttaagaatccactttttaataactgcattgttctacagattgttgcatgatttctcttttggttgagagtcatcctaaccttggtgattaaaattgttatttgcatgggcctgagaactttaaaaaggacagctgctaaagaaaaggcagaatagaatagcacattgactttctttggaaatgagtgctaactgcatgaactggggcccttttaaataattttatcgtatgtttggtataactgtacatggttaaacaaagatttacaatctgggagacatgaagctcttttgaaatattccctgaggcaatgagacactattggagtaatatcagtcaacaaacaccatatttaaggcaaaaggaagacatgtagttttagagcatagcatatagtggagtttaaataatttaatactaaaatattaagggaaaagttttaatttttgtttcctaatattggattgggatcccaaaacctaaattttctttctggcttcatcactgattagatatgtggcatagaaacaaatagcttttgtgtatgtggtttacaatctaaagtggtaagatgtggccaggcacagtggctcacacctgtaatcccagcactttgggaggttgaggcagggaggattgcttgagcccaggggtttgataccagcttgggcaacacagtgaggcctgactctacaaaaaaataaagtaatagccaggcatggtggcacacttgaagtcctagctattcaggaggctgaggtgggaggattgcttgagcctgggaggttgaggctgcagtgagctgtgattgtgccactgcacttgagcctggacaacagagtaagacattgtttcaaaaaaaaaaaaaaaaaaggtgagacacatctaagaatgtgaaaaaaagtttaattaaaattctgactatacattattataaaatgctgtgattttaaagccttatataaggcaaatacatttcaagattaattgaaaaaaatgccttttatgaggaccaaactaagaactagtgatgttaccttaatttgttaatgtaaaacaactgacagtagaggtcacttgttggggatgaaggagtagttgtatgttatttaaatgaggtgcatttcatttctatgtgtctcttaggaaaggaaaattatcaactacttacttttgcttgtcttgaaaaactatggaaaagtagcaatttaactgctcttgagttcttttctttgctgtaaaaattacctattgcttctttttttcttttgggttttaaaactttggaaacttgtgtgtgttttgttttttcttcttaaaatcagtaatctttgagtcttcagcttttaatgacatgtcataaatatgtgtgtgttgtctaattccattttcccgttcttctgttatagggggctagagagctgaaggagagccagtttccccaaaattggtaagtactttgactaggtagacatcgtgtgcctgatcctgatgctagctggatagttattcaaatattgtgattttttttttttttggcaaataggctctctctcagaaatggggctttgctatttgcactaagtggaaatgaattgtctaatttcacgtagctatacttcaaacgcatttgtgtttctgctaatacagctaggcctgcatgttccaccattcgataacctgttaaaatgtaaaagtcccgttttccaaaaatgtccttaatgcaatggttctggttgagaattcaaacgtcaagaaattcaaaagttcagattcccagccaggcccagtggtgtgtgcctatagctccagttacttaggaagctgaggcaggaggatggcttgagccaattcaagtcatccagcttgaagctggcaacaaaacgagaccctcatctcttaaaaaaagattaagattcctatagtgttttgtgttacttaatatgctgttctatttgatggccttagtatatgtgcagagtggcttaggttaatttaactgtggaaacttgactttgaaatttgggactcgtgtttatttgcattcttaaaattaatattggattggttagcttcatgtctgatagtacatttttagcatgtgttgttttatataattcttcaaaaggaaaaagagagaaaaagagagagaaatgtaattgtggggcatacaggcaaacattttttcctaatatctactttgagagatttttttaatggctcttcatcattcttaaacatttctttgaatgcacagggcaatctagtgactagccatcaaacaaatattaactttattaggagagtgtgtattatgaaaaaaattacactcaaataagatagctggaatagggtagtcgcctagtgcaagactactcctttttaaaaaaatttttaaatcctctctcaaatagtaattaacttggtgggtggagtagatatagtagatatttggccaaggtttccttttgatagtttatggtgcttgtggtgtctctcttccttttggggactgggatttgaacatgtttaatggaggcacttgaactagttaatccttgcatttactacctttttattctacttgcctttctctcattaaaccttttaaaataaataatcaagatcctatagctctttactttgacatgggatggaatcttagagaagcgaccttaacccatttataccagaggttgcaaattttttttgtgaaaaatcagactttggcaatgaacttgagcagtaggatataaataactcccacaagcttagtgttccaataatggaacactaggtataaatgggttaagggccttctcctccagtattttaccttgtgtggcagtttcttctagatccctgacaggttgttattcaggtacatattgaataccacatttaaaaaaaatgtagctcattttctataatgtattctgaggaattctacttccacaaaaaataagtattattgaggtggggtgggggtgggaaaaggcttctgtggtcaagtaatttgggaaatgctgcattaaacaaagttaaacaggtttctttactgcaggacttctcagaacctttaatatgctaatgtgcattgtgaatctccaagagggggatatgatatgcagcattcttgaatacttctaatgacagggagcccactacctcataaggtaacccattccttttttgtacgactcttatccttagttcttccttttccttatattgatctgaaatctatctcccataacttccacttctattaagtatttattggttatgctgagactaccacacccacttgcattatcctttgtgtggtatatatttgtaagattctggccaggcttgtctggacagtttttttttaaatagtcattaaatattaataacattctggtaaatgtgacaactagttctaaaaccttggcctcattgtcactatgctctcataccttactccccaacctcctccattttcaatttctgtgtattttaaaatttactcagttttccttttgttggatgtggttgggataatctagtagacgtgcctgatttttgtaaagaaagttaggaaatagaagaatgtgtatatttagacagcctggaccccaggaagcagaggtagaaactgtatattgggctgagcactgatgatggtagggaggggtccaggacactacacagacttgtgaaggagggtgctatggggaaccctggcctggcccaaggcaccataatagcctgcacgttgcagtggaggtatgacctgtgtagagattccttttttaaaaaatgaggacccgccccccaccccctccaaaacaaatagagattagaaagatattttatactcacatacattcagacatttagatatcataaatgtaatgatatgtatgcatatttttttatttcataggaaacaacattattaaatataatttaatagtatagaaacatccaactagctaaggaggtcaatagctgtcacaccagaattttaacatagcagccttaccacattcagagggttcgcctcgaaaatcagggttgccaagctctttgtgcagtagtattttctgttcacctgtggagtgtcataaaagaaacactgtgatgaaaataaatcaagatgtgttgaaaatttgctaaatgataagaaaatagacattacattatgttttttaatgttgtcatttgtattgattcatgttaataaatgttaaagtttttaataaatagtattaaaagaattttattattttttgcattcatggtaattttagcactactgctaataaagatattattttatctacctacatattagatacatagtaggaagtattttgtacaaattgaaacctgatattcaaatattaagcatggtacaagaagtaaagatacgtagatgactgtcaagacctactttttcctatttaaaaaaatgaattaaacctactttaaacattgtgtctgagaatatagataaaaagcagaggagtttcacaccaaataaatgcatggtatagagaacatggagttgtcctttttagggacagtttgggggcacactgtgtcatggacttatcgttagttaaagaaatgttggttgatgagtcaagttttgattggaaaaaggtttctgtcaactcagtaacagcaaaatatttcttagcagtaaaattggagttatagctttccttcgagttattagaatcgtaatgaaagacctgcaggtcacatatcttcaagcagaagtatacccagagaaatagttagaagaacctccttagagaatttgagaacagaaaagcctacagtcttctagatatatactatgtagagaagttctattaaaaagtctgtatagagaaaagaattaagtgtattaaaactatcataaaactttacagtttgcaaagggcttttcatataattttgccttatttaaaccacaacagtcttatgaagtaggtgatattgtttccattttcctgatttacaagcaaacaaacaaatgaaccctggggatgagagtagtcacacagtgagtaagtagaattagcattttttgttttttgggatggtgaatgtgctttccagataccatggctgacctttttagtgggattttattattgtttttgtgtgtttggtttgtgtgtttggtttttatgttttgttgttgttgttgttgttgttgttgttattggaaagttagaggccattagatatcagaatggtttgacatgtaccgtttggaagattgcaaatgctaatattttgggctaggcaagtggccttgctgatagtgacttgtagagctgttggatggtgagagtcactcattatggtggaatgcagtgtgttactgtcttgtgagtctgatggtattcactttgcagcaactgatttgttatttataacttgttagaattggtcaaaatatgttaaatcatcttttacaaatgtagccaataattcttttgatgctataaactgcctcccagtggtattcagatgactgcatgagatgtccaagacctcaaaatattttttcagctgggtgcagtggctcacacctgtaatcccacactttgggaggctgaaggtggatgggtcactttagcccaggagctcaagaccagcctaggcaacatggcgaaaccctgtcactacaaaaaaatacaaaaattagccaggtatggtggggcacacctgtagtcacagctactcaagatgctaaggcaggaggatcacttgagcccagcaagttgaggctgcagtgagccgtgatcgcaccactgcactttagcctgggtgacacagtaagaccctatctcaggaaaaaaattttttcaaaatattcagcatgtattcgtgaccagcctgggcaacatatgagaccccttctctacaagaaaaaataaaattaaacaaacaagattcaacatgtacctgccttgtttttgtaaactataaatacatgtctataatttgtttctttccgcacagaccagtctcttaaaattactatccagaaagagatctttctgaagaaaagaaaaagaatttcaaatgaatcttctaatccttcatatgtttttctacaactagtcctaacttttttaacccttttagttttattttgaaataaaatgagtaattggcatttagagtccttgctgaataaaacttcatgcctttgtgtatctctgagaagcagacaacaatccgatggagaaagtaaaagccatcggctcctcattaacttgagttgcaggcttattattgtgcgaggcactctttgacatttacagtcttcaagttaaaccctggttttaactttttcttttcctgagcattttgtttgatagtataatgttttctgatgctttatctacaaatccttggttaatgtcttcttgtttaaaaagatgtgcatattttttatggaaaattttgaaaatatcaataccccaaaaagaagaaagtaaataactgacagtgctactacctagagataaccatcagcaaattgcgaagtggcacctgacacaaattctagacagctcagagtattattatcttataggtcttcagtttgatagacaaagcatataatcttagttatatttctgtgtcttaaaagatggaagtttttcatgtttgttggtcattcttatttcttctgtaaattgttttttcatagatttttgttatcaatttttgagggccctaaatatataaactgtatcagccctttgttatgtataatgttaagttctttgtgttttaacctgccgttcatttccagagtttatgtgaattgaattgaactatggttttatgttactgtcagtagaatgaagtacgaatatttgaaaaatacaccttcaacttcaaagtgattcttgacaaaaattataaggaatcattttggacacattttctggtagagccttgtaaaaattaaaaccaagtgttgttttcaagaagaactgtaatacataatcaggaatttgagtagggagattattttgttatttaaaattaaagtggctgtgtagttttaactttagtattgcaggtagagtaagcttacatgataacaaaaatcttggtcttagtgacttaatgattctgatatttattgattgattggttatcattccaaatattttaaaagataatagctggctgggtgcggtggctcatgcctgtaatcccagcactttgggaggccaggacgggcggatcacgaggtcaggagatcaagaccatcctggctaacacggtgaaaccccgtctctactaaaaatacaaaaaaattagccgggtgtagtggcgggcacctgtagtcccagctactcaggaggctgaggcaggagaatggcatgaacctgggaggcggagcttgcagtgagctgagatcgtgccactgcactccagcctgggcgacagagcgagactctttctcaaaaaaaaaaaaagatagtagctaaaactacccagatttgttcaccatagtatgtctccctttctaaattgttaataactcccttaaatatactgccttttaaaatgttttgtttaacattatcattatacagtaaatttttcctatcctttgcaaatgtgaatttaaaggaattttgcacttttggaatttattcttttttaggtttgagtattttgatgttatataatctagtatataagccctgagagagagatttctgctgatgttttatgcctaatgagaataagcaaatatattgaaaactcatattcacaagaatatactccctagttaatgattccattataactctgttaaaccagttttcaaaggactcttagaaaacttaggttgaatatagactgtacccataggtaaataatatttagaaatatgaagatcatgaatcttattgtattggtttaaggagtagtggttcctctaacttcctgattgttccattccccaatttatatgaatgctaaaaagctgctctagctacaagctttataggtgcaaagaagaaaagaaatttgaagtaaaatttaaatttattcaggcaaaaacagacttttgctttgacagagtacctaaaatcatgtctaaggccacattcaagaaaagaaaacaacaataaaggataaattagccatcgaaataatttaaattagagcagtgatgactgagggagataggaaggtcaagctgggtgtcatattaacagatttagacttttgacattatctccacatgccattatatgtatagtcaaagagatgactggcaagcttgaaagaagatgattttcattgtaaagctggacatgtgttccattactagaccacctcaattacacacgatagatacattttaaaatatccacatcataagttcgtggatagtacagttatattgcattgtatttgtctgttttgagtattaatttgttaaatgtaaatgtttaagttataccagaatttccccattttgagtttctctgttttttatgtagagtaagaacccatccaaataaaactaccctggcattcgttaacctccgagaaaccctgaactctccagtccactctgtgtgaagtttaaaaatgtatgattttggctcagcgcagtggctcacgcctgtaatcccagcactttgggaggctgagatgggtggatcacgaggtcaggagatcaagaccatcctggctaacacggtgaaaccccgtctctattaaaaatataaaaaaatgagccgggcgtagtggcaggtgcctgtagtcccagctactctggaggctgaggcaggagaatggcgtgaacctgggaggcagagcttgcagtgagctgagattgcaccactgcactccagcctgggcgacagagcgagactccatctcaaaaaaaaaaaaaaaattatgattctgttgttatatgtctctttctgaggacagtgtgtcctggatggttatagtctcattgaagacagaagtggtcttactcagctctgtatcctcagtatgtagtgattaacacagtgctgagcatgtagtgggtgcttagatgtttccatgaccagattaaaccctttttttggtttttcatttcttagttatttgaagtgttctttagaggaatacttgaagaattgttttgagggaaaaaaaatctctttgggaaatttcttgccctgcgttagagaatcagatattcttttactaacataatttatttaacataaatattatatttattccaaatgtaatgatccaaaacattttatgatctttacagctgcagtgagaagaggagtttgttactttaaacagaggctgaagaaactatagaattagcagagaaagtggagaaggtagaggatggagttgcagactctacaggaggctcttaaagtggaaattcaggttcaccaggtaagttgtattattggcttctcccacattgttgttaagtaatggctaagattagtaaacaagtccatctctggtgtttagtatagtttttaataatctttaagacaattttgtccaagagtcatgtcgtttgccttttaccactactcgacaaagtcatagatactgcttttaagaacttaaagtattcctgacttcctttctagagaaaagaactgaaaagatttttttcatataccaaaggtgttaacaaaaaagaaagaaatcttttttctgctttttggttcatctgaaggactttattcatgtgatttaacttgcatgttttaaataacaacatgtctaactcaactaccatatgtactaaagtttttacagatcatatgactcagctttatgcgttgattccaatcttaaagaaaatgtgattatcttcacagatgtttaaatttcagatttcacaattcttatattttacaaaaagctatctttatataattacataattaaaatttgttatgtaaacagagtaccactgttttatatctttctagactttagctggacatcaggcggaagacacacatacacatgcatgtatctaatccttggtactcaaaagtgataaaggatgatgcattgactacttttgaatttgtaacaattggggatatgggagcggagagaaggataagtaaaactactttctaaagatgtttgttcttaggtatagtttcctttgtttatctgagtagtctgaggtaacattaacttttgaaatcgttgggagaatatcttgggcctttggtaactactagatttgcacattgctcagaattagtgtgggtgagaacttaaaggaagcttcaaaagcacctgttcagaaatccctgctgctgctccggatctcgttaaactcttgttccgctgcagagttggccctatgcacgtgggcttctttaagtaggtaataagctgtgtacttttttttttttttaactttgcttctgttactaattgaggagagcagaaatttgttacaaaaacaagctcgtctttttctgagtgaaattagtttaacatagaggtgtgttgaatacccagtttggctgaatggcaagtgataaaaattaaattcacattttattcaaagctgacatcatcatagaatgaattttgggagtacagtaatcaatctgaaatttgtgtggatcaaggataattttatgatgttgtgtgtgatttttggagtttttcctcctctgaagaagtattgagatggcaaagttaacattctgctttagttcctcttcacaagatatgagcaaatcccaaataatcctttcttgaaaggctcatgacctaaattaattgaagttaattactaaatattttgtttcatattctgaattcaagcataccaattttataaacatcacaattatgaaaatacttaatatttattattctattttaaatctaattaaaattttaaatttacatttgttgactcaaaagggatatagttcttaaagttattctaaacactctcttactattcatattaactgtcagctttgagcataaaattaatagcttttatattcatcctttatacaacattttgcttgtgtgattataaacatttatttatatgtcaataatattttaacagagaaagcatatatttcactccagttatatctgtaatactttactatttttgaaaaaataatttatatggtgtcacctacacgattgttgatcatgacaaattgaggcatgccagaaatgacatcaaggtaggggtgttggttactaggctgagaccaaagccagaacatacatttgacgaaatagtgggacaaaagccacgctttgttgcatttccagttagggaatgagattagggctgaaattgagcttactggatagaaaatgtgttctgaaactatctggtattgtggagtgaaaacatatttttgttctttgtgttttctttatgaatggtgagatagttatgaaagtagcaatgtacacatagttgatgttcagtaaatatttaaataataatgtcctgtgatggacatctcatctttttggggaaattgccttttttcctcctcccttttttgatcttatttagatttgatggaagtcacatttaaattttcagggtatttactccatatggaatggagaatagtataaagcagaagttagcaaatttttttgtaaagggacacacagtaaaatatttctggctttgtgggtaatttatggtttctgtcacaactactctgctctgctgttgcacagagaaaacagccacggacaatatataaatgaatgagtatggcttttttccataaaactttatttgcaaaaacaggtggtgggccagatttggcctatgggttgttttgcttacctttggcatgaagtatatcctcaagaaatattgccgcattctggcggaaagtaacctaactttgttaacacaatgtcagcttaaagttactagggatttggatggtccagtaagttggccagctcgtcctgtcctacccctgattgtctgaaatgcagtttaactgcttacagatagaaaaattggcttatttatttcctctagaggtgaagacttcatgtggttatcagtgaatttttaaattccagtgtctggaagaaaacctttttcagcttctaaaacgttacagcgtagtagccaaccctctggtaaccaaatcaaaaaggaaaatcaagagcttttttcattgaagactgtggctagcattaatgtaaaaatgtatgtgtataaaaccttgtgtttcagtcccctttaaactcttggaatatgtattgtttctattttgtaggttaagactaggatatagaagagctactaccattaagtatgaagtcatatagtgacacataccttgtgtatttggaggtcccatggttggcaacttcagttatctaaaatgtgtcttagcatcagggagaaagacttttgattaattagaataaatgtctgaagtgatacaccaaagattatacattttactaaaggagggtttcttagattattacaacctattcactcgtctttttaaaattagtccagtgagcgtaccacacagcaggtctgaaacagcaaatttgagctgggtttcagggttgttagaatagtagcaagagctgcgcatggtggcttacgcctgtaatctcagctactctggaggctgaggtgggaggattgcttgaggtcaggattttgagatcagcctggataacatagtgagacctcatctcttaaaaaaaaaaaaatgctggatatggtggtgtgcacctgtagtcccaactacttaggaggctaaggtgggaagattgcagaagcccaggagttggaggctgcagtgagctatgattgtgccactgcactccagcctgggtgacagaacaagaccccatctttaaaaaacaaaaaacaaaaaaagaatagtagcaaaatgtgctggctgactacttgacgttaaggagtggactggaaaactacaatgtggatttaagaactttaacacatagtagtttgggaccttttttgtaaggaacctattgtttatagtttagtatattaatataatcattcctctaagtatcaataaaagcttgatttttaaattttttttcttctttttaagaagttagggcgggtggctcacaccttaatctcagcactttgggaggctgaggcgggaggattccttgagcctaggagttcaagaccagcctgggcaacataacaagaccctgtctctacaaaaaattaaaaaattaaccaggtgtgctggtgtgcacctggggtcctagccactcgggaggctgaggtggaaggataacttaagcccaggaggttaaggctgcagtgagccatgatcacaccactgtactccagcctaggtgacagagcaagaccctgtctcaaaaaaaaagtagtagttagataaatatatagtatattttagaaaggttttattttacaactaaacaatttaaaagtgccttgtcaccaaaagagagtgacaaatttttccattagatgaaaaattgacttgggtaatagcttattcccagatactttaggacttctgatgttcctttatccttcatattcttctgtctatggttattgttaactttgggcagcgatgtctttagaagttgggttaggtcaaaagacattcatttttcttcctttcctttcctttcttttcctttcctttcctctttcctttcctttcctttcctctttcctttcctttcctttccatttgtttgggcttctgttttccctagtaaagatcttttccattcagtattgggtagcactctttcccagaggaatcgagttagatagagttttgtattgttcctgcacttccttgttctcaaaaactgagcatcactgccccactgaacttatcctcccctgcaccgaactccttcttgagagaagacagtggcaaagtcacatgggacactaagctccttctgtggtaagaaacaaaccaatagacctgccaaatctgtactttgctctgtgtatgaacaggccggttttgtgtggggccagcttctttccaggccttgtttgggactctagacattgacaacatttgaaagggatgcttggcttttggagcatccagcttgcttaaattcctttcggagccactgtcacccgtctctgtccagatttaaaaatcaggcactttttcatttcaaatataaagtggtggtttgatttttttattaaaggaagtgtctcctgagcctattacatggatcacagaaggttttagtctgttctgattgtggtgttgctcttttttttgtgttaacttaaaatcctagattttttggtccaaacctgattagccatagggagttaatatgtaagactgatggctctttttctctctttattaccagaaactggttgctcaaatgaagcaggatccacaggtaaaactactattgttattcatttaattgttaaatttaaaaataatttaaaataaaatcaccataaaatacttaaatatagatggtacttaacttttaagaattatttcatttctaatagcaattatttttaatacattgatcttcaggttataagggtttagaaaaattcattctattttaatatagctattatttcatctttgttactattattttggtgtcatattaattggtttgagtattttagagaaaaatattgagttaatacttgtcatatagcttaaattcatttccatgaacccacttattcaaaatcagagtttttgaggctttctgtcatcccaatattatgaaaagagaccccaaaccatttttatttacttggagtttatattatagaacatttgaatagtactgaattctccatgttcagggtaagaattttagagtattttttaaaagaagcattttagaaaattttatttttgaaagaacccttaaaggagggttaaaaagtaccttatgttactttctaacagaaaaattaacagagaatgttaacttttctttaaattctcataggcatttttcacttaggcattttattctgtatttctgaagagatgttttcctaaaaacttaccttgtcttctgataattatatttattattgggcattgtctcttttgtaaccattagatactaggtcataagtatggagagtgtttatcaaatatcaaatatatctttatctatatctatatctatatctgggttgataaacagtacatacaggcttcactgtaaagtaaaatcaagtttttgattgaagaatggtactgaggcacattgatttttggaagtaaaaaaataacacttatctctacaaattgagaactcaggtctaactattgtgttttgactctgagagctggcattggtagcccatacttattccttttgaatgatcctacttccgtgagaaacttctccttttttttcttcttttttttggtatagtcacaatttaaattggatttagatacaaaaattagccaggcatggtgatgggtgccttgtaaggccagctactcaggaggctgaggcaggagaatcacttgaacctgggaggcagaggttgcagtgagccaagatcttgtcactgcactccagcctggacgacagagtgagactgcatctcaaaataaataaataaataataaattagatttagggaaccaagaggtggtagactttagattaacaggtcctttcctatttaatgtggtaaactacattatcagcaactgtgaaatgttactagaaactatcatttctgttatagttggtgatcatgtaacagaattgtcttaacctgaagaatctgaggtaggcaggacagtaacttgttggacaacaggtgtgggtgatctcattggagaagccttatgtcaaatacactaataaaaaagtccacacggagtaaaccaaatttaatagacgaggaagatgtgttccctaaccctgacagaagaccaagcagggtaaattgaaagaattgtatgtgagacaaatcaagtaaaagcagtctctcattagggtggtgttcagtctgctagtaggctgtcctgctacattaagcatttgaaaactttaattttggaattttttgcctactttagtaaaaggcaatcatgctctgtgtatctcatctaaaatagtattctttttttgattcctagaattttagaactgagaaaatgccctggtagtcagtgtgttaatttgaatgatgtagtgttaaggcagttgcagtactgacagcttttcagatctaggctaaaataacaaatgtactttgctaaataagggagagggcaagtggagaaaacctcttatctttgttgataatgctgtaaagcatgtagtgtgtgcatacttataacctccattttcctacttttgtgtgattagtggagctttgggttttctgtcaatggatactttctataaagaataagaatattttagtggacaggtactcttaccgtacaagatgctcaaatataaaacttcatgtaatttaaaacagttgcagaggagctgctcctgttttggtgcaaggagcctgtatttaggatctgtgcattaggtgatggtattatggccacagtgtaatgcatgacagatttgattggctaaatgcttcgggttgcttcatcatttgtaatgcagtatgcatagtcttcctgctactattctgttaacaaatgaaatatctttctcacagatattttttctttccaatcagaatgctgacttaaagaaacagcttcatgaactccaagccaaaatcacagctttgagtgagaaacaggtaggggaaaaggggaggggggcatatttttaacgttgtgttctaaagatatgtctgctcgaggcttctaagagaactgctatttttcctcatgtgtgaaaataagtgtgggcagccagacttggttttaattttgtttgagctctgtttatctatttttatttttggttgaaatcagtctctagagtatcccatggttatatgttactggcaaatacctaaaagcaatgtggcaggctgccgttaactgtgttaattaaactctatagtttacctataggggatggggtaaaggcagttagtgagaataggtgatagagaatcttgtaggtgctgcgtgtaccttgttacctgtcttaaagccttgagctgacattaaacttactgtggagagaatcttcttgtaagtagattgctctaaatgtaggtttcccattctaagtatggtcatgcctttatgttaatctctattagatattgacctactattacgtgaaaaaacttcggtgaaatgttattagacttattctatatagggcaggagaagaacatcttgcttttttccaaggacacctggaaaatattctttggaattttttgtatgatgacctccactttaccaattcaggcagtgcctgccaccaggtggagtgtggcaattgatagagctataagtaaatgtttatggtaatcccacaaagcatttgttttcttgtttcttccccaccactctccctctggttagaaagagtggttttctgtcttggagtaggtgaatatattaatcaaaagaataaggtgatttgcagttgatatttcatgccagtgacattttattgaggatttttgactaaatagttctcaataactgatttttatgttgttatttaatgttatttagtgaaataataacaatgagaataattcatttctggagattttttattgtgtttctattgtgttttcatttaactgaggggagaaataaactttgagaattatgtggaagagatatgaatcattaatgtttcagaatagaatcatcttccaagctgagtgaacaactgctttatattcttccctcctattcttatgcgtccccatcttgtcttctccacagacaggaggtattttagattagggaattgccaaactaaaattgggaggaggtgggatggtggagaacaatttgtaagaaaaaatataaacagagtcggttagtatgtatttggctctgaatgtgattcagttctctaaagtcaacatgatgtgtgttagtgaaagtgttctagctttagaattctgttagcgctgagcctccttatagtttcagggttagtttgacaagacgccaatgaatgagtcacatttgctgaaaaattcacgtgttccagcaggggaagaaggtgagaactgattagtggagtaggggttgggggatgctgttgcaaagttaagataacttaagactacatttggggaaagtgggacaatttttggaaatttacatctactcgaaatttttgtttgtgagaactaacatagatttggtttatttgtaactttttattctttaatcttttttctgttagggaccttactgaatagaaaattgcaactatctatgttaagacatttcatcaagtggcaagctctaattgttctctgaactaagtttgcatttcagaaactggaattttaaaaaatgtctaacatcaggaaaactttaggtatacaaagtaagtaaaactagagttagaaactgaaatccagtcctgcaatttttatatttccttaactgttaaaacaaccttcttgatggaacagaaaaatatcatttttaggtaggctaatacttgaaggaagcacagctgtaaagttcaaaagctcatccgtcctcagacttattttcaacatgtgatattactctttagtttagaatagttttattggccaggcacggtggctcacgcctgtaatcccagcactttgggaggccaaggtgggtggatcacctgaggtcaggggttcgagactagcctggccaacgtggcaaaaccccgtctctactaaaaatacaaaaattaaccgggtgtagtggcacatgccagtagtcccagctacttgggaggctgaggcaggagaattgcttgaacccaggaggtggaggttgcagtgagccaagaccatgccactgcactccagcctgggcgacagagcaagactccatctcaaaaaaataaaatagttttattttagaacagtttcctaatgctatatgccttccccccccccgccaaaagagccacttatcctctggcagaacctaaccaattttccttccactttaataactaaaatctgaattaccttatccgtatgactgatattttaagttaacattaattttttgttagaaaaatttaaaatacagaaaagtttgaagaataatgtcatatttcacacttaaccctttgtcatatttgcttctattctttttctttgtgcatttttctgtaatcatttttttcaatatttattagaaaactttaattatacaaataatggactcatatattctcttcttttgttttattaaaaaaagttgcatctgacaactttttttttttttgcatctgacaaaaccattgcagatagtcactatttcttgcggtagacactagttcttattcactgttgccacttcaatctttgatacttactcagtttctcccttgaaactatgtaatcgtatgctccatttgggaaaatacagcctttagtgagcatccttcatgactaaaactcagtgaatttcactgaattcttggttggaagggtctagtgcttttaaagtgtaacttgagatttctgaaagaaactctggcagatttcaaagtcagcttcttgacctgcagggcttcaatttgtggctgacagttttaactcagaaaatccctgacttgattggctacataaattatatgttatatagccattaagatcatggttttggaaagtattttaatgatacaggaatgtgctctgaaataataagtgagagtatacacaactttatgtgcattacagtcccatttttatgtttattttgtgtatatatgtatgtgggcgtgtaaacgtatgcaaaaacagagtcagtataaaatattggaaggtggttaagtttacaggtggtttattttttctgtatactcttatgtatattttctaaatgctccacaataaattacgtttcgcttttaggatcagaaatagacaagaaataagatttaaaaaatttttttaacatcaagctcttgtctgtttcaggcatagttcacatttaaaaatctaatgacattcttctcatggtattaaatatatgaaccactctaatcagagaatccaacttttttttttttttttgagacggggtctcgctttgttgcccaggctggagtgcagtggcgctgtcttggctcactgcaagctccgcctcctgggttcacgccattctcccacttcagcctcccaagtagctgggactacaggcgcccgccaccacgcctggccaattttttgtatttttagtagagaccgggtttcatcatgttagccaggatggtctagatctcctgaccttgtgatcctcccacctcggcctcccaaagtgctgggattacaggcgtgatgtaatgctgaagtgtggaagcaactattaatttatttaacaggattcactctcattctcactccccacaccctgattttttgataggcatatgtgatcttttatggagatattctgatatggagccaaagcacttagttgctctagttctctgctttcattttgctttcttgtagaggcaatcttaacattccgaagtttgttgcttgttactgtggtgcttcagggttaagccatcgtggttgcagcttcagtttccccagcctgaacagtttgctgccctatctccctttacctggtggcctcctggtgaggtttcatgtcatagcttaaatgtcacttcctcagaggagctatccctgacactccttccactagtcaaaatcaactgtttctattattatctcacattgaaccatacttttccttcatagttattccatttagacattcagttgtgaatgactgaaaacccaaaatgaaagtaatgtaaacagggaaaacttaatttctgtctcatctaaaagttctataggtccccctagggctagggctgctgagagtggttccacgatgtcagggaacccaggttcctcctattctgttgctctgccattctcagcatgcagctttcacatcatagtccaaaatagctgctccatctggtaagaagggggagaagcaacaaagagcaagccctttattttttaaggatgtttactagaagttgcatgcaccacttccagttagatcccatgggcctgaacttagtcatgtggcccctgctaggagcaaggaagtctggaaaatgtaggtagtttattgctggtagtcatggccagataaaattcaaggactattactgagtaagaattgggaaataaatactgggaataattagcattttctattacagtagcatatctgtatctgtaggattactattttttaaatatctgtcttccttattagattgttagtttcaggaagtcagggaacgtgtttgttttatttgcttttttattcctagtataatatttagtataatatttaacatagaatattaacacagaagaggcacttatattctttaaatgaattattttatccacccgatcttttgctctgcttatattgtaatttttttatagaacggtgtgtcttgctttttatgctttttaaactaacttatgaaaatcttcttagatttttgagtgttctttgagaacatgatttttaacagctttaaatattagcataattggctatatcatgattttttaaaactattcttctcttgatgatagggtgtttccagttttttttttggctattatcaatattgctttgatagatatacccttttatatgaatgcgtgtttctctctgatggtcttaggagaaattcctagatgtgtgatgactggatgtgttggtcacctattaccctaacaattctgcatcagaaactagtgttttattgagtggctttcaacactgccagtacttatacctaactggtcaaagatttgattatctctttaagaaaaataagcttgatgaagtaacttacactttaataatgtgccatattattatagggcattttacctaagtgtttattttcacactaggtctgtaggtcatctggggttctcctaatctaggctgtacttggccaggcacctctgcttcagtttgtgggctggctgaacttgcctttcaggctgcaggtttggttaggtctactctaaatgtgtttattctgaggccttgcatgaagggacagcagctacctggggcgtattcattttgtagtttacctaagagcacaagaagcaggccaaactactaaaataattttaagactctgctggcatcaggtttgttaacatctcattagccaaaagaagccacatggccaagccttgcaaagttatatgacaaagggtgtgaatgtataattttaaaacagagaggatatggaaattgaaaacagtaattcatctaccgcacttagtctaaaagtataaaaaaaacttttgctacatcaaaaaaaatttttaaccatgtatctccaaataacccccagaaaaggctatatcacattaatagcatatattgataataagtgattttccccatgagataccctgtcacaggggaaaaaagcactctgctaatttggaagatgtattgatatgcatttgatgcttatcaggaagtatatttttcaaagaatttgccgtttgtccatggcacaagtctattgtagtattccataaattatcttttggttttaaattttgttgttctttcacaccttcttctatttctttttactcctttttagagagatagacccttctgtagtctttgatcttttctacaagtttccttctctgactctgtttaaaaattatagtcaccaggctgggtgcggtggctcacggctgtaatcccagcattttggtaggccaaggtaggcagatcacctgagatcaggagttcaagaccagcctggccaacatggcgaaaccctgtctctactaaaaatacaaaaattagctgggtgtggtggcgggcacctgtagtaccagctgctcaggaggctgaggcaggagaattgcttgaaccctggaggcagaggctgcagggagccaagatgttgccactgcactccagcctgggcaacacagtgagactcgtctcaaaaaaaaaaaaattatagtcaccatttcttacagatcttttcaatataatattagatgaaatacttttctgggtttagtaagttcatcttgccgtttatggaatcattctcaattttaaatttgaatatattttaatacaagattctgaagcttttgggaaagaagtttctgtccctcctataactagttatgtttctgatctataggacaacataatttaagctaattaggtaactgaaacaaaggactgggtagggatgggggaaccagaagtttgattctattcctgactctgtaatagacttgttgatagattttaattattgaataacttaatatgtctctttccatattcgtggaatgtttggattatgcattgaggagttaatgcacgtgtatccattgagtgcatggagttcttttgtaggtgagttctgtttaaaaggaaattgttggctgtagtcatggtggttaacttcatctcatatgtaacactttcatcttacgtgtaaagtactacttttctaagaagcttagaacatttaacatttaactcaatcacaagtgcatcattgtgatacataaactgagatgtgggctttatgacttaaccattattgtataatttatcagtatgagattcaatactagaatccagattgctgtactcttcattcagttttatttagtaactgtagacctttatctatcaaatattttttgaaataggacattaggcaaaataattacattgcctttaggcttcattaccttggagtcaaataagtaagttagatcctatagtccttgtgttggttacctgatatatgactatctccagcctctaataccagttactgtaaaatgttaccctccgtggttcacagccaaactagtgtgactggcacatcacattggaatttaaaattattgtcttagaaatcttctcattgtgatggaaacctgactttatccagagcctaggaatttcctaagatttagtctagttcatccctcctgtgtaatatttatgtaaagccattggtccaattgtttgttgagtttattgccacttgtgtacatcagaggacatcagctcctcgttttcatcaaatacaggaaatgtaatatttcaaatttctcctggtgaaatcctattggcttatattcagccaagatgagatgaaggaaaggctcagaaataactggctgcaagtatgaaagttctgaagatcgagaggttgtatatatgtagtgtgactgtggttcccagtgctgtattatctgctctcctttttacctgtcttcttggagtgtgattgtgtctgttgctgctagttgtacctaagtggtcaaagattttactatctctttgagaaagagatgcttgattgagtaacttatactttaataacgtgccacattattatagggcattttacctgagtatggcagaggaaatcaagtcagttggtgacttgtaccagatgcatcagtttgctgagttaaggcagagcaatcctcttgtaagtttatcctaataacgtatttttggtgctggcaaatggaatgacttttaaaattcaaattgaatttcttagcccttgtcatcaggtgttatatatgttgacactgggctactagaatctactgactggaatctactgtattttttttttccactttgctcatctattgcttagctgagagcagttgcttcaagctatgaatatcaaatcaaaggccaagtttgtggaatgtttttcaagcctgtggtatctgtcttttttcttttgcatagaacatatctgtatttcagaatgtttagggactcttccactctttggagaacgttaatttttgagtgataggcagtgtgaataacgaatgctttttaggagccaatataactgacaccacctctctactatatcatgtgctttcaaataatgtgcatatattatatatatgtatgctttcaaaaaatccattcccatttattcccttttctctaggatctgtgcttttcagacttctttatcattcagagtctgattcatctgttttattccacatatatttattgagagtttactctggtgaaaggcatgatactaggcccatggaggatgcagagaatgaaaatcttggcagtgttacttccatgtgactggttatgacctacaaggcattcaagctcattagcactgatacctttagcaactcattctcatacataccccataaattctctgctgtcacctttactccctgggctctctcaagactgtgccttcttcacacatcctcttctctacacctggaattttcttacctttttacctgattaattcctatgtatcctttgaagactcagcttaagcaaggtcttctataagcttttcttgacttctttctaccttccaagcagagttagacactcctcttctgtgtactcatggtacttggtacttgtgcctactttatttggcgctcattgtggtacttatttgcactcatcaagttgtattgtaattatttgtaagatcctcacaggcaaggactgtgtcttgctcacatttgtacccctcaagtctagaatggtagatgagcagcaagtgtttttgaatgttattaattcattatgccctcagaaagctggtaaggtggccaaggatgtccctaccaagggttcaccatcaaaagaaaattcccatttaaatgattcaattcagttttttttttttttgtggggggtggaatattcttattattatttcctacttcagtgttttaggagagttcagtgccattattaactctattccaatttagagcagctttatcttagtttcagaaaaggacagtttttattaagtgaagttgtataaactagtaaatgagtctggggccaccagtttgaaaacttgatacatctagaaacaagtctcttctgcaatgttactacgtcacttacctcagaaaacccttcattttctcactcatgcccgcctccccattgaactcatacataccttaccctctagacttttcagatacttgttatgctgtgtcgtttcttcaacctgggatgtttttacctgtcttctttgcatagtgcaaacctagggtcaccttatacctttcttccggcagacccccttacaggacaacatagtacagaaatccccacaaaagaaaatttgaaaacaaatgtgattgaatcaaggtgcattagtaagtaatacataagtaagtaatacataaggtgcattagtaaagaatacattagctatatatgcatattatggaataacatgtagctgttaaaaaataatgaggtgcttaactgaatggaaagatgaatagaaagttaaaaaagcaaattgtaaaacagacatacagtataattcagtattagtttaaaatgcaaaatactaaaaaactgtgtttgtatttatgcattcatggtcatttatacttgaaaatgcatgggaaaaagtctagattatctagaattgtttacacagaaccattcacagtgattgcctctaagaagtgaggttcaagagagctagcacgtttaactttatatatgcttttgttatttaaatttatttatttttattttgtttgtttattatttttagaggcaaggtcttgctctgtcgcccaagctggtgtgcggtggtacaatcatagctcgctggagtcttgaactcctgggctcaagtaatcctaccacctgagcctcccaagtggctggggctacaggcatgcactgtcacgcctggctaatttatttttatttttttagaaacaggttctcattttgttgcccaggctggtcttgaattcctggcaagtgatccttctgactcagccttccaggtaactgggattataggttcaagccacaatggctggctgaatttattttttataaggaacacatattaatttttaaaaactgttgaggtataccatacagataaatatctaatatatatttatatgtatgtacatatggctcaaatatattattacacactgaaaccactaggtaactaatacctatatcagtaatcagaatatcactgtcacaacataaatcccttcgtccttccccagttcactacctcctctaccagagaaactacctttgttacctctaacagcatagactaatgttgcctgtgtatcaaataaaatagagcctacttttttctgtctggcttattttgttcaacatgtttatgagactatatccctttcttttgaagtagtaaaaaactttttacttggaaataattacagattcacaggaagctgtcttttgaaattttaaatcactaaagaaaaaaagtttgtcatctcttggatgtgcccgccctaacatctcatggcatagtcaggtggtttctcttctgtgagccagtagctccttgctctgtgacttttgtgtagctcttaccacatatcttttaactatttgtttgtgtgtcatttcttcctctctagattgtgagcctctgtgaactgtgatcccttcacccttatacacccgctttataccctagtgcttcacacacagtggcgcttaaacaacttttgttaaagaaaaggagtaaattctagtcctggctgtgctagtcactgacaggctttgtgtccattgaatttctctgagctggtttcctcaactgtaatatagatgttataattgtatcagtacagatgcttttagctgtagtttagttgtagttagaaagtccaactaaaagtggctaagatagtaagtgaatttattgattcaaataaggagaatttgctagaattgctcagttcagcagctcagcaacactatcaggacccatattcattctggtcatctttcagcactgccatgctcagcatgtcggcaaccactgctgttgtcatgggatggctgctgtggtgccaggctttacatcttcacacatcaacatcctggggcaaaaaaggaccatttcttattaaatatctctttttatgattatggaaaactttaattagaagcctttcaacagactttgcatctcattgaccacagttctgtcatatgccaatgcctagttcctggcaagaaggaggagtccaagactgatttgtgtcctggagctggagattttttccttgagcatttggaagctagatacctaaacaaaactgttttttgttatcagggaagagaaagggtggagaagaatggatattcaagaaagttaacaatgtctgtctctataacactttcctctactaatgtaaattaaggataatgtatatctaaaggtatatgcatgctgaaataccatgaagttataatacatcattagtgcttgttactggctctgtggattattttagaaaagtctccctttgccaccctagctagcagcctgctttagggctaggagtacaaaaataattttactctttgccaaagcaatacattattagaagggtaaatccattacagaaaataatgtaatttatttcaaatgtgaattataaattattttttaattttttggtatttaaaaattgtctataaactatcattatcgttgttgatattaatatggtgttttggatttctcctttttaaaatgttgaatatgttaaatgacaggccaaatcatatattccttcacttctttttttccccaacagattagggtataagaaccagacaggaaaaagaagtttactgtttaactagtatctttttatggtagctggttagatgggaggctgtcctgcaaaattatgttttcagaagatatgtttcccaaagttgatttactcccaagtttaggaagcaaatgtttgtgtgaatcagcagggtttggctaacctctctcatcctagctctatctgaaaaggagagagggattcttagtttctctcagtgaagcaccaaacattcctttgctctgagaaatgaggccctacaagttttcaactaatctgttcagttgtcaccttttctcctgctcgcacctccatcgccttttaaaaaaccctcccactttgcccaaacaaattgtatcattttgaccaagaagaatattaaagatagagatcagttctgaacttaattttccctatgaacagtgaatgattattactcatctgcttttatctagtgcttctgtcatctaatataggaattggggaaaaaattaacaactcctttcctgtggagtcaagaagcacaaatgaacttaccctgaaaagttctgttacctgaaggaaaataatcaagtgaaattgggggagggtgttaatcgacagaacttgaaatttgtttttctgagtatgtgattttatttattagagattctagaagtttgtcttgaagttgagacaaattcacataagattttgagttaatccaccagtgccttttaattataacatttataaacatctgtcataaaaactgatttctgcttatcctatgatgtgggttcatcagatgaaacagtatttgcaggttatcaaaagtgctgcccctaagcctcatcagttcctgctaatagctgataaaattatatataactctttaaatttctagtattcctttttatagcttcccttcccctagctcttacttgcttaattatatactttatgggtaaagtggttttagccattacttcagggtatccttctgaagagaaattgattagttctccaaaaatggaaagactagtatgattctgtagggcagggattggtaaaactatggcttgaacctgggcaaaatctgtcctgccacctgtttttgtaaaattattagaacacaatcacactctttacatttacatattctctatgactgactgcttttgtgccacaatgacagagttaagtagtcgtgacaaagacagtatggccttacagtagttactatctggttatttttagaaagtttgccaatcttactctagagaaatttaaccagagaggcactcaactcagagatactaggcatcatgtaacagccttgggcaggagtgagtgctacactgtatatagactgtatgtacactgaaaacagggtatatggtgtatacagaatagtaagagctccttctcttataaacatgccagcccccccggcgaattcaattcattttgaacacctcatttttttagccacttttattttttattctcttcgtctctattcctctccccacttctctcttataggtttattgagtcataattaatgtaaaataaatgatacaccttgaaagagtaatttttgatggtgtgaaaccgtcatcacgatcaagatgagcatatgcatcacctctgaagtgttcttggtcgtctcgctcatccttctgtcaatccagtccccaggcaaacactggtctgctttttgtaacccagtttttagctgttacaaataacattaatttgaacattcatgtccaagtctttgtgtggagatctgctttcatttctcttcagtaaatgccttagtatgtctgggttgtatagtaggtgtgtttttaactttttaagaaactgccaaaatgttttccaaagtgattgtactattttacattcctttcagtagtgtatgagagttctagctgctccacattcttagcgcttcaatcttaaatatgaacatagccaagaatcactagatatttaagggaagctgctaatgtgcaagtcagaacaggccaagagaattggaagggaccattcaaaataactataaatttagatccctagatccgtaaaagaagatattgcattagtgaaacaaggagaggatgctagaaataaaggaacaattagaaaacagaaacaattcttgatttaaaaaaaaaggttggaaaacaaaattggagttgtttctcaataaatagatggaagagacaaagggggatagacagtagaatagagaaaaattttaagagggtcacccagaaagtctcatgcctggctaataaaagttctgagacaagggaacagagaaaatggagaagagaaaaccagccaataactaatataaggaaatgtcccacaaccgaagggcatataattccagattaatagaatccactgagtgcctaaaactgtgaatgaaaaaaaccccacaccctcataccaaggcacaacgtggtgaaactttagcaaaacaagaataaaagatcctaaaagcttccttagaggaaaaaaaaaaacaaaacaaaaaacagttgcaaacagggattgggaatcagatgtcatcagacttctcagcagcaacaaagaaagctagcagtcattggaatgatgctttacaaattctgaaaagcagtgatttccagtatagaattctatacccaacccatctcttgatcaagtccggggatagaatagagacattttaagacatgcaaggtcacaaaacttacctcccatacatcttttttgaggaagctattggaggaggttctccatcaaacgagaaagtgaaccaataaagatgaaggcattggttccgaaaacagggaattcagtatcaaagaaaatcccatttgatgaagggaaaaacttagataattgatgtacaacaggtttagaaaacagccagtttaggttggacaggaggatggaggacttaggagaaacaaagctaagaaagtggaccaatatatcatacaatgtgttttgagccattattgagagacattgtatagtttctttggaaagtatgggaaagaattaattgtaggaatatagaaaaccaagcaaatgacaaagcaagtcaattttaagttccaggaatagcaaaatgttgtacaagaagtatagttgtctcaccaattaattaatgttatttatataataatacaagccttaaatatgggtttaatcattaaaatggcaataacgtccaaagcaatttacagattcaatgctattcctattaaacgaccattgaggttcttcacagaactagagaaaactattttaagattcatatgggatcaaaacagagcctgaatagccaaggcaattctaagcaaaaagaacaaagctggtggaggcatcatgctaaccgacttcaaactatactacagggtcacagtgaccaaaacagcatggtactggtacaaaaacagcatagactaatagaacagaatacagaacccagaaataagaccacacacctacagctacctgatctttgacaaacctgacgaaaacaagcaatggggaagggattccctattcaataagtggtgctgagataactggctagccatatgcagaaaattaaaactgtagcccttccttacaccatatacaaaaatgaactctagttggattagacttaaatgtaaaacccaaaactataaaaaccctggtagataacctcagcaataccattcaggacataagcatgggcacagatttcacgatgaaggtgcaaaagcaattgagcaaaaattgacaaatgggatccaaataaactaaagagcttctgcacagcaaatgaaactatcaacagagtaaacagacagcctacagaatgggagaaaatgtttgcaaactgtgcatctgacaaaggtctaatatccagcatctatatggaacttaaacaaatttacaagaaaaaaacagtcccattacaaagtgggcaaaggacacgaacagacacttttcaaaagaagacacacatgtggccaacaatcatatgcaaaaaagctcaacatcactgatctttagagaaatgcacatcagaaccacaatgagtggttagaatttacttagaaatagtctcttttaatatcaatgaattcttaagtaaaaaatattattttatataatataacataattttatatgagtatgtgctaagattacaacttgtttcttgcctttttttctttcttagagctgtaggaggagactagaatattggcattaggagttgaagtccatcatttctttaaacatttgtttttcaaaagtttataaaagtaattcatggttggggtgtagtggcttatgcctgtaatctcagcattttggtaggctgagatgggaggattgcttgaggccaggagtttgagaccagccaggccaacgtagcaagaccccatccatgttttgaaaaagtcatgcatgtttatttggcaaattcagcaaagagagaaatcaaatttagctgtgatcctacttccatgttttagatcctttaagtctttttttctgttccataaatttatattaaaaaataaaatgggctgggtgcagtggctcacgcctgtaatcccagcgctttggaggccgaggtgggtggatcacctgaggtcaggagtttgagaccaggctggccaacatcggcgaaaccccatctgtactaaaaatcccccaaaaataaataaataaaatcagctgggcgtggtggtgggtgcctgtaatcccagctacttgggaggctgaggcaggagaattgcttgaatctgggaggcagaagttgcagtgagccgagattgagccactgcactccagcctgggcaacagagtgagactctgtctcaaataaataaatactaaaatggaggccaggtacaatgccttatgcctgtcatcctagcactttgggaggctgaggcagaaggatcctttgaggccagtttgagaccaacctaggcaccatggcaacatcccacctctacacaaaatttaaaaagttagccaggtgtggtggcatgtgtgtagtcccagctacttgggaagctgagtcaggaggattgcttgaacccaggaattcgaggttacagtgagctatgatcataccactgcactcccatctgggcgacagtggaaccctgtcttttaaaaataaataaataaaaaaaattgagattggtattgtacttattattttagaaatacttattttgtctatatcttgagcatttctttacattcttaattattcttcaggaataatagtttttagtggcttgatagtatcctatcatttgggtagggtattatatcatacagggtttatttaatcaattcactatttttagacgtttaaattattcccagttttttactgttgtatgcctagctctgcagtgtacatccttggacgtaaatatttgtacgtaattttgattatttcctagaagtaaaaaaaatcagataaggaatacataaatagatgcttcttcataactttctttggtatgtatagtagaatctaactccaactagcttaatcatgaagaggaattattggaactgtattagggcatcttgggtgaccctggggcagttttaggggctggaactggagtctctgtctcttgtgtctcttcatctttctttgcttctgcttcatttctgctgtctagagattgactttctcagcttcttctgtactcgtagcaggcaaaaggctctggtccctgcgaagttcccatgtttgtatcttctccattctagatactgtcccagacccactggcttgttcttgttccagattttgtaaagagaatgtaataagcctgctttgagccaggggaccatattactagtacagacatggctagatcagagagcccctgtcagagaaaagagttctgaggtaggcagatagcctaacaagtttctgaagccttttatgttacctaattgctctctagaaagactgtccatgtttagggtcagtcattttattaaaggagaattatttaacatgctagatggaatttttaccttgaatctaatgaaaagttttaaacctcaattcatttggcaaataattatcaggcacttcctatgtgtcaggtacctttctagatgctgagaatatatcagtcctacaagactaagttcctgcctgccctttttagtcagctgttagaaggtgagtttcctttgaactgcccttcaaaatatcctttcaaagtcttaatcagatttcgttttaccaacaatgtgacacagttaagcctagtgtaaaaaggaaacatctataatgtttcctctgttggacaccattcatttttttctaagtaaatgattggaagttgtgaggttataatacttgacatctaagaatattagcagtttaacctttctccttctcttacccccatggtaaggcagcagtagaatgtagggaggtgttcaggctatgactttctagtttctgttttctgcaggtttaagtgagatccttcacatttaacaaggctttgttaaaagttgagatgttaggggactagagttctccaggttggaaacttaactgacggaaaaacgtttgcaaagtaggaaaacaggtatgttttgaatttccaccagaaacaaattagactttttttcttgatttgtgcctgtcaggttggtagttaagtcacccagtgacaaagttgaaaatagtgtgtgtgagagtggagttttagaggaaaattcccttaagcaccatatttttacacttggcacctctgagtcggctctcatctagaaaatttatgatgcatttatgccaaggttagtgtggagtgccttctcatgagacccgatctcagtttcataggtcctccttcaagtgagctagggtaagttctagaacagcctagtaccttttgcacttgtgagacctcttgttgctggagttagggttttaggtgattttacttatttcagcttgagtcatattatagatgacattttaaaagagataccaactctctttcttttttcctctatttgaaaagcaaaacatggagaacagaaagtacagtttttccctttataagtcaagacatttcattctgttttgtagtttctaaaccagcctgggttcattgggaaaattaagccctaatgctctgggcatctgttatatgtattgaattaacactcctgtgcatctagattgataattgagaaaatagtcactgaaatatttgtgttttttggtttaaatgaggaatcctggctgaggaaggctgatgggaaactctctcccataaaacttatagacatgcaaagattatagctgagttgagtgtacattgatagggcaactgcttatgtagttccaagatggaaaataaacaagtcttaagcattactagcccactggacatgacccagtaaaaactgttctgctcttagtttccttaggcacaaaatgaacttggggaaaaaaacttctcaattgtagtttttatataaaccaaaacagattaatgtcaataatattttttgtgtgctaacattttaattttttcggcacttactataaccatcttgacttttttttttactatatttaaagcaaataaaatcagttatctttaagctgaggtacttgattagttttaaaaatagataagcaaaaagtacctcagcccactgtttgtgcttgtaaataatgtaattgttttatggaactgagtcctgggggaggaggacagcatgaggattgttgactaaaagtgtcagggttttcaggaagcacaaggattctatagctaatcttaaagtttccctctctaagggtcttttaagcagcagcaaatgtgaaataaatctacattgtatttctgccgctaaatcctgattcattgattgggagagccattattggtgaagtaaacgtacaggtgaaacagtgtttcatgggtaataaaaatgacattgtctatcttgaacgagtttagatttcttgatattaacagaagctgttaatttctcctgtctccattctcccccttttagaaagacgtttacaaggacctattttttaaaagcccaatttcttgttttaaaatcttcactgtgatattagctcatactaatttgagaactatcaggatttacaggttcttaaagtaaaagttttccttttgtcatcacctccatatttaacccagacataattggagttatctttgtcatagaaactgacccacacagcccaagccagtgaaaatgtaaagtctgttttactctctgaatcccctgccaggtgtcccatggggtaagattggaattattgactctcttgagaaagacttaatgaaaacaaaattgctaaattgctatctaacttaaaaaaatttaaatagttctgttttctccttataagatgaaattcaaaaccggaggcattaaattacataaagggtattttgttactttaagataggaaacagagaagcaataactttatttaaaaaaaacaggttacatggaaaacttgtcattgagaaagtattgcttgagctataaagaagcaaaaatattttaaatttcaagactttcaataaaaggtacattaaggaacctcctggtggcagcagttctttgtcaccagtgtcctcatttgagacacctgccaaatgggaactgattctgaattagcaaaacaaaactattcaatttgccatatccttttaactccaagtaaaataatatgttgagcgtttaaaaattctgattttaggcttagatcgtattatattttcaatgaatcccctgctatgtaacttataaatgccttaaaggtaaatcagggagtctggatgtaaattgttggggcgtttatataaagagattccatgactcctgctgcctctgtgcctgacattcctttgatgatgtaatgtatagacttggtaattttgttggatctcagttcagatgacctactagtaaagggatgaattgactgctctagggaattggaaaggtcaatggaaagaaacctgtggctagcatttgtgtaacagtaaaagctctgtggagagcaaagtctcaactgactcactggtttaattgtcactcctcattctgaatgccagttctggtgggttactgtgtactctacacttttcccatcagttgtagaacagttatcaagagtgagttgtgtttgtttccaaacttgtttctgccatttgttcttgttactgtaatttaattaactattattaaaccaatgagttttaaaaaaccaagttgttttcatgaaatccataatttaatgctttggaaatgataaaaaaaattactaaaaatttgctgcttagttatatttgggtaagagatctataacagaatgggataaattattaatgtccagaaggattctacattcagattgcttcaaagtatcttaagttctcgccataatttaaaagtccaaaatggaaatggtagaggatgcattataattatggtttatgaaagaaagacgttttggcgctctaacctgtagatccatataaacagaaagcctggtcctgtattacaagattagcaaatgaaggttcatttaaactaaaataaaatgcttaggtatgcttatcaaatgatttcctgctttgtatgactttttttccttatctgatcaactgctggtcctagtcgttactggttaaaagagcttctactgtattgcttcaaggtgtagagctgaaaaggtaatctttcaacatttaattcattcagtcacaaatatttatggagtatctattatttggaggcattccactcagcctcagtgatgaacaaggctgaaaaagcttctcttcttaaggaacttaccttctagtggcatattagtgagagtatagtgatttgaatagtaatgatttttctcaacagttgtagagtaataagatctagtctttgatttgaaggccagtgccacatctacgtgtaaactgctggttctcagccctagctggtaccctaataaaatgaaaagcttttgaaaaatcctgcatacagggctgcaccttagaccagttgaatcagaatcttcgagaatggcgcccaggcataaaaagatgtgtaggagtaggtaagtggattttaaagttgtttgatattgcccaaactaaattggataaccccaagccaatttgacatagcatttttattcctgaatcatctggggacaaatctgtatgttgttagtttgtcagagttaatgatttgtttgaatcttgctagagaagaaactttatgtgatataattttcaagggttactatcatattaatactctgactttcagcttttccttttagaaaaaaatttttttaaatgagttggttgaaattcttctctgactatagttagaggaatacaacttttactagtgtattttagttttcagaaacattttggtgggtgagaagcctcaagaaaagcatcacatattttatttgcttaaaatattaatgttcaactttcttcctccactgccacgacgttgcttgtgaaaaagcttgtggcgaagtgggggcaaaagaagaaaggtccaaatggaatcgtggatgctgccaatttttagcaggttctccaagagaaagtgaatggaaaagcctggaatctcattggaggggttgtaatcatcacatgcagcagagcaaggtcatagtaacttttgaggtgcctttttccaaaaggtttttgaaatatgtcacaaaaaaatacttgaagaagaataatttatgtgattgattgcacatagttgctaacagcaaagggagttacaaattatgttactgccaaattaaccaggaagaagaacgggaggaagatgaggattgaaactcatctatctggaatattttgtatgagttattgaataagatgagaaacaaacaaaaattaatgttcagcctgtatgaaacactgattaaggttagaaccccatgctgagccatggggttctttttaccagtcatggtatacatataattatatatataatgaagaaaaactaattgatgtcaaagatgttgataacatcttaaaataaaatatcctcttaagaatgatttcatttatacttaatatttaggcccagcaactttggaggttgaaagtatagcacatttatgatttttcttcctagctcttgcaaaatattagttgtgcatttcttgcttttatttatacacttatatcaaaagaggactagaagttagtaccctttacttttaggtatttgtttcactaataattctttcatattgatattttgtaaatcagttacatatattataaaaagtgttttattctgctatccatgagagatgtgatctagtgttctgtgaaaccaaacatttatcaggacactaaatcaacttctaaaatacacattacatttaattacaaattttgaattgaaaatgtaatcctaatagttcagttctgcccttagaataataatgctttgggagggggcacattactcgaggcccttagattttcaccttgttgtgtagaggtagcttcttttcatccctgatttgccttcatgtgagaattattcttctacttcatcttgtagcacatgtgtatctgcatgggcactcacacacacacatgccccttgaagatggaactgttaattttccctttctgtgatgcctttgcttattcatcatggtaagcctggtaagatggcttggtcagagatgtccaagaaggtggaaaaggcttgttaactggaagtaaaagggaaaatatttaaagacttactaggtgattaactgctttgataaagatttcagaggctccaccagggcacatggtgaaaaactggtagaaatataatgttttcttatcagcactagcagctaggagcaatttagcttcatgaatatctttcttcttctatccctaccttctgttttagttaaaatattgttagctcctgtgtagtacttagcagttttcaattctgtaaagtaaacatggttttttttttttcttctcagagttcagaaaactgataggcagtgaggttgaatggctagtgcagaggtattcagtaggtatatgagtgaagactcttctgctttccagtgatagaaactcaattcaatgttgttgaaggaaaagagatttattggtatatataagtagtaagttcagggatatagctgctttcaggcatggatggatttaggagcttcaggacactttctccctcttttggcttcatttgcttacaggctgtcctgtactggcagaggttgcctctggcagctctaggtttacagcctgccatttaatcaactccattgaagagggaaagttttttttatttgtttgttttttcctggaagtaccagcatagagcatgggcacaagttttaggtccattcttgaatcagtcatccttttgtggccagggaactggagtcccctcattaggcctgggtcatatgctactcctggatcatctcaaccttgactattgactattcctttgactgttttcataggagtaaactttgggaggctaccttatatttggaattctactagtagtttgaaacacatatgggggaaagaaggcttgatagaaaagctatttttggatattttaactgttccaaccattgcaagaggctcctggtttctgtacagaagaatttttgtcccagtttatcttttcttcttctgcatgtttccccacccccatcacctttgtttctgcttcttagcttaagtccattccttcatccaatcctttgtcttcctctaatatcttccttcgtggtagcagagaccagtgtcctcacccccttgagttgaggcatgatgaccattctcttccttcaaggaaagtactacagaatggaattgcacattggcatgcttaaaaacagctggttaatgagaactcagtttttcttgtgtagacaagaagctttgtgtttctgaagaccaaagttagagtactctgtttgaggtttccttaggcaatttcaacccatttatctctcgaggccccagaaggagtctggacactggaaatgaaggcctagtaaactcttttgtgcccaagatggtatgagaatggaggtgggaggtaatgctaaatgctctggttttcattccggctgtcacaagaataaaaatgacctaactgtattttgggcccccaggcagcactgaaatgacatgccacctgctgacctaatccatttcatttctggtactaggatagccaaagcaatttgctcaatttgcaattgactatttactctttaaagcagcaatgattagatctagtataagaaaccacatactttatttatcaagaattaaaacttgaaaggtggaaagttatcctttttggaagaagccatttaaatgtggtgtattttacctcagagagactaactatgcttttagaaagctactttttgctgctgtttcccaggaaggagtacaatctgctgatgaaatttaagataacagaagtgtttctcagcagcagctgaatggcacagagaactcggagactgctatatttatgctttaggtaaatttttgcaatttactagaaaaaaatctgtgtagcatacaagcagattaactcatgttaatccagcagctgcctcctctggcaaatagtagagaggggtgtatgccatagctgtagtcctgcacacatactcagttgctggacacacttcctttgtctcgaacaatgccaagagccacataggctgatgtgnnnnnnnnnnnnnnnnnnnnnnnnnnnnnnnnnnnnnnnnnnnnnnnnnnnnnnnnnnnnnnnnnnnnnnnnnnnnnnnnnnnnnnnnnnnnnnnnnnnnnnnnnnnnnnnnnnnnnnnnnnnnnnnnnnnnnnnnnnnnnnnnnnnnnnnnnnnnnnnnnnnnnnnnnnnnnnnnnnnnnnnnnnnnnnnnnnnnnnnnnnnnnnnnnnnnnnnnnnnnnnnnnnnnnnnnnnnnnnnnnnnnnnnnnnnnnnnnnnnnnnnnnnnnnnnnnnnnnnnnnnnnnnnnnnnnnnnnnnnnnnnnnnnnnnnnnnnnnnnnnnnnnnnnnnnnnnnnnnnnnnnnnnnnnnnnnnnnnnnnnnnnnnnnnnnnnnnnnnnnnnnnnnnnnnnnnnnnnnnnnnnnnnnnnnnnnnnnnnnnnnnnnnnnnnnnnnnnnnnnnnnnnnnnnnnnnnnnnnnnnnnnnnnnnnnnnnnnnnnnnnnnnnnnnnnnnnnnnnnnnnnnnnnnnnnnnnnnnnnnnnnnnnnnnnnnnnnnnnnnnnnnnnnnnnnnnnnnnnnnnnnnnnnnnnnnnnnnnnnnnnnnnnnnnnnnnnnnnnnnnnnnnnnnnnnnnnnnnnnnnnnnnnnnnnnnnnnnnnnnnnnnnnnnnnnnnnnnnnnnnnnnnnnnnnnnnnnnnnnnnnnnnnnnnnnnnnnnnnnnnnnnnnnnnnnnnnnnnnnnnnnnnnnnnnnnnnnnnnnnnnnnnnnnnnnnnnnnnnnnnnnnnnnnnnnnnnnnnnnnnnnnnnnnnnnnnnnnnnnnnnnnnnnnnnnnnnnnnnnnnnnnnnnnnnnnntgattgagttaatcacaggtctgacaaatatacaaaattaaaataagccacattttttagtacttaatctcttgattctgttgctttttactgtttgctggatagtcttacgttgtttttaggaacctatggttcctcagtgctaatttgttggatatagacagcagtttgctattcgtgactctaatgggtgtgtaattccctttcttgtatgcaattggcatttcagtatagtttacaatatggaacgtggaggggaccccccgagtaggacagcggctgctctttgtcacttgcagctgtgtttgcaagggagcatgctggcaaccagcaaggagagtgctgtgacaggtgggaagagcaaaaccagaaatatgcttctcctttctcctatgcctctttctatccctccttcccccgccacaccctcttctacctgaccttctgtttttcttctcttccccttttagaagccatctgtttccctctaccagttctatttggcttgcagatgccactgtacaggaatacactgtgttgaagctagcctatgcttgacctactgaacgtatgtatttgggccgggttcaacctaatggatcaaaaggaatggtgagggcataagaaatttcataacttttatacagcaattatggagactcagaaggacaacataccttactatcaggatttgagaaatgatagaggactttttaaagcctggctctgacagttctgtattactttctcttagagatgggaacaacattagtttgtgtgtaaaaagctgtttatattgccttggcctggaccaggcctaggcaagtggggagaaaaggaggaaaatgccccaacaatgataatctctcctttctaaaacttggtgtgaagcattgtcatccctgttgtcagtaacacaagctgtcattctgcagagctagtttagccattccctaacagacagctagttaatagtctcccttctgtggtctagcttcaattatctattcctcagacattgctggtgggaatgtaaaatgttacagccacttgaaaaacagtctgatagtttctcaaaatattaaacatagacttaccatgtgactgagcagttattcctaggtatatgtatttccaggtatagatcctaaagaaatgaaagcatacgttcaaacaaaaaaaaaattattttttttttgagatggagtcttgctctgtcgcccaagctggagtgcagtggcgccatcttgactccctgcagcctctgcctcccgggttcaagcgattctcctgcctcagcctcccgagtagctgggattacaggtgtatgccaccatgcccggctaatttttgtatttttagtagagatggggtttcaccatgttggccaggctggtctcaaactcctgacctcaggtgacctgcctgcctcggcctcccaaattgctgggattacaggtatgagccaccactcccagccctcaaacaaaaatttctacatggatgttcatagcattattcatggtacctaaaaagtggaaacaacccataaactgatggatagttaaataaagtgtggtatatccatacagtagaatattatttgacaataaaaaggaatgaagtactacatatagaatgatacatgctacaacatggatgaatcttaaaaacatgctaagtaaaagaagccaatgacaaaaggccttatactgtatgattctgtttataaaaaatgtttagaatatgcacctccctggagacagaaagtcaattaatggttgcccagggctgggggaattgtggatatgtgtgggtagttggggaatggggagtgactactaatgtcacagagttcctttttggggcagtggcaatgttctggaattaattctggagttgtgcaactgtgaatatgttaaaagccattgaattctacacttcagatggatgaattgtgtgatatatgaattgtatctcaataaatctgtttaaaaaagtattacatatttcatttggtctcagggcactgaattgtcttttaattcaaaattgtactggctaggagaacccatattttcaataagaataccagcctaataatggtaataacttatttgcatagtgtgccattgtttacccagagttttcacatgctttatgtaatttgatccccactggacctcaccatgcagatgaaattgacacaaagaaaaagtgacttctcttaagcttacacaaccaagaaatggtagagcaagtatttaatctcaggctttctggttgttagtcactgccttcttgtcagaacaatgtcagaacattgcaaagaaaaaataatatctttcagactcttaattatgctttaaccctttcagttcttgaatgtgactagaaaagtcattcaccttctctgtcttgctttccttacctgaaaaatggagataataatgcttcctaactaaaagtcatttacctttttgtctcggtttctttatccagaagaacaagccaggaatatttcctatctcttgggcatataataaggactaactaataaaaaaaaattataaaataccttaccagcctataaaaatgcttcatgataaaccatcaaggagtattgtttttccctttctttcatgttttcaactccagcagtgtataatagtaaccacttatgtcacttttcactaaggagttcaaagcactttacagacattatcaaattaatcctccctacacccctatgagttacatagggaactggtatcaaaagagctagagcaaagtaacctgcctgaagcctttatctcagactgggtccatactctaccaattgctcattaatttgtccctagtgatatttatttggtcaactacatttattttctaaaagtttgttacttgttaaacatgagaagaatgtttgaatagacttcctgaatcactttaaattagcttaaactttatcagaggtaaagctgtttattttgacctgcccatgtcatcctcaatctagactagcaaacaaacagctcagacttctgaatatacacttttgactcaaactttcatcatggggagcagtgccaactggtgtcttactgtgtggatgggagaaatccttgatcagtgtttggaaactactctcgtttgtccagacactcttcacagagtgaaggcaggcttccttctatgttgttgggttttatagtgtgtttacatgtagaaagctcatttgccatctgcattaccacctagatcttcaccgctgccatcatcatttaatattatttttgtcttgtggcataccattaccaacccttttgacagagaagatatatgagggaaatatatgcacaaaatgattagaaaggcctctgtgagattgccttagaatggcttctaataaccattaaaaaagcagagtgaagcctgacccaaacagtggaaaacattaaatcctggcttttctcttgccctgtatgacgagctctggtttcttgttgaggctgtcatggcaaggttttttggtttgggtttggtttgttttagtttttggtttctcttttgccatattgatctctcattttgcttgatggggaaatactttttttgcctccagaagtgggtttcccttgcatattagccttgttggtgtgctgccccataggaggatggccccagtgctattggcactgtcctgtgtacagttaattaaacctcctgctgtggacctggatttctgctgctgctattcactgatgtgtgtgaattgagtgaagcacatgtgcataagctcagggacactcttgaaaacaaaccctgaaaatagcaaaagatggagtcagggcagagccttcagctttcaaataagtttggtaatctggctagctgaatgccagagctcacaaagctgagaattgcatttctgaagataagacagactctttttgtgtttttatcttttcttcccaaaatgtattgagttttaatacggtactttatctctgtaagcaagaaaacagagccagttgtgaactcttgggctattgagtccaacccagtgaggagtttatcctcatttttctggtgaccacatctcaaggtaaaccatgagcagagtcttactaagacacctgcctgctgtggtctcataaaggggtcttggagcagaaaggggttaagaaactcacagaaggcaagagtagggcttccaaaaagtctagtaacctacgtgttttagagaacagatagtgatttcctttgaagttaggccccttctctttttcatttaactaaatattcagagagagaaacttgatttctaaccattctttttttgaatacattgtagtgctttgagtccttgtgattctgtttactaggacataaaatgctaattttagaagctctaaataaattttttccaattcctagcttgcttacttgggtaaaatatagcaagtaattagactggagtaatagtagtgtcctaaaaacatatcagccactggatcagacaacctctctgttctttctctacctttcccaactcccctcagcaagttttgactatgtatttttatatgaaattaatcagccaggaagtatattttcagcctctcctttgtgttagtacctggtataataatgtgtgctaatgcttatgatctttcatagggaaaaagaaataaacacacatggtagaccagggcagtacatagtgaagagttagcatgtggtatagataatgagaagagagaaagcaagaacagcttgggaacccaattgggactttgctccagaaacagaaagaatggaggcattctaagtcaggggaatcacacaagctaaggcagggatataggaatgaacacaaaataaagataagaactttgctgtatgtttaacacttttcataaaaagtgttgggccacaatcaaaaataggattaagtagttatgacaggacctggtactagaaggccttaaatgaccatactatccttgcctagaactagacttgctttgaaagcttcgatcagttcctatcttttgaatggaatactttagcatttgaagggtaaaatgaatttatattggaggaaataaggtttcattggcctgtctgctttttgtatatgtttgttttgctaaggcaatatattcagagaattgaatcagtgctttatcttgtagaaggaagtcaggcatatagttaagaaagcagatttttttttccttaaaaggaattttatttcctaattgtgaaattgtggcctgtttgcttagaaatgagaatgtttatgagtgaaagcacaggtttaatgtttaaaagagtttggataaccgttgcagaagcaaaatggatttctaacattgcttcctaatctgggttgcccgaaagagtaagagaagtcctgcatatccctgtgtgaaggttacacaggttgttacttgaaatgctgcttgtttggaaaataagatatgaaatccaaatgggggtggaaaggggagggggaaaaagtagtaccggggtcactggaagtgtaaagattgggaatttctgttgtaagttttcactatagatttgagtaggtcagctgaccctcaaatttctaattacttcttttaccttgcatgaattttctttttttttcctgctcatttaaggtacatttggtttaataatgtattctcaataaagccaaaaggtacctctagctgtactataggacagcttttgaatagtagtttgatttattttccagtttgttttcctgtgtcttgtgttaatagttgctattatttatctcatttaaacagtagtgcttaggttgaaacttgattctagtcaattttattatgatgagtttaccatcttctcaaatgtagtactcctctaatgcattgttactctatgaaggtaaaaacaaatttacagctgttaaccacaatcttaacctttcctcagtttgtttgatttactacaaattaaattctgtgcttgatataaatcattaagtatataatttaaagcagttgctgcgatccatcttttactgttttctgcactcacatccaaatgtggaacttcaagtctgaaaaacagtgaaatgattagaaaactgcccttctggagtccaaagtgagcattcatttcaatgtgggtatatgacagcggggtcctctcatctctgagtgggagatgcagacattgcattcaggatggaatgtttgcttcttgacttgtctgcctgatttaaatattcatacttcaccagaaggaaaaagctgctgacttctaaaagtgggtcagttttttttttaatggcccttttggcactttgtaacgtgttaatactgccttagagatggagaacagtttggcagagctcgtctttatcacttcaggggccaaagcttcactaggccagtggaaggagaggcattgcagatattaataactaatagactgtgatatgggctttacttgccattctgtttgcttttctagatatagaaggtagtatgttaatcagaaaggattaatttgaggaaaaccttgtattgataaaggtgatgatgtgggtaaacagaagtaacctgtgtcttcagatgcatggtgtttctgaacaaattccacaattgcataaatctgttttatttttctatttggacatgataactttcgaaagaagtccttggatagaataggatcattgataggttgtcagtcttattcccacatcatttatttctgcttaattattatttaaagtgtactttacattgattgaatttcttacctctaaaggacccaaatggcatttaaacatgaatgccatctttttatcctcacaaaattaaaatttcaggtatcttttatggaaaggaggggtaggacagtaggatgagaaaggaaggagagttagagtaataataggaattctagatggagagagatctggagatcctgattaccacatgtattagttcattcaggctgctataacaaaatacctcagactggatcatttataaataacagaaattcattgcttacaactctggaggctgggatgtccacgttcaaggcatcagcagattttgtgaggacctactgtctgcttcatagatagcaccttcttgctgtgaggacatagcaagaaggtgctatctatggcagaaggggaaaaacaagctttcataggcctcttttataaggacactaatctcatttgtgaaggagggccctcgtgacctaatggcctcttaaagacctcacctcataatacagttgcactggggattagatttcaacatacgtattttgagtggacacaaacattcagatctagcaccatgtcctagtcataagacatagatgagattgagagagttcaggttgcttgtttaggagacatgctatacatttcaccaatctctttcttcggttttctaggatttataaaaaccattcagtgattttagtccagtcttataacgtgtccctggcctgtcctgtacctcagcgtagaccagctcaagtggtgatgaactttccggagttgcactatcacacatactaatatggctgcttctaggatcttctggtttaccgtcaaattctagctcccagtttaaaatggccaaatacctgtccagcaatcttaaagtttggttcaagtattcgtaaaaatatggaatatgccttattgaggaatatgttttgtcatgtggctttcccacaggccccaagatgtgcttgctttttataaaaaatatttattatattaagttgcctggcaccctaaaaaataaccaggataatattgaactggtgcttctggggaattatttattcaacttcctatagacaatggttgtgttccagaaaatgttttgtgaatctcaaatcatattaagtatagtaggaaaattgccatttttaacacttaaacagacatacaggattttaaaaatagaagagatgaatcctgtccccaggatctcatagtgtaaaattttgaggaattctgggctctgtctttactataagacacaagatccttttgtaatagaaatggctactagtgtatttaagggttaaatgtaataatgtcatctggcgtactttcagatggttcatgggagaagaaagatgtgtgatagttcagggagcgtggaagggtatataggtatctgatttatcaaagggatcactatactatgaacttttatgtatgtttgaaattttacaaaataaaaagtcttaaaaataaatgttttctttgttttaaatctgggtcttcatgtatggagtatgcttataaagcaacaaattgggtaggacctgtacctttggaatcctgacatacatacatcacttaataaatcacactaccccagaaagaagcaggttattttggcctggctataattgaaaccaagatgaagagacttctgactttcagattaccccttagtttcccaatatacatttgactcagatgactaaaaaataatcagttttcattgtctttagtagtgtgcaacaaaaaatgttattgctcgaaagaagtacgcacagtgcccaaatcatggttgacatagtaatttccttgaacatcctaaataagatctcatttgttaatgacttatcttttccaccctccttactttttatcttttctagcgacatattagtatatattctaaaaagcatttgtgtgtattgagaaaattcagttacaaaaaaaggtgactatttccgcttctgtatttgaaactgtggtggtgggctatggggaaagagagaataagaaggtggatttttatacatgtttaaaaaaagagaaagaagtccatgcatctagtgcttgccttattatattcaccatgaaaagtcagtgagggcgacctatttactgtagaggcatgttcaaatctagtgcattgacaaaggatggggccaacctgggaaattcttactgtggctagatcaagaaccttaattgtgcgtgcgtgtgtgtgtgtgtgtgtgtgtgtgtgtgtgtgtgtgtgtgtgtcttcctgtcagtgtagttctaagggtgaaatagatttatatttaaccaaagaggaaagggggagctattcctgggcttttgctatttaaataatcaattcatgagaaagaatcagtgttataagaaaaaattgcagtggtatttaaattcgaacatatacagaatcctttgctctccaacatagtatgcagtttcatgtaagctgcttcaggatagaattgtgagcaagggtttgttaccagcaggaccttttaatacagtccttcagcacatactgttatttttggtgcactagattgtattagttgctaaaccctaattttctaatgtactgcagtaatgagtaatccagtcttttactctcagagtcattttacattgtacaagggctacagagccccaagccgtcacccctccccactttttaaatatcactattcagacattttctcttctacttataattagattgctaagttattttggaattaaagaatgctaaaaaaaacttttattgtctgtgccaaatagtatttttctttgtttataactaccagtagtgtcatcactgtagtgcaggtatttccttccagcacctccccaccctgcctccatccttcctctcttttccactgaggtgagaccattatgtttaatgaaactctgtttcctatgtgacttgtattatgttctacccactaaagtataatagtagagtgaaaagtcacttgggattactgccagaggttgttcagaagaaaccacatctagtaaccctgttatatctggcacagttcatactcagaagccagcacaaaaagacttggaaggttgcattcttctactggaacattttcagttacatgtgctttaggcttataaaaggcctaatctctttttcccaaaaaatgctgtttgtatcaaataagaataaactcatttgagggtttttaaaaatagatgtattacttggaagtcttgggaagatgcagaaagctaaacagattgataagtactcagtatttttcattcatgcagatatttttaatcttagggaaatttaaaaattatttcctctgactttagtcaaggactctagaaagctgcagattgtgcagttttgactgagatcctgatagtgatctgtaattttagtttgctctttataatattgaccttttgtctttactactgagaagggtggagtgcaatatcaaacttaattcagccttcgtagatctaaaattgagcctattcctctcctgctttttaagatattattgattcataggaggaatatgactgttagggtatagaactccaggtttaagataaaattctccatgctgacacttgcaagcttcctgagaattaatattattataaagatcatggtgagctacctccttcaaggtgggccctgtacttacctgactattctcaggcttccccatgtatccactatgcctgggacaaagacttggactttttacagccacgcatatattgatttagctaaacctttatttgtaactataagcagacaagaaaaaattaccagttctatgaagagaatcagcagattgaaagtggggaatgaagctgagtaatcgaaacaaattctccaccctacctatactaaaacagcgaatgcacgaaaacaggagataactttttaaacgtttcattagtattctcagtaagatttgagagcatattatttcatcagtaaaacaaaaataggctattttcattaccttcagaataaaagtcaagtctttagagttgtctgtcagaccccacaacccatccttcttccctacttttattcagcccactcactctgctccagtaattttgggctccttgctgttctctgttcatgtcaaacttgtgcccaccttaggtctttataacactgttttctctgcttggaaagctctttgatagtgctgtggtttgaatgtgtcccccaagtttcatgcgttggaaacttaatccccaatgtggcagcactgaaagatggggcctttaagaggtgattggatcataagggctctctcctcaggaacggattaatcaatccacagattcatgggttatcatgggagtggaactagtggttttataagaaaaggaagagaaacctgagcaagtatgctagcatgcttagccacctcgccatgtgataccctgtgctgccttgggactttgcagagagtcctcatgagcaaaaaagctctcaccagatatggcccctccaccttggacttctcagcctccatacctgtaagaaataaattccttttctttataaattacctagtttcaggtattatatcataaacaacagtaaactaataaagataatcacacaactgactcctttacctccttcaagaacctagaatagtatgtagcacatggaggtgctcaataaatagttattgaaagaatgaaatgggccgggtgcagtggcacacacctgtaattccagcactttgggaggctgaggcgggtggatcacttgaggtcaggagttcaaaaccagcctggccaacatggtgaaaccccgtatctactaaaaatacaaaaattagccgggtgtggtggcacatgccttataatctcagctactcaggaggctgaggcaggagaatcgcttgaaactgggaggcagaggttgcagtgagctgagattgtgccactgcactccagcctgnnnnnnnnnnnnnnnnnnnnnnnnnnnnnnnnnnnnnnnnnnnnnnnnnnnnnnnnnnnnnnnnnnnnnnnnnnnnnnnnnnnnnnnnnnnnnnnnnnnnnnnnnnnnnnnnnnnnnnnnnnnnnnnnnnnnnnnnnnnnnnnnnnnnnnnnnnnnnnnnnnnnnnnnnnnnnnnnnnnnnnnnnnnnnnnnnnnnnnnnnnnnnnnnnnnnnnnnnnnnnnnnnnnnnnnnnnnnnnnnnnnnnnnnnnnnnnnnnnnnnnnnnnnnnnnnnnnnnnnnnnnnnnnnnnnnnnnnnnnnnnnnnnnnnnnnnnnnnnnnnnnnnnnnnnnnnnnnnnnnnnnnnnnnnnnnnnnnnnnnnnnnnnnnnnnnnnnnnnnnnnnnnnnnnnnnnnnnnnnnnnnnnnnnnnnnnnnnnnnnnnnnnnnnnnnnnnnnnnnnnnnnnnnnnnnnnnnnnnnnnnnnnnnnnnnnnnnnnnnnnnnnnnnnnnnnnnnnnnnnnnnnnnnnnnnnnnnnnnnnnnnnnnnnnnnnnnnnnnnnnnnnnnnnnnnnnnnnnnnnnnnnnnnnnnnnnnnnnnnnnnnnnnnnnnnnnnnnnnnnnnnnnnnnnnnnnnnnnnnnnnnnnnnnnnnnnnnnnnnnnnnnnnnnnnnnnnnnnnnnnnnnnnnnnnnnnnnnnnnnnnnnnnnnnnnnnnnnnnnnnnnnnnnnnnnnnnnnnnnnnnnnnnnnnnnnnnnnnnnnnnnnnnnnnnnnnnnnnnnnnnnnnnnnnnnnnnnnnnnnnnnnnnnnnnnnnnnnnnnnnnnnnnnnnnnnnnnnnnnnnnnnnnnnnnnnnnnnnnnnnnnnnnnnnnnnnnnnnnnnnnnnnnnnnnnnnnnnnnnnnnnnnnnnnnntaaagctcttactaagcatcaagcaagaaaatttggaggaaaaaaaagattcatactgttgctaaaattttcaagtattgttcaagttctcaagtaaagagaaaaatcccacaaacttctcaataataaacagcaaccaccaaaaaagttacttacaaaaggataagaatcagataagcaccctctttttttttttttttttttttttgagatgacgtttcactcttgtccaggctggagtgcgctggcacgatctcggctcaccgcaacagaggcggctcccggattcaagcgattgtcctgcctcagcctcccaagtagctgggattacaggcatgcgccatcatgcccagctaattttttatttttagtagagacggggtttctccatgttgaccaggctggtcttgaactcctgacctcaggtgatctgcctgccttggcctcccaaagtgctgggatcacaggcatgagccactgtgccaggccgagcactccattttttatcaataggcctgaaggctagaagagaatggaatttcatagaattctgagggtacaggattgtgacactagaattttatacttaggaaaggcaaagaaagatatatttggactcacaaaatatactacaaacatagcctttctgaaagttttttggtagggatgtgcaccgaattagtcagaattaaagaatcagtaaaataaacaaaaccaaaaaatgagtctttgagatcaacaaaataaactgttagctatactgaccaagggaaaaaagattattattctggatattctagctagtacaataacatagggcaagaaaatgaaaaatactggccaggtgcagtggcttttgcctataatcccaacactttgggaagctgaggtgagaggattgcctgaggccaggagttcaagactagcctggacaacataacaagaccctcatctctacaaaaaaaattttttttaaacataaaaaatgctatttaaacaacagatgtatatcatcattatttgcagatgacctgattatctacctagagaaaccaggaaaatcaatgacttattacaaataataatagtaagatgtccatatacaaggtaaaatcaaaaccaagaactttgctttatgtcagcagtactctgtgaggaaataacagtggaaaaaatggtcgagtcagaaaagcaagaaaccttttaaaagctagaaatgaacttcacaagaaatgtatacctgtacctttacttttacttagggacataaaagagtttaaataaatgaagatcattcataccttctttctaagtggggagattgaacgttttaaggaagtcaattatcctgaaatctataaatttactataattctcttcaaaattccagtgaatattttggggaatttgacagattgagtctaaagttcacccagatgtagccaaggaaactttgaaaaagaattaaggagaatgttacatttctagcccagctgcccactgaacaacttcacttcagtgtcgtactggcatcttagactcaggatgtcctgaactgtactcattattttctctccagtgtttccagttatgttacttatgactgtaaattttaccacagtctaccacaataaaaaagccagaatcttaaacatcattgttgactctgaaagccttccttgattcttccctttcactcatctccgaaattcagtcatcatgttctgccagtcttcttcttagatatctttttaaatctatcttctttccataagcactactttagcccatgccattattatctcttgcctggcttatttaaagagtttctttttgaatcttcttgcttccagccttcttcccttctctttactgtagctagagtgaatcttcaaaaatgcaaatttaaatggttgcttaaaacctctctgtgtcttctctttgctcttaggaccaagtccaaaatcttaacgtggctcgcaaatttgtgtgatacatacctactttctccaacctctcttttctctctctctttcttcaaactctaacttttctcacaactaaatggaccctagtctttctgcatctttgaacttactggtctcccttctgagacactgttctcctccccaccttggtgagctcatacacatccttcaagtctcagtgtaaaactacttcttcctagaggccttctctgacctatagattaggttaggtccacctgttggttgtttaccctagtgtaccttattccctttatcctaacactcattatattttatcataatgatttgtctctctttgcttctaggttttaaactcaatgagagtcaggactccacctgcctattcaagggaatattctctggctaacacaatgtagtgtactgaatatgtacattaagtgaatgaagtaaccaacagagtcaaaacatactagaaggtttagtcagtgaacggtatgatgctggcaaggaacaaacagattagcagagcaaaacaacttaaaaataaaacattcatatgaattggaatttaatataatagagataatatttcagatcagtagagaaagatggatttttttcaggaaatggtataagaacaattggctgtccacttcaggaaaaaatatcaagtgaggctcctagtcaggactgtcttgattgcaaattacacattcagctcaaactagctgaagccaaaaagagagcggacatattgggaggatgttaaggtatcacagaaaggagggaataggtgaacagtattccctcaggaatgcaagaagcagcaaacctcttcagtcctcatagactagttactctttcatttatatcatatgttctccacttcatttttaactacggtaggctaactctgtgtggcagagaatgtagcctttagcagcttccaggttttgtcaccttttgaagaaaagtgttctctggcatgttgaaaatacttgaggaagtactttgatttgtgtggccagggtcacatgcccactatccccttgtagggctcagaccaatcactatatcctgggaaactgggtcatgtaagacttcttacacatatgacatgttggtttctgcaggtgcgtgtgtctcagtgtgtggatttggggaaggatgaacgtgaaaagaaagcctccccaggaaaggaggcgagtagcacagccatagatagccactgggagacctgtcatgagctggatagtcaccgtaatttttgtctgctgttatctctgttttacatcatactaaaaaacaaatttaaagtggattagagatttaatatataacattataaaaatactaaaagaaaacagtttttttgttctttttatcttggagtgtggaagaccttccttagtatgataagaagaccagaaaccatacaggaaaggacctaataacataagaggataaaagaaagaagagaaaccttatttaaggcaaaggcagtaaaagcaaaattgcaaaaacagcaataaaaaattcaagacagatatttttaacacatgtgtgacaaagggttattagtcttacatataaagagttcttatgaatctctaagaaaagtatgagcctcccaagggaaaagtatgcaaggggggggtgggggcactaatattaaggcaactcacagcagaagtaaaaatactagtatatgttacagaataggaagcatcagtggacagtaaatatgtgaaagatgattagttttattagtaatgaggaaaatgagatttaaaaccacagtgagatatcattttacttctgacagattggcaaaaattaaaatatccaacaacaatcattggcaaggataagcagcaagaaaccttatacactgctgaatggaatataaaattgttcaacaactttggaaaacaatttttgattttctagcaaatttgaagatgtgtatactttatgacccaccagttctcctcctagatatatactctagagcagcactgtccaatagaaatagaacagaaaacacatatgtaattaaaagatttctagcagccacctacaaaaaagtaaacagagttgaaatcaattttaagtctttgaaatccggtgtttatattttacacttgcagcacatctcagcttgaggtagccatattttaagtgctcaatagccatatatggctagtggatagatagcatattggacaatgcagctttaaagacactcttacagacatacagaaggacttgcatgagaatatttgtagcagccttgttaataataacagaaaatgggctaagcatggtggctcacacctgtaatcccaacactttgggaggctgaggccggtggattgcttgagcccaggagttcaagaccagcctaggcaacatggcgaaacccatctctaccaaaaatacaaaaattagccagatgtggtggtgcacacctgtggtcccagctgtttgggaggctgaggtggaaggatccctcgagcctaggaggcagaggctgcagtgagccatgattgcaccactgcactccaatctaggcaacagagtaagactgtgcctcaacaacaacaataatactaacaacaacagaaaatggaatcagtccaaatatcctgtgataggataagtaaattatgggacactcctatggtggaataccatactatagtttttaaaaaatgaatgaactgcaggtatatgtatcaacatggagaatttcatgagacttgggaaaaaatacaagtcacaggatacataaaaactaataaaacattatatatggataattatataagtggtaaagttagaagaaattcagaatagtaactaccttttgggcagaaggagagggatgcaattagagagaggctcttagggattcagaggtaccaaaactagcctgtttattagagattatatgtacatgtatgtatacatacttatacattcatatgtacattcacacatgtacttatactcttgtatgaatcattaaacatattaaaatcattaatggccaataaatatgaagcgatgctcagtttcattaataggaattataaattagaacaataatgaaattttttcactcatgaaactgataaattttaagggtatcaagtctgtgtacttgtaagagatagacaaacaggcagtccttactctattgatgaaagtatatatagccttttcagacaacagttttggaataggaatctacattttaaattaggctaccctttaacccagcagcatgatttctaagaatttattctcaggaaggattcagataagtgaataaagatacatttataaggatgttcattacagtttttttaaataatagtggagaattgaaaaaaacatttggtgtatttgtgagtgcacttgttaagaaaaggaagtagatgatactgattttcacatggaaatgtattcgtgacatattattaaataaacgaaggacatggtagcacactatgcagtgtatgatcccagattgttatataaaatcagaaaaatattagaaagaaataacggagcttatttctggggttgagagggattacatgatattttaatttcttgaaaaaaattaaatgaaattatattacatttataaataggaaaatataatgatattttcgctttttgtgagattagcatcattttgtgtagcagggtgatcctaactaaggacacaggacattgctctaggctatctaaatcaaactctggtgtgtctccttttgagaaatttgtagggattcaaacagttttctttttaaagcagcacttaagagttgggctttgactgtgttttaaattatcagctaataaagctgtggttttcatgttagtgtggaagagaacaaaaagatgtgcattggggaaaattgggtaactgtgtggcccaatccaatccagttccttgtacctgataatgcttctgctaactttaatcaagcatttatgtctcaccccatttccatagtctcttgagtgaatgtcacccctgagtacttacagattcttccagcttttgcgtatagtgttagtaacgtctctggaaaaaaattattgcattcttttccagacactattagacctaacagacaaagccagaggaaaaaagagtctcagccaaacctttttgatttgacctgcctcggagcgcctattaatctaaagagaaaagaatccactaactaaacaatgtaaattacataactgcctaattatgcatgtttattatcaacttttaagaaaaagaatgaattcgtaccggctgcatgaactactaggttaaatcctgccagaccctcacctcatgggtcctgtgtactatctttgggttcctgttgccaggctccagctcccattaccttcccttcctactctgggcccctccaacagtaatagtctgtgattctttgttgttgtttatccaaggaagtgacataatcaatctgagctacattttcttgctattaatctggcagtgctatatggaaaggaagaaatggggtgtgggagtatagttagaattatattattgtggcttaaggctaaggaaacaatttctgacactggtaagggacaaaaggtatggaaagaggttggaagggacattattgcagaacaatcaacaagattaggcattattgggaactgggccacaaggtagaggaagaaagaatgataagtgactctgaggctttgagcttgggtggctaaaaatgtatagcactggaacacagcttttactacgtgatcgcttgtcgtacatgaatttcctgtaaaagttcactcactggtgtaggctctagctccttatggctctgcattatttgcattttaggacatttatttatttgtgagcaaatattgatagatgctactgttttaaaatcagcaatttctctggtcagtctcctccacttcccccaaaaagtagaaattgctactggaaacacacacacacacacacacacacacacacacacacacacacacgcacacacacgcacacacacacactatgtggtttagaagaaatgatcgtcaccttcttaaagttacaaattaaaaaaaaactgaagtaaatatagttgaatgggaacataaaatatttgaatgcaaatgtgagatttagtgaaaattggttttattatgtttatgatgcagttgtttaaaagatacaaatatgtgttttaggattaaagaatctttttgaattttgtgttcaaggtgatataaaagttaaattttagtaacattcagagaacagactaatgaaaagtagcttatttatacacttgagactgaaaaagaatactttccttgttgtctctttttggatctttttaaaatgctggtattgaaatctgatattagcccccattggttcaaagaataatctcttgatcataatattagaagacaaatgatgaaaacctgggcaaatcatttggtaagaataaaagatcgtgcaggatcgtcttgttatgaaagaagcattcttgattggagcaagagaacttatggagagaaaaaataattttatattgtcttgacacccttttaaagaaatcagaatagaaactaaaaatgtaccttggtcttattctctggataagctcttttcagaggctgggattctaaacctgcagtagcttttaatgtattagcaagatattctccagatagagtcagcagtttgctctattgtttagcgttgattctttgtccaaagaccgtaatgaataacaacctactgtattagttgtatatatcagggctctcttcttgtacagagcgtaatacacttagttttgaaaataaatttgagtgaggaggatatttatcaaatcaagttataaagactatccaaattatgtcttcaattttaaaacacttttgtaagtattaaagtattttacctaccaattagggattcacattcttatcttcttctatgcctttgttattatttttactgtataactgcaggtggagtaaagttgaaatacttttaactaaaagcactctaacggacatttgttatttttaagctaggtgcactattggaaatgacatgaaatttattgctaggtttttaggttgtacatatttaaggaaatatagtttatgaagacagtttttttttttttttttgagacggaggctctagtgcagtggcacgatcttggctcaccgcaacctttgcctcctgggttcaagtgattctcctgcctcagcttcccaagtagctgggattacagacatgcgctaccacgcccagctaatttttgtatttttagtactagacagggtttcaccatgttgcnnnnnnnnnnnnnnnnnnnnnnnnnnnnnnnnnnnnnnnnnnnnnnnnnnnnnnnnnnnnnnnnnnnnnnnnnnnnnnnnnnnnnnnnnnnnnnnnnnnnnnnnnnnnnnnnnnnnnnnnnnnnnnnnnnnnnntgaggaaaaattcaacaagtatttgttagactttgtgaaagtcagtatcaagtagaattaatcagtgaaagagcatttccacaacattaaatgcaaaaaaattgaccaaagattatgagacaagaagttatcgttgacttcttgagttaagcccttaatttccacaaggtttagcttatcatgacagataacactcttttgcaagctacattttgttttgaaaaggtaatggtcagattaataaaccatgattgcatcaatattagacttgtggtacaatttgtagatccaatagaaatgaaagaggatctaacagtctgtagtcaacttgtgttcatatagtcctttggggcatagtaatacacattgaagcaaataaaaaattagaaatgccttaaaaggcaagcctttgctgggcgtggtggctcacgcctgtaatcccagcactttgggaggccgaggcgagtggacgatgaggtcaggagttcgaaactagcctgaccaacatggtgaaaccccatctctactaaaaatacagaaattagctgggcgtggtggcgggcgcctgtaatcccagctactcaggaggctgaggcaggagaatcacttcaacttgggaggcggaggttgcagtgagccgagatcatgccactgcactccagcctgggcgacagaacgagactctgtctcaaaaaaaaaaaaaaaaaaaaggcaagcttttaaagtataaagtaatattttagcatgtaaacttaaaagtgagaattacaacagaatcaggaagtcttagagtttcaggagggaaaaactttttttcctcaaaatgcagtagattgtataattattattctaattatgaaagtaatatgtttgatcataaaaccttcagccagttcagcaaagtgagaattgcctgtaagcttaacactcaactattaacattttgatgtatagtattattatttttatagaaattaatatgagattgtttcaaaagaaccatgactttaaaagttcagggacagtcctgagtacatgtacttgaaaattgaaataattttgcatcctgacaccaaactctttggaatgttgaaatttttgggataggaatacaaatgcagtttttgcacaactttttcaattctttttttgttgtatcccctcaagcccatccttcaaaaaaaaaaaaattgtccccagagatttccaactcaagaatttagagaatcagctactagcctattaaatttcaactgtagcaaatgttaccctgtttgtattattaggctgtagtgaaatgaattccttactgacaaataaaatggtaggtgctggctgcttccctttggcatgagataggctatgtcatggatagggactgacagttctgagatgttcaaataagaattttctatgtacttactacaaataaagtaaaatattggcttaagtatttttccagtgtgaattatatgctgaaaacaggataaaaagaagatataaatcattgtttaacaggtatcccctgaatactgattcctgggacagtagcttttccatatgggaacaataggcgtcttctcatagctctgtgtgttagtcttcatgtgatggaaggtgaataaggagaatgtctttagcacttgggtattttaaagatcttaagcagtgcatttcgttgattggcttgcttcattcttgaaagagttgtgtgcattaaagactgaatcaaattgcattgtattttgtgtgtttcctgtgcaggcatctgcattcaggtgtaggtagtactgttttcccatcccagaaagggcagggtgctcagttgcctttataaaggcaatttcttggttgactgcgattgagtgcagaattataatactgaggacttaatttataacagaaaaatgcaggagtgcaaacctgttaaaccccttatacatgtataaataaggtaaacgatggcagattagcatggaatattgtttgatgtgaataatcttaaaaacaaatttccttggcctgttcatgttgtacctgttagcacggagaaaacttgtagaaatcagtgcatcatctttgaaatataataaaatcagggagaaaaagcagagtgatgtgagacagctgctgcttggattggcagcctatttataatctgggaggctcgttgctagattgctgtgctgtgtgctatgctctcacacatcagataggaatgatgatttgcgtgcatgtgtgcgtgtgtgttcctgctctcagacttttaatttttcagaaaaggattccttttcctacataaaaatggagaatgctagcaaaagcagattttctgtgttccaaacactcaacagtctctccagtggacctctgggcatttttcaatgctgggagaagacctttggtgggccaggcatttaaagatgtaaggccttctcagcattcttcgtgatgctggctctgctgagtgggtgagtcatgtgggacagaatgtcgcatttcagtaccttttggctatctgtgcacgttagacaataacgattgccaagccaacgtgtctcaggttttttaattacggatttaaaagcccacaggagctctgctcatatgttaattccactgcttgactttaaaggattttttttttgcattttctaattcagattataaaagacagtcagccattcaatatggaaacagtttaccacataaacttgtttgaggggcgaacagggtagagaagaggtagctaaagctttccacaagagaaaaagtctcaatgctctcccttaggtttattttaaagggccaaaaagaggtatattaataaaaataaccttgacacctgtttatgcaaaggatcatgaagcattggaatgatattctaagtcctattcattgtcagctttcatgtaccttgtgcatgacatctacatcatggattgtctgcacctcaatattccacctcaggcagtttccccctaaggcacattttactacaaaacatatcccatgccactgagctggggtggaattttaattttaaaacttagtcaaaacataattttatagatatatctatccccaaaggactgaaaattttaaagccaaatataacgaagttttggatattttggtattttggtttaaccttagcccaggtctctcgcctaagtacgaatagtcagaaagccaacttcctctgataccaggatatatttagataacttggcatgatctgagactctcttttacttaaaggacattcttgggacattgtcaaaatctgcataaagtctggagataatagtattgtatcagtgttgattttctgatttttcccctcaacattttattttgaaatgtcttcgcctacaataaaagttgaaaacactttaatttacaatgggctatgagcagtcacagcccatcacctatacttgctccatcacatatctgccgatgactctgtcttatgaaaagccatattatgcctatgacttgcaaataattccagagaaaaattatgtgtttgtggagagagcaagagaggagaataaaaaaaatgtggtaaagataacatttttggggaatttgggtgaaaggtatataggaattttctgtgccattacaacttttctgtaaccctgaaattgtgtcaaagtgaaaattttttaaatgagattataagagcataatcaaattggaattttcttaggataccagagaatcattttcttctcaggtaaaggaatttttcttttgtagtccagagctatacatgattaagaaaatgttcagaccaggaagatgacatctctgctaacctaatcgattatcatggaaggtctagaattggtgctaaagcaggaagaaaggggatatctacttcatcagaaagtatttgaatttgacctaaaaaccaactaaaatgttcactttcctattggtcatattgtgtgaaagggacatagtaagtttgagaaaagaagaaattcagtggggataagacagaagaagactccacctctttgtatctgtggtatgaaatcatactctgttgggagatggagaaaagttgttttttttttttaatctgtatacatatgccccagagaaaattattttctttcaacatattcctgtcactgttatctctttcagagaaagctccttgtggataggcagtgtgtgtttattttcataaagtttctagaacaccattactcagctggctaatagtgttaatgacaagattaagaagcgaggtggaacagcatagcataatgctgatcttgagtagcttcctgtgagaaattatttattggaagggatgttcaataataagggatgatggctttatagactagtctagaactaggagtcactatggtatagaaaagggaaattaagggatcatcaggatggcaggtttattcttaaagaagtccctaagtctttctttctttctttcttttttttgagatggagtctcacttggtcacccaggctggagtgcagtggcacaatcttggctcactgcaaccttcacctcctgggttctagctattctcctgcctcagcctcctgagtactgggattataggcgtgtgccaccacacctggctaattttttgtatttttagtagagatggggtttcaccattgtggtcaggctggtcttgaactcctgacctcaagtgatccacctgcctcggcctcccaaagtcctggaattacaggcatgagccaccatgccaggcccaaaagtccctaagtcttaattaaagtatagaggaaaaaatagaagagaatctaaactaggtggccacatcagagagaagcttaatattacataaaaagcaattaaaagcattgttttaatggaagaaaagtgatgttgcttaataacaagcagaaagcactttcatgggagaaaggaggctacaagaaaaagagaaggacagaggaaagagatatagggagagagggagggaaagttttgatagcctagacatgtaagtgggagaaataggaaagtcagagaagataataatttaatggaaggtagatttatgcctggatcaggttgtgatgggaaggaggagaaagaaagaggaccagcaactcagttagcccaacatataaaatcattaagctgggagatatccccagacaccaccttgccctttccttgctttcataaccaattgcaactaatccagtatttcccaaactgtgttccttagaacatcagtgttcccacatgttacaggttgctacatgctctatgccattcagtgattctttttgtttgtttgttttcgagatggtgtcttgccgtgtcgcccaggatggagtgcaatggcacgatcttggctcactgcaacctccgcctcctgggttcaagcaattttcctgccttagcctcctgagtagctgggattataggcacccgccaccacacctggctaatttttgtatttttagtagaaacagggtttcaccatgttggcgaggctggtctcaaactcctgacctcaggcgatccgcccacctctgtctccaaaagtgttgggattacaggcatgagccactgcgcctggcctccattcagtgattcttaacacacattagcaactgaggataaagaatcctttagtaaaaatctatttaagtgtgtttaacttggtatttggtaaacttactaacctctttttcaggaacacaccttttcatatctgaggggataccagtattccatatgacacagtttaggaatgctgacctaaccctttctagaaagagagcagtcttctttcttaatttccttacctggttttggaaatgggttttggcacttcccaaatggtagtctggttccgaaatgttacctaaatcccttctgctcatgacttcttactctgggcaaaatagctctgtgcaagacagactcacaaaatgttcaaaatagaaggggcctcagtaattagccatcagctgtctctctgccagatcccggcctgccttatggaaggctaagaaaccattgcttacacttaaactgcatcctttcataagtccctggcttctttcacagaccaaataatacaaattcctttaacttttcctctctttttttctaattgtttttgttccttttccagattgtccacatatcactcaaggtctgagaccttagcctaaatatactataatagaaaataacaaggccgggcgcggtggctcatgcccataatctcagcgctttgggaggccaaggcagacagatcacctgagatcaggagttcgagaccagcctggccaagatggcgaaaccctatctctactaaaaatacaaaaattacccaagtgtggtggtgcacacttgtaatcccagctactcaagaggtggaggttgcagtgagccaagatctcaccactgcactccagcctgggtaatagaccgagactccgtctcaaaaaaaaagaaaggaaactaacagtatatgagccgggcacagtggatcatgcctgtaatccctactgcttaactacttgggaggctgaggcaggagaatcgcttcagcccaggggttagagaccagcctgggtaacatagtgagaccttgtctctaaaaaaaaatattaaactacactggcatggtggcatgtgcctgtagtcccagctgcttgggagactgaggctggaggattgcttgagcccaggagtttgaggctgcagttagccatgatcatgccactgcaacctagcctaggtgacaaagggagaccctgtctttttgtttctttttctttttttttaagagacagggtctcactttgttgcccaggctggagtgcagtgatgggatcacagctcactgcagcctcaatcctcccgggctaaagtgatcctcctacctcagcatcctgagtaactgggactacaggtgtgagccaccatacctggctaatttttaaatttttttgtagaaatgggggtcttgctatgttgcccacactggtcttgaactcatgatctcaagtggtcctcccaccttggcctcccaaagtgctggaattacagggatgagccaccacaaccagctcctgtctcttaaataaaaaaagaaagaaacaaacagtacatggttttgttctataatagaaaaataaccatatgattaatttttagttcttttatgtcattctcttgttcctctccttacagcatttgtgtctctttaaagaaaatattgcttagttatctctgcttcactggaacactgcacacacacagatcttttcctttcctactagtgcaatgcctgtattttctgttcccatggtggttttttcctttccaaaatgaattattctgcccctcctcaggaattcctgaaatgtgaattcaaagaagataagtggccaggcatggtggctcatgcctataataatctcagcactttgggatgctgaggtggaaggtttgcttaaagccaggagttcaagaccagcctgggcaacaaagtgggatctcatctctacaaaaaaataaaataacataaaaattagctgggcatagtggtgtgtgcctatagtctcagagacttgagaggctgaggcaggaggatcgcttgagcccaagagttcaaggcagtgagctatgatcatgccactgcactccagactggatgacagggtgagaccctgtctctgaacacacacacacacatgcacacacacatgcacgcacacacatgtgcaataagggtctctttgattgctttctgtggcacccttggtgatgcttgggcccaggatgaatactgtttctagattgacaatactgatggaggtatggtgtatacttgttaatagtttaaaatgtggtgaggttattttaaaagtctgtctaatggccaggcacagtggcttatccctgtaatcccagcactttggaaggccaaggcaggaggatcgcttgagaccacgagttcaagaccagcctgggcaacagagtgagacccccatctctacaaaaaataaaaaaaattagccaggcatagcggcttgcacctgtagttccagctgctctggaagctgaggtgggaagatcacttgagctcagaaggtcaaggctgcagtgagctatgatcctgccactgcactcccacctgagtggtagagtaagaccttgtctctcttttttttttttttaaagaatctatctaatggtcccttccatattcagatactcctcagtgtatgatggagttatggtccaataaacccatcatacattgaaactatcgtaagtggaaaatgcactttcgacttagaatattttcagtttacaatggatttttcagatggaattatcaggacataaccccatcataagttaattgagaagcttactgaatgcatatcgctttggtaccactgtaaatcaaactattgtaagttggggactgtctgtatttgaaatgcttagtttaagaataatgtttttcaaccataactatcatggctttataggacatcagcattcaaaacaggttgtttttgaatttggagtcggtacagttggtgcaggccccaaaagataacttaaaatatagagaactctgggtcatgttcatatttgagaaatttcataacttatagagctaaataggaccgaagaggatagtattttatattctagatcatcagatggtgttagacgcaagggaagcagaaaagtgaaagtgggagctagttgtatccagggcctgctttaaaagatacagcagtaatccacaagcctggtaagcacttccatccgctgcgtatgtacacggtgcttccctcctgctgctgcgcaaagacccatcgaacagtgtcagagcaggcgctcctggttcttggtggcagttctgatgaaaaattggtttgctgcaggatactagcagccacttcagggaattctagtgttgtccccaaacatgtcataggatcttactctgcagatgtgtgaatgaaatgccatgtctgagaatgtcaatagggaacaaaagaaggcattaggaaatgacaccactgatgccacaaagtagggatcaaatccaagaaaaagtaatcatattcccagcctgattacttttgagtggtagagttgcccatttactggtggtcattaaccaggataaataaaatggagtggtgagaaacctgccttcacaatagtatctttgttttagtatcatcattcaggtctcttcataatgatggctaaaaaaaaaaagagtcaaaatgtagaaaatagcaaaatgcccttaaaagaacacaatttgaaatgagatgacatgatgattaagattattaggaaccctgaaagttaagcatatgggctttcctgcttcttaatggttgtgtggtccttttctacctaggagatgtaactcacagatgtaatatttcttacttgcttctgtgttgcaatgttgtgttatcatttttagagcagagctactgtttaactgtcaagcagaaatataaaaacaaaggaaccagttaaatctaaccggagactaatacgactaaatttcattgctaagattggaatgccgtctgattgcttaagttaatataaaagtaaagcatttggatcttggaaaaattggtcacaggtgaatagagtgcaatttatagcatcagaaagaacatagtactccataatatctactccagaacttgttcaggggtatggtagagtatgtttaactaaattcctctgatccctgcttttagccagctttgcctggattggccacatcttagggctgtgtggacctggttcattcccacttagtttataaaagcccatcttattttttggcgtggtgtacatgcttaccaatgaaagttagcttctggattagttctcaagtgaaaaaaattaagatgattcatttgacatgatacttaattttgatgtgactttatttggaactcagatcccaagctaatcaaaaagtaccattaaaagcgacattcttttcccctatcttctagaaagaattaaaaagcagtttcttcttttcctctttagagaagataaagcgaaaaaccaataactgagaaattaacagccacaaaagtttgcaaatggagtctgtgagtttcaaaggctccaaattaaaaaaaaaaaaaaattagattaggcttccagaatgagaaaggcttattttcttccccctttctttttcttgccttattttgaccaaatgagtttgtctttaaacacagttttagcttcttacatgatgtgtgtgttcttgctgcttacggtatgatacattgattttgtcataaaaagtcttgcattggattgcattactctgagatgttattttagaaattggtgatgtgcatctgtgagagcgtgtcatggtatgcagtaagcagtgccattaagtgagttatcaccatctgctcctacctacagttattcttggtacagcatcatcattttttctacaactatcaattgctatctctgttttcttgaatttaaaaaaaaaaatgtgttgtccatatcaggattttgttcatgtttaccaaattatcttttgccaagtcatgtgacatatgtacctgtatggaatctcttccatatgaaattgagtcaaataggttagtgggatttaaaaggcatttaaatggacacataaattatgcacagacggctatttcaggatagctgttttctctgaattgatgagagatgaagtctttagacaaatttctttcagttttaaggagattcttttctttttcccctatagatttttcccaactggccaaatacaccagaggctaagtgttaatactatactgtacattctcctgaaaatggtgctgagcttgagcccagaccttcatgatgcgcagctaacagatcattgggcattctggggaggtacattttgatgcttttataagaaagcttttgaagcataggacacatttttttttttttttttttgagacggagtctcgctctgtcgcccaggctggagtgcagtggcgcaatctcagctcactgcaagctccgcctcccgggttcacgccattctcctgcctcagcctcccaagtagctgggactacaggcgcccgccactacgcccggctaattttttgtatttttagtagagacggggtttcaccgttttagccgggatggtctcgatctcctgacctcgtgatccgcccgcctcggcctcccaaagtgctgggattacaggcgtgagccaccgcgcccggcctaggacacattttttaacccctacagctagttagagtaatgaatttaaccaaaataataaattttcattttgtgttccaattgagattacagagttgaaaaggcaaagtaataagagcaatttgggtggctatttacactgtgctttgctgtttgatagccttttctgtggaaccttggtttatttctaggggaaagattagtttttcctatcagtctacatatttatcaagaacagtttttagggacaaaatcatttgcatttgatttatgtaatctttgttaattttgtagaaatttggaagaaaatattatagtgagtaaagataatgacttcttttccagtttggtttttttgaggagatgagggaggtgttttttttttttcccccttaagggcaaatcctgaactgtaacttataaatatggagctcttccttgtcaggagtttcagcttacaaatagcttcctaccaccacagggagacagagtgttatcagtccacacacccaaagcaagaaaagaacacatccaactagtatttgcaaagagtagtttacagtcttgttagctttcaatatactttagtatctcctacttctttagtcgttctgagtgctaaaaaaacaaatctgattttttcctttgctagaactatgagaagatagcaaatatgcctgttaaaaattaatagatgtaggccgggcgtggtggctcacgcctgtaatcccagcactctgggaggctgaggcgagcggatcacctgaggtcgggagtttgagaccagactgaccaatgtggagaaaccccgtctctgctaaaaatacaaaaattagctgggtgtggtggcacatgcctgtaatcccagcaactcaggaggctgaggcaggagaatcgctggaacctgggaggcagaggtttcagtgagccaaaatcacgccactgnnnnnnnnnnnnnnnnnnnnnnnnnnnnnnnnnnnnnnnnnnnnnnnnnnnnnnnnnnnnnnnnnnnnnnnnnnnnnnnnnnnnnnnnnnnnnnnnnnnnnnnnnnnnnnnnnnnnnnnnnnnnnnnnnnnnnnnnnnnnnnnnnnnnnnataggtctgcattctagatgatagaatcatgtaatgattcagttcagtttaccaaacatttctgagggctgccaagctccaggtagtgggctataaaatcagcaagacctagtctccccatgttcttaaggtgctggcagtatagtagaggagaaaaacataagctacaaattgcagtgtaaaatagattatgtcatgtgccattttaaagttgtacacgggtgctctttgaatatagagaagggagatattaatcctgagtaggggattagggaagggtttatgtaagaaatggtgtttgatctaggtcttctagaatgggtaaggtttggacaggtaggaaaggtgttgcatgagagagggaataatttaagcaaaggcaaaggtacagaggcaggaaaaagcattttgagttctggaaatagcagataattcagagtggttgaaggaatggatataatgggaggcgaagtatagttgttaagggccttaaatgccttacctaagagtttagggagaagactctgggaaattttgagtcatgaaatgacatggtgatatccctttttgagaaagattgttctactagcaaaaggatctacagtcacacaaagacatttaggtcaacaacagaccacatatatgatggtggtcccataagattatagtggagctaaaaattttctgttgcttagtagccatcataactacttggtagcgtaatacattactcatgtttgtggtgatgctggtgtaaacaaacctactgtgctgccagtcatataaaactatagcacatacaattatgtacagtacatatttgataataataaatgactgtgttatcagtttatgtgtttactttttatcactactttaaaatatactccttctgcatagatagatagatagatagatagatagatagatagatagatgactgtaaaacagcaatagcctcgggcaggtccttcaggaggtatttcagacgaaggcattgttaccatagaagatgacagctccatggatgttgttgtctgtgaagaccttccagtgggataaggtatagaggtaaaagacagtaatattgatgattgtgaccctgtgtaggcctaggctaatgtgtgtgtttgtgtctttgtttttaattaaaatgcttaaaaagttacaaaaaatttaaatatttaaaaatagaaaacttaaaacataaggataaaaaaagtatttttatacaactgtacaatgtgttttaagctgttattacaaagagtcaaaaagtttaaaaattaaactttataaagcaaaaaaattacactaagctaaggttaatttattattgaagaaataaatttttaaaatctcaaactataagaatcctagaagaaaaccttggaaatacttttctggaaattggcctaggcaaagaatttatggctaagtcctcaaaagtaattgtaacaaaaacaaaaattgacatttgggacctaattaaactaaagagcttctgcatagcaaaagaaactatcagagcaaacagacaacctacagaatgggagaaaatatttgcagtctatgtagccaacaaaagattaatatccagaatctgtaaggaacttaaatcaacaacaacaacaaaataaataaccccattaaaaagtgggcaaacaacatgaacagacacttttgaagggagacatacaagcagtcaacaaacatgaaaaaatgctcaacattgctaatcatcaaagaaatgcaaatcaaaagcacagtgataccactttacaccagtcagaataactattttttatttttttatttttttttatttttttatttttattttttttttttttttgagacggagtctcgctctgtcgcccaggctggagtgcagtggcgggatctcggctcactgcaagctccgcctcccgggttcacgccattctcctgcctcagcctcccgagtagctgggactacaggcgcccgccactacgcccagctaattttttgtatttttagtagagacggggtttcaccgttttagccgggatggtctcgatctcctgacctcgtgatccgcccgcctcggcctcccaaagtgctgggattacaggcgtgagccaccgcgcccggccccagaataactattattaaaaagtcaaaaataacagatgttggagaggctatggaaaaaagggaacacatatactgttggtgggaatgtaaattagttcagcctcggccatttggagattaatgaaagaataaaagtaaaactaccatttgacccagcaatcccattactggatatatacccaaaggaaaatacctcagtctaccaaaaagtacacttgcacttgtatgttcattgccacactattcacagtagcaaagacatggaatcaacctaggtgtccatcaacagtggattggataaagaaaatgtggtgcatatacactggaatattacacagccataaaaaagaacaacataatatcctttgcagcaacatggctgcagctggaggccattatcctaagggaattaatgcagaaacagaaaactgaatattatatgttctcatttataagtgggagttaaacattgggtacacttggacataaagatgggaacagtaaacactagggactccacaagtgagtagggaaggatgggagcaagggttgaaaaacttcctgttgggtactatgttcaccatgtgggtcacaggatcaatagaagcccaaacctcagcattatgaaatatgctgttataagaaacctgcacatgtaccccttgaatctaaaataaataaatataattataatgtttttcaaagaaattaaaattagcgtagcctaagtatacggtattataaagtctagagtagtgtatagtaatgtgttaggctttcacatttactaaccactcattcactgactcacccagtacaactaccagtcctgcaagctggtttaccgtttttcatctttcgtagtgtatttttactgtagtttttccatttttagatatatttagatacacaaatacttaccattgttacctatggtattcagtacagtaacctgctcctaggtttagcccataagcaataggctattaccatatagcctaggtgtgtagtaggctgtaccatctaagtttgtttaagtacattgtatgatgttcgcacagcaatgaaatgacctaaggatgcatttctcaggacatatccctgttattaagcaacacatgactgtgtctactttagatggggagagatcagttaggaagacattacacagtactcccccacttacctgcagtttccatttctgtggctttagttactcacggtcagctgaggcccaaaaatattacatcactactctttcgctttggggccattattaagtaaaataagggttacttgaacacagcactgtgatactgccacagttgatctgataaccgagatagctactaagtgaccaatggcagtctgggtaggaaggggtgggacagggagagatttcgtcaggctactctaagcgtgcagtttaaaacttatggattattttttctggaattttctattcacagtgcctatgccactcatctcacattattatagtatataatattgtgttattatgaggtgttgttaatctcttacccatcaatcccattactgggtatatactaatacccagtttaaccgggtttaaataagtttaacttacagattaaactttatcataggtgtgaatatataggaaaaaacatagtatatatagggttcagtactatctgcagtttcaagcatccactgggggacttggaacatactccccaaggataagggggactgatggtaaattttcccctatgaggactgaagtacagcagcaggacagaagtacaagacagtgcaaagactaattagatgtaaagagttggggggatgtgatgaagtaaacatgcttagaaatcccagcatgagctcttagggtatcattaagatgagaaactgcaagagagggaagacaatgagtttggccttaagcaggccagatttgagttgttggtgggatattaagatagaattagaaatgtgggtgtagggttgcaggagaggccagcactagagatatagatttacttacctctactatgttctaggcactgtgctaggtactttatattgatatatgttacctcatttaatcttcacagccctttgaggtagctacttttatctccatttaagaggtgaataaacagagactgtcgtgagttaacttgcgtaagaccaaatagctagtgatgagggccagaattctgtccaaggtgtgtggtccttcactgtttgtggagataattgcttcattgagactgaatgttgttatccagggaatgactatagggaggaaacaaagaaggcctggacagaaacttgaaaagcatctgaatataaaagggtctaagaaggagctttctgggccaagagaaagagaattaagcagatggtgacaggaaagcagagaggcccaagaagagcatggtcagtaatagtgcagctgcacaaagaggtcaggaaagacaaagatttgaatactttctgagggaaatggatagatgatcacacatggatgattagaaggttagggtaaagatggcatgaacttcaggcagagcctttggcctggttgaaggattctttccggtagtaatgaacagctcaggactagggattatgaaggtaaaaaggaaaaggggtctagtgtgagggagaacatagtagaagtggtttatcatgggtcccaggatggacaggaagtaaagaaggtgatagtcatctggaaatctagatagagtgaaggacctagagtgtgcaggttgcttctaatttttgtgcctaatgttttaaaattaatgttacactaaagaagtttttgctctttttgttttgttgtgttgcatagagagaataaaaagaaggtaagagttaagagtgatttttttatctttgcaatcaagcagtaaataaaaactcgtaaaattcccctctgccaagctcatggacatccactattttgctttagggaacttttgttagctaaatacattgcttgaaagaacatctgtattctgcgggagtcagaaaagagaaaggacctaaaccaaaactgtttcttgaatttagaaatgaaaagcagtgcttagtaccaccaagtgggacatgtcttgaaatcctagatttccagagcgagaaagtatcttagaaattgccaatcttcttacttcaacaattggttcattgaacacttttttttttttgagactgaatcttgcactgtcgctcaggctggagtgcagtggcaccatctccgctcactgctgcaacctccacctactgggctcaggcgattctcctgcctcagcctcctaagtacctgggattacaggcatgcaccaccacacccagctaatttttgtatttttagtagagacagggttttaccatgttgggcagattggccttgaactcctgacctcaggtgatctgccctcctctgcctcccaaagtgctggggttacaggtgtgagccaccatgcccaacctcattgaacacttttatacaccctaccactagccaggctaaaaagtgaagttacaaattaaaacggttaattctttccctcaaggagttcacgatctagtggcaagatcaaagagtccagtaactcctttaagaagttttgtgataaaggggaaagggaactataattaagcagatgcctgttttctgttgatcacttttttgagaggggtgtgtgtgtgtgagagagagagagaaagagaaagttttttatacagaggagacttgatcatgcttatttattatagtaggagagaaaggagctggtatgatgctgttcactgcctggttactttaattgcccccaacaattcagacttatgaatgaactgatcattattatcctcagtccactgggtaggggtgtagagttagtcagggagagacacagtgaatttccaagataaggggaaaagagaggcacagaaatacatatatctttttccttgttcttctctaacttctgtgggtcaaggctttgcacgctggcttagaaaacctgttatttcttccacagccaagattgttttgttttgtgattgttgacttgcagtattatgaattaccaaaagaagagaacccaaaaagcatactccggtgccaaatataatttaattttgagttattcataccactattcccaaacaatgtcgtaaagcagaaagaaattcaggcattagagtcaggaaacaaagatttggtttctggctttgccacttaactgtataattttagacaaattactaaatctccttgagtttcatgttattcttctgtaaagtatcttcacaagattgttgcgaggtataagtaacataatgtatttaagagaaaagcctttgttaactgtaatgtcagttatatttacaaaatgctgacattttaaaaatagttgtgtattttggactgttcctggtctcaggtgacttaatcattgaattattaaatctccattattaattttctttagaaatgcccaggagactgcttcatgagtgtatatcaggagagagctttagtttttgtctttaaatgattgttctcattcctgcagtaactctcaaacttggcatatttttctcccctttcttttagtatgatatggttaagcaactaaatgaatgttcctcagacttccccaaaatttttgattctgggatagaagcaggaataatcttttgttagaagctgaacaaattaggatacttatttaatgaaaatactgtaaagtgactgacggcccctttatctgtttcaaggaaacacttagcacctaattgtgtaagccagaaaaatgcaaggtgatgaaagagttataccagatgaaatgactgttatcctgagtaaccacacattctggaccaaaagacaaagcagaacacataaaacaatgaacgagcagaattatattaattgtattgtgcagtgactaagtggatgggctctgtagccaaactgcccaagttggaagtctgctctggctctgctatttgctacttttggaatgttggaaagttacttttctgtgctttagtttctccatctgtaaaatagcatactatatagtacatatctcctaggattgctttgaagattaaattatgtaatacatagcgtgcttagaactgtgcttgccttatagtaagtactataataaatgtgtgcagctgctattatcgttacatgtttagatgttaaattgtatggttcagacacttggtataatagggtttcacagatcattctaggcaggtagagtcaagaaaagttttataaaggaaatggaatgtgtcagaaccctcaaaggtagatggttaaacagaattgggtgaaagaaaaaaggtactccaggaccagggaacatcatgaacagaaggtgagaaatgtgaactaatggccgggcgcagtggctcacccctgtaatcccagcactttgggagaccgaggcgggcagattacctgaggtcgggagttggagatcagcctggctatcatggtgaaaccctgtctctactaaatacagaaaattagctgggcatggtgatgcacgcctgtaatcccagctactcaggaggctgaggcaggagaatcgcttgaacccagggggtggaggttgcagtgagccgggatcacgccactgcactccagcgtgagcgacagtgagactccgtctccaaaaaaaaaaaaaaaaaaaaaagtgaaatgtgaaccaatttgttgagttcactgagcagggaagagtccagtctgattgaaggatctgattaagatggagggtgaacactggtcaaataagtagtggaatgggagtggatagggttgacaagattattttgtagttgcattcacattttacagttgcaaacatagcattttgcagttgaatttacatttatttacttaaatctaacaaaaattatattcagatttatttatatgagatatgtaaaacatatattattattttccttttattttataaatgaatatactggaactcagagagtgtgacttgtccagcagcaccaggttttcatacacaaaaccgagtcacatttccaccatatcttgccatttctcttcctttgctagatatacaggtaaatttgacagccaatcaaagcagactcttttcccgtcttctacctttgacccatggagtagctttcaagacattggcacttctctactgaagcaaatctgggtcaagatgagatgtatgctgcccatttcctgagtccttcaggaaagcaagagaggaattttgattaagtttagctcatcttttcagaacccaggccatatgtggtccatagtgtcccggatatgcttcacagtgtggaactctgctctgtattttctttaataaggacacacacacaggaaaatttcaattgaagacctcacaaatgttttgagattttattgagttatcatctgaacattatggattagtctaggatttcacatgatagagtgtatgggcgtatgtgagtaaacaaatacacattgtaggggaaggtgctgaaatgttaaagttaacattcccaaatagaaaatgggatagtttgcaggttactttctgaacttcacttcgtgttaattttcacctaccagttggtgggtagaacaacattaaacacattttactttagtacccttctgttcttatctggatcatggtaatcccaagtacagacagaaaaagaagaagcagatatgcgattaaaaatgaaaataacataacaacacggattattgtgatagatcctgtacctttttaaagactctgacattccacttaggagtaagatggaaaagtcccttgttctaaaatttgaaaatgataaaaataagtcatattaatggaaattaaagaaagaatatgtccattgttaggttatgtaaaagggtacacatctcacttctttcacatcgttttttgatttaaattaatgtaactaaattttaaaatgacggatttaatattcatgctagcagtttatttttaatgtgaataaaattaacagtaaaactatcataaaagatagatggggccgggcacggtggctcacacctgtaatacccagcactttgggaggccacagcaggcgaatcacctgaggtcaggagttcgagaccagcctgggcaacagggtgaaaccccatctctactaaaaatacaaaaataagctggacatggtcgtgggcacctgtaaacccagctactcaggaggctgagacaggagaatcacttgaacttgggaggtggaggttgcagcgagccaagatcacgccattgcaccccagcctggacaagagtgaaactccatctcgaaaaaaaaaaaaagaagaagaagaaaaaaggtagatggaagtatcttctgtaaagtgccacagattcctggcttcagcgctacctggattccttgaaaagacagggggcccttttctcatctcttagaacctcactatcactttgcatgtttttgaacacatggtaggtatgcagtgagctagtgttgatagatgtctcgtcacgttatggttggttggagggaagaaagatcactttttaagttagtcactctatatttaagtgtttttgtaatgggaaatcacctgtaaaacgagcttgcaggaacgctctaaagattaaaactgtgaagtgtgtggcatatgctaggcacttaataagtaaataatagctcttgttattgttatctttaaattttactgactgttgttctgactttgactttgcattttctgagatctttgaaaatacatattgttagtacctgttgatttgtattttgtgcctttgaaggaaagaatagaaatattattccaagggagggttgttggtcttaaaatatttttgtgccatttttattgtaggcaagtatatcacattctaataggcgtttaagacagttcaatacttaatacaagtgtatctttttaaataagacatttgaccagctgaatagattgtagtaacctgttgtaaactagtttcagctgaaatctcactgatcccactagatggcgttagttcattaaggcataacttcatcctctagctcaggcagacagctgcctgtgtagatgaactgattttagtatctttagagagtgaatgtggcagtaaacttttagactccttgttatttatatagcgtgatttgtggaggttattcagaaagtttaggaagatagaacactgagggcagatttattcaaactaaagaactataacaagttgcaatatttcgttaggtgcttattaattctggatttgacttagcctttgccctaattgtatatacaaccgaaagattaagaatttactgatttctcatggttttttgccctattaaaataattcttgtttgggcttctggaagcattggaaaacaaatgaaaattgggagtacacattttttaaagcatgaagtttataacatttaattttaaaatcatttggctcttatttataggaactatgtcaacagtgatctacttgtcagttaatctggttctttaatcgtaaatgtaaaataacagtgaacatcctaattctttaattctctcttgtctgaatttgaattattttttatctacaaagactgttttatattagaccagcccattttcaaagtttaaaattgtgcttttccacaggcatttgtaggctccaaataaacttttaaaattgtatgttttatttttcttactgttcttgagagttctgaagttgaagttttttaaagaaatgaatacgattcacatgcaaaaaaagcatttccacatttcattagaagtgtttcttttttctttatgatcagattcatacagctagagtaaattgtttcagaattggtgggatgatccgtcttgagctatggaagcttaattgtgctacaaatattattcttttattcattgctcatagggagtaagtagttggtgctgatggttcccctaatgtttatttaactattccagtataaggcagttcacatttcttagtaaaaggatcgttgatagtttcatttacctagtatgtaataaaaagctgagaataatcaggggcatttgctaatggagtcaaaataacctgttttataagtcagaacaggaaggtctgaacatttggtgcccattaattaagttaatattgcaaatgaggtttttgcttttcttattatcttgaaaccttcaaccagaaaaagcaactgcctaagattatttggtatatacaaggcgttaatatattgtgcaaatattctacagtctgaaaaatctcaaaatctgaaacacttctggtcccaagcataaatttgtataaattttatacaatattttacatcattttgtacatgaaacaaagttttgactgcatgttgactatgatctatcacttgaggtcaggtgtgaagttttccagttgtggcatcacgtcagtgctcaaaaagttttggattttggagcattttggatttcagatttttcagattaaagatgctcaacctgaatttttggactgcggttgctcttggtaactgagcctgcagaaagtgaaattactgatgtgggggactgctgtattagttgggtgtatacatgcatgtgttaaaatttaactgcataatctcattttccatattcagagacatttgcagtaagagacaaatattattgtaaagggaaaaagtaaactttgttgtgtagtgcttatctgtttccctgtgttttttcttgagggtagccatgataaagaaggggaataaatttcgaacacatgtaagtatgtgtgtagtgaatgggagagagggagagatggtattttcaggaggcataaactgtattttacaaagacatcttttagatgatgagtcctttagtcttgaggagacagttcaatggaaagcattctaggcctggcagatacagccctcatccacagtaaaagttaagtgctatgaaaaagtaatagtctgtgctatgcaaaccaatatgaagaaaagtgagtttttgtttgataagaggtcaaatgagcacagttctttaaaacttttatgttgaagaaaagaatagagaatattctgtcatagctactgataaaatatttcagtttatgaaatattgtcacttacatgttttaagtagcttttaatataatcttagaacaaggacttccttctctcctctaccccttccctactccccagtgtctcttatttcttatctattaaaagtgaaatccatttcctttggtcaaaagtacaagttttttacagtgtccaagacatctcaaattgattcactttgttatatagaaaacaccatctgtgatgtcagaccatttcttagaaaattgactgttaagagctcttttgcattgagttatttggtttttatgaagatgaacattggatgaaatttcttaccagtatgcataattcaatgattttaagaatctatggaaaataaatttaaacatttttaaatgaaatgggataagaaaaaggggagacaggattttattcattggtatatctttttaattttctactttgtgactccgtttaaaaaaaccaactctgtaattttgaagcagagattctgaaattaccacttttctaaaaatatcacttacagctgaaacttaatatattgaagcatttttgttctgaggatgatacatattttcataaagatgtatttccaaatggaaacagcactgaagcttctgaaatagggaacctttccaaaataggctgtggttgcctgggtgaagaatattaggttgcaacactcaaaaaggaaatcctggcataggaagcaattgatgaagggcaaatgtctgcagagtgtaatgaagcttttaaaagcacttgtgtgggcctgcatgcaaggccttgccagtacttttcaaattaaaattcatgtgctctgtagtgtgctgagccatactcatacttccatctttacttctcttctacataatatatcattcttatttttaatcttctataagtactagtcatcatcctagtgagaattgtagcgttttctcactctgcccttcgtgaaaatgtcatcatcattatgggcagcagggcagctttatggtgttttaaaaatcaagttcatcagcatttttaagctatcaatttcttgttttagtgtcattagtactatgaatattgaatattttatgactctttagttttataaaatatttttttcttttagcagtgggggagaggataggtattatcctcattttgtaacagtattaacaccgaagagagtctgagtgatgactagacacatagatggtgtgaaaagaaaacttggcatttttttttttttttgaatgttagcctttaacccaagctctttcctccatacactatatgcacaaagtttttaggactttttttagtggcactctcatatacagattttcttttcaaagcaagaaataatctgagctttaaaaagattctattgaggaaattattctactcctgtttttatagtctcagaatgtctcaagataattttaaatgggtttgtgctatttgggggagaagagaaagtcacagaaacttacctgattttgcaaatccaaaacagttagaaatcatagtattcaatctttagaaaaatttctgtaagcagatatttatccaattaattcattttatttgaattcatttaatcgtgagctgtgttttaagtaaaaannnnnnnnnnnnnnnnnnnnnnnnnnnnnnnnnnnnnnnnnnnnnnnnnnnnnnnnnnnnnnnnnnnnnnnnnnnnnnnnnnnnnnnnnnnnnnnnnnnnnnnnnnnnnnnnnnnnnnnnnnnnnnnnnnnnnnnnnnnnnnnnnnnnnnnnnnnnnnnnnnnnnnnnnnnnnnnnnnnnnnnnnnnnnnnnnnnnnnnnnnnnnnnnnnnnnnnnnnnnnnnnnnnnnnnnnnnnnnnnnnnnnnnnnnnnnnnnnnnnnnnnnnnnnnnnnnnnnnnnnnnnnnnnnnnnnnnnnnnnnnnnnnnnnnnnnnnnnnnnnnnnnnnnnnnnnnnnnnnnnnnnnnnnnnnnnnnnnnnnnnnnnnnnnnnnnnnnnnnnnnnnnnnnnnnnnnnnnnnnnnnnnnnnnnnnnnnnnnnnnnnnnnnnnnnnnnnnnnnnnnnnnnnnnnnnnnnnnnnnnnnnnnnnnnnnnnnnnnnnnnnnnnnnnnnnnnnnnnnnnnnnnnnnnnnnnnnnnnnnnnnnnnnnnnnnnnnnnnnnnnnnnnnnnnnnnnnnnnnnnnnnnnnnnnnnnnnnnnnnnnnnnnnnnnnnnnnnnnnnnnnnnnnnnnnnnnnnnnnnnnnnnnnnnnnnnnnnnnnnnnnnnnnnnnnnnnnnaaaagaaaaagttgcccaaaggagctcaacccaccattaaaacctagcccagtgtgccagattataatgatgtaaatcactaatgaatatcatgttatttgtaagggagtgtttaaaaacattaagtgaagtagtaatttttcagtagtctaaattttaatgaaagcatttacttatgtaaattggagctttatttttatatattagttttactgttttgttttcactaaaaatagtcactcttttctttatattttctcatgaaatccttccgaaccacttctagaaatggcatcgtcttgccataagtattttgttttctccccatctagtttttatgaagtagtgctaactctgccttaatttgatttggcatccctgcaattgaacatttgtaagtatcttgtattatggcccatctgggttgtcatagaaaccaaagacctccatcctcttccctctagttaaaaatggaatgcaaacagggcttcaaagtgacgtttttctagtacgagtgacagccctgtgaagtgcagaacagaaaggtttcttattggttttattctcccatggcctatcataccagttaactctgatgcacacagcctttctcttgaaaatctggcaagatactaatggaattttaaaaatgtaagcatgggggaaaagaatgtagttaatccttttcctgttcttttcttatacaaaaattcagtgttagctagcagtgtttttgttttcctccctatgttattaggtggtctgttgatgctgtggtgcatgtgacggagacaccaactggagcttctattgttagtcttgttatttatttcctaggttatatcaatgtgggcttatctcattagaatctacaggtgcattggctaagtacatggcaatactttatcggaatagaaatttgttgataacagtgatatctagtgtgctgtcaatggacctggtgacagaacatcttagagccccatttccagcccccctggtggtcacagaacctttgacttaaccttgatggtttttcagtttccacattcccttcagattctctaccagaaccatacatggctttaagtttttcttcttagacttctgtgatgtttctgcttctgaagcagctatgttagtaagttccagtgaattatttcagttgtgttagcaaaatgtctgattttatggttaagatatgttgagctattgctgtagcattacttagagtttagagtgtcacattcttattttaacataggttttgaatatagaagatgacacagtgacctctgaacgtgaaacaatgaaaaagtgacatataaatttatttatttatttatttatttatttatttttttgagacggaggttcacttttgttgcccaggctggagtgcaatggtgcgatcttggctcactgcaacctccatctcctgggttcaagcgatcctcctgcctcagcctcccaagtagctgggattacaggcacccaccaccacacctggctaatttttgtatttttagtagagatggggtttcaccctattggccaggctggtctctaactccaaacctcaggtgatctgcctgcctcagcctcccaaagtactgggattacagacgtgagacaccatgcccagccataaatttatatcttaataggaatgtttcagaggggttggattaaaatcattagacaattgaatttgacagatcattggtcaattttaagtgtctttacaacttttcaaaagaaaaacgttatagagtctttaaagctgtttaaaattattcaccatttgactgttacctagtttctggtaattgtgtacttgtctttagtcccatatcgcagctaatggtcattttcagcagtgaattcagaagtgctatgagtactatcatatcttgatgagagagatcctgcaactctcagtagagtatgaagaagtagtgcttagcttctgttacagctagaggtgagagaatatattttctaaataacactgtattccttggcatatagtgtagaagtgaataatttgtttgcatagcatagtgagggaaatagtgtagcagtttcttcgtgctaaatatgttggtttcttctctatagtttgctgccttcactaacaatttgactggtactattgtgttgtcttattttgcttacacctatcaagcagttaaaagggctaatgtactgtcctcagctctctagtcaatcgaaaaattagaatctcccctagatcattatttttacttatcaatgttgtttaaaaagactagagatgttgctggttgtttagtaaatgtcatgttgcagccttgcagaatattgcgactttctcttagcacagaggataagacaagccttcctgttcaccactgctatgcctcatcctcaagagaaaagttacgatgtttctatatactggaggcagtaggtgcttgaacaaaatgaaacatgatgaatttctcacccactgggatacataaattctcatgtaggtatcagtcccttatcatctctgtgctttgtcatcactaaataagtaacataatatttggtcctttcaaatctgtgtttttagatgtatttctgcatgttattgacattgttcttcctcttctaacccactaatccattaaatattcagctcctcctaaattatacattttttgtcctctatagatatatttttaaatttcccttctcaaaataagcttgcattttgaagtacatttgttagaaacaaggtagaataattctactttctagtctcaaggaacagtcttctaaatgtaaagaatagaacctggtggaagtatatactatgtgctatttcactgggtacatattagtttatctgtttagagacctataatcaaccactagcagggaaacttgccttactccatttctgcaaagtaataatttttaattattattgatagaccaagttttatttttaatctcaaaaaagtttccttgagttagcattgcacaaaatatatactctcccaggtttgatcttgacctctgtttgtggtcctgttttctctatttactgctctcttctctgtttacatagtttttaaattttctaataattttctttgttgatactctgtaagaaatggtagggttctggccgggcacagtggctcacgcctgtaatcccagcactttgggaggctgaggcgggcagatcacttgagctcaggagtttgagaccagcctggccaacatggtgaaaccctgtctgtgcaaaaaatataaaaattagccaggcgtggtggcaggtgcctgtaatcccagctattcgggagggaggctgagggaggagaattgcttgaacccaagagtcagaggccgcagtgagctgagatcacaccactgcactccagcctgggcaacagagtgagactgtctcaaaaaaaaacaaaaacaaaaaaaggccgggtgtggtggctcatgcctgtaatcccagcatcccagcactttgggaagccgaggtaggtggatgacttgaggtccgaagttcgagaccagcctgaccaacatggagaaaccccgtctctactaaaaatacaaaattagctgggcatggtggcgcatacctgtaatcccagctactcgggaggctgaggcaggagaatcacttgaacctgggaggtggaggttgcgccgagccaagatcacgcaattgcactccagcctgggcaacaagagcaaaactctgtttaaaaaaaaaaaagaaaaagaaatggtagagttattttgcatgtacatcttctgtttcctaaaatagatgtggaaacttcttaaataatttaacttgttaatatactacatctgttacaatactatatactcagtaggcatattcatttaatattgtcttcaaaccttatactgcctaccactctatccatggccctaacatcctttcacatctaagatgagagagtgattagcacagtgcttgcaaagcagcaggcaaattgatatttgtggatgactcaaaggatgttctgagaaccttttctaaactgctttaaatttgtgtgctaataacacagatggaaacctagctgtgagtaagttaccaatctttaaaacaaagacgactagaatggtttgtatttgtagttcatattcttgtcctctgggattcagtaatctttttagcctctctccacagtggtacatgtatattcctgggtagcaggctgattgctactgatggtactgaaatgttttgataggagcaaaactgtgctgccatcctccttacgagcccagtgttcagaggtgacctgtttgcacatgggcctgtggtgtatcacttttttatacaagagcagtagaataaggtctgactcgagttgattgaagtggtagttttaggttctgataagaggacctattgctggtgagggaggttgaaattgcagaatgagtttgcagcatgaggcaggtctgcccagcagcaggttgatttgcaccgtgagacaagcagcacacataaacagatggcccaacaatgagtcagaacaacagatcctgaacaggtagattggcttttgtctgattcttaacgtggttatagagagtggaattttaatttgtctgccacttttaaggctgcaaaacaagcatttagtgaaagaaattctattcattgggaaatgaaaaatgttattaggcagaggagaaatctgattgtcactggatctagacattgagaaaccagcattttcaggagctgtttcacgtaggcatgggctggcttcatcttttggcatacagttattcaactgtatcattttgctgaatcctctagtatgtaacgtgcagcaagaaaatagtaaaatgatgtcctttatatttggattttaagaagtatagtcctgttatttgcaagtacacttctgatatttgggttaagaaaagcatttttaaaaaggatacactagtgataagtgtcataaaaacatacagcaatgtaagtttgtaatggtattaagcaaaggaaaaacattcatggaaaaaaatccctctgtttcatacatcaagcataggaaaaaggaagagtgtagtagaattcctagatctaatcatccatcttcaaaatgtaaatgtaaacaaacatttctccgccaaacactttcagaaatactaagcgtcttattaattttcaaaaccaagattttgtgatagttttatatctctagaaaagtgttttaaatatggcatttggtgaataaattggtgtaccacttgagttcctatactttaattttgtgattatcacattcactgtaccatagactaacatttacaatggatacatttgtgcccaaagaaagtaagttagtagtcagcagtattgttaggataactattgaccttttttaggttactgtggttagggatatactcagaaacacaaactgctatgatggaaactttattctgagttgctgtgaaggctgttatgccattagttaaggcagagttataaatatagctaccttttgtttcccaaataattgggatcctattcaagattaattgtgccaacacctactttcaaaattgcctttcattttatctgctcaagcatgtacacctagcctttgctcagggtagaaaaagcactaatctacctttgtgcatatggagagtagcattcctggcactgcattaaaaactccaggagaatgcattattaatggaatacgtttctctctctctctctgtctctcaaaaagggaaatcatttatgtggccactgtcaaggatgatagggacagacttagtgctagttcttaaccagcatattttttaagtgagttactgagcaatacataaagagaaatgctttagcaagtaaataccacatgtagcttgtagacaccaatgtgatctaattgtaatatagatcactctataatgtgtcaacctgtaagctttactaccttgagtactagatcctatgtttttaataggatgccacattatcaaaggttagaaaaacaataatggctaggcatggtggctcactttgggaggccgagccaggagggtgacttgaagccgggggtttctgaccagcctgggcaattcagtgagacctcatctctacagaaaacttaaaaattggctggatttggtggtgtatgcctgtagctctagctacttgggagactgaggtgggaggatcacttgagccggggagtttgaggttataatgagctatgatcacaccactgcactccagcctgggtgacagtggagaccctgtgtctaaataaataaataaaaattatttttttaaaaaaagccatatactgaaaataataatgaatttggggtttgaatattatgaagattaccagaaggtttttgaatcacttttgatttaaataagctcccatcatttgtttactggtttccagctttatgtttttggtttgtttttgtctacacatgtataattgagctgaatatgtgtgccaataagtaacagagctgcgttcagcttctgcttaagtctgcagtattaaagtcttccttttgttacatgtgctggtcttgcagactctgtagagccttatcaaatgcagccagttggtgctgctggtatgaaagcacaggggagctctcatgtggaaggttaatggagtgtaattataaagaaaaatgaactgctcaaccactctatctcactctacctgcaccaagagtgacaagtgctctgatcttttataaacccgggagtagaggtttaaccatctaaaattatgacagtataactgtcacacaaacatgctgtgaagtataggtatgcacccctgtgtaagaatgattccttcctgttaggggagtctctgttaggacaggagcaccttcagccaccaagagcagctgcttgttaaacattgcacttttgtgtcacttcttttccactgaatttgttccattttcttttcctaaaagtgctttctcccctatgattagtggcaaaagtggatagcctgctgatgagtgggttcgttccactgtatcccatcagacaacaaatatccatgctttctccaagcaagcctatcacacttgccttagcagccaacctgaaatcagctgtattcttataaaggggatggaaataattgtctcttctcattctcaacatctaagcagagtagactctaggacgcttaggtacagtctgacaattaggtctttctcccaggtctgcatatagcacagagattatacacatttctgtgggctcaagatggagttagattcttacgtcctttggttgaaaatattatcagaaatatttagtaaggaaaatgcagcacagagggacaaggacagagaaataccagggagacattcaaagcgtgtgatgactagacaaactgttactagtgtgtcacgttgccagtgaatattgcaaagtcgtcctactactggaacatctgaagggtaagctaagcgagctgggttgcagagctgggttgatttagagcttttgccagctcagcacagagttgaaataaggtgttgcagaatgatgcaacagcaaaacccctgacatcttgttcttacaaagcctaaaacataaccactcttggtgaggctgtgctgcctactgagataagtaaattcagcatcacatacattaggcctgtggagactaagcagaagtgatggctgcgtcacttacacagcagtcttactgactgagccctggtcttgcctgatacgtggaggaggggcagccaggattcctagtagcagctctgaaagcagggaggctggttttaaaacctctctgtgtggtttgtaatggtatttccgcagcccctttgcatatgggttttgattatctgagctctatttcaaaagacaaatagctacataatttttatggcagtaagataaatctgttagtgaatcaaatttttaaatccagctttagtggatggtaagtaaagtttgctatgatttactttaaaaacccaccagagcccaacactttacccagtctaaatgttgccagtgtccattccatttttaaaattgaagtcattattccagaattgaagtttttggcttgaggctgtaaggttagcaacagaatcttaaaattgtccatcatactatgtagacgaggaagtatatcattcttgttgggttggctccagcatttatccctgctcagctgccctgccaaagagactgtcttggatgacagaagtacagtctccctggcactttgaagcaagttatctagccctgcccagtccctttaggaacgttcccagcctttccaagtacttagagcagtttctaggaaattcatctcagataggcactgtcggtgtaacaggctccagagctatctcgccagctgcccgagcctcatctctgaccgtcccgtttcccagcatcactgcatccactggctcctctcctgcttggccctttcaatttattgtgtaggttactctacttccttggatctcaacagcctgactctgtttcctggcagttgactgtatctagagaatatgaccagaaagggacatctctccctgttggcccagctccccatactagtgtactctgcattcagtcagtctgcttggatgccacccaacctcctgtgagccccagaaaagttggctcagaaaaatgagctccagctttttgttagtgaacagagcttcattcaaactagttttccagagggcagggattccatattctagtcccagttttactatcacagaactgtgtaacttttgattggtcacccatcaccatgtgcctcactctccccatctgaatcaatgacagttaacataattagccctgcacagttctgagagtcttatttgataagagggtttcaaaatttacaatcgtaaagtgctgtgtaaatatgtgattacttatacacacaagcacacagaaaaatcacatcattagggaaatatttgtggaaaatagtaccatcatttttcatttagggtctactcagaaagtaagattcttgaaaaattattaaatagtcgtatgtttataacatgaattgttttttcttaatcatgtaaattaaatgattttgaaaaatcagagtactcagaaatgagaaccagttaaatgtaaaagatgttagtttcagtgttctggttggattccaagtgagattattacattttgcttactgtaattccctagatagcttcagcaaggtagttttcagttttctgacctctactctacagctctttaaacaactgctttctccaccacttgaggtagctgcggttcagtggtagaggaacggatttcagtttatccttgtgtcagtcttatgtgacaggggttaaattatatgtaaggtactttaagctgttttgataaagtaggcaccattatgaaacgtattactaccattttcatttccactgttatattttgtatatagttgtgtgtttccctgtgtcttcagatattttatcttagcatattctcagaactcattcatataacttgccttttgtctatgcattttcccactaaagtcacatcccagctcttccattatgataaaattttgattagtcagaaggccatttgaattttctggttatctaaaatcatttttggttcaccttgtgatgtcaaaaaattttcttttttgagacggagtctcgctctgtcacccagcgctcaggctggagtgcagtggcgcgatctcagctcactgcaagctctgcctcctgggttcacgccattctcctgcctcagcctcccgagtagctgggactacaggcgcccgccaccatgcctggctaattttttttttttttgtatttttagtatagacggggtttcaccatgttagccaggatggtcttgatctcctgacctcatgatctgcccgcctcagcctcccaaagtgctaggattacaagcatgagccaccatgccgggctgaaaaattttctaagtaatgtctaattccactttcctagtagttacagttcagtgagtgtaattaccgtctgagggttgaaaactggtggcccatgggctttatctatcagcaaagatactttgtttgactcacaatattaaaagcagttcattgattagtgttattagggcactgcctctccagttgatgtcagtccctatcatgcctagtatcttacacctggcctgcttcattctcttgtattaatattacttgcctggcaataggtaataatcctattacatgtcttgcaaaatgtaatcatcagtttacatgttcacgtgagtgagatttcaacccctgaatgaaactgttctttaatgatttagcttctttgggtgtgtcaggatcatctttgtgagcatttttctctgtgcagtgctatagaggtaaagatatacatcaggaatgtattcttgccattcagagattcataaaattttaatagaagataatttagagattgagtgcagaagctgagaccaagattgggtaaataactgaccaaaggtcacaaaccttgtttagtgacagaacctaggtttctcgacccagtgtattatttttacagcacaatactgcctctctacttattttttctaaaagcagagcggaggagaaaaagtgcacgcgtgcatgtgtgtgtgtgtgtataagcttactgcagctgtattacaggtgtgagggctccagatccttaccagcaagccagatactggtgttgggggtttgaggtgggaatatggaattagttatcaggagttggaactctttaagtctgactctatccctgatttgtgacctaggtttagtcacttaattactcagagcctcattgttctacctggcaagtaatatccatctgatattattacttcgtttttatgtaacagttatagaattcactagctactacattagaccatatggaaaaaatcaaggtactactgtgatacattcagacaatgcaatattattgagagctaaaaagaaatgaactatcaaaccatgaaaaacatagaagaaccttacatgcttattactgagtgaaagaaaccaatttggaaaggctgcatactgtatgactccaactctatgacattctggaaagggtagaactatggaggcagtaaaaagaggagtggttgccagagggtgagggaaggttgtgctgaatagacaggcatagaggaatttcaggacagtgaaactactctgtgtgatagtataatggtggctgtatgtcattatatgtttgtctaaatccatggaatgtacagcatcaggagtgaacactagtttaaactgtggacttcgacagtattgaggtgtcagtgtaggttcgattgtaacaaatgttctgctatgtgtagcttgttgatagtggggagatgtggggtggggaggccaggagtatgtgggaactctactttctgttcagttttgttctgaacctaaaactgctctaaaaataaagtcttctttaaaaaaaaaaaaacaaatcaagggactgcctttatgttcattgtagtgtcctcttttgaccatgcatgtcaatacttttgctgtatgtagaaactggagaacaatacagtaaaagcatgaatcacagcttcagtacttaggagtatactggaagaagatgaaaatgggctaggtgcagtggcacacacctgtaatcccagcactttgggaggctgaggcgggtggatcgcttgagtccaggagtttgagaccagcctaggcaacatggcgaaaccatgtctctactaaaaatacaaaaaattagccgggcgtggtggtgcattcgtgtagtcccagctccttggggagctgaggtgggaggatcacttgaggccaggaagtcaaggctgcagtgagcccagatcatgccactgcactccagcctgggcgacagagtgagatcctgtcttgaaaaaaaaaaaaaaaaaaaaaaaaagaagatgaaaatgctataaatgatttttactgtggccattccatcctttctaaagtgtgagaggggtgtgtgtatgtttgtgttagtgggtgcatacatgtgtatgttcaggtgtgaagactgtaaatatttgtgtagaaatttgtggattagattttgtaattagattttgtaattttcatcacctgtgaaaaatgtttttcttcaggcttaagatttaaaaaattctctttcttttaattttatttatttattttttgagtcagggtctcactctgttgcccaggctgaagtgcagtggcacgatcatggctcactgcagcctcaacctcctgggctcaagccagcctcagcctcctgagtagctgatactgccggtgtatgccaccatccttggctaatttttgtattttttgtagagacagggtctcactttgttgcccaggctggtctcgaactcctgggcccaagcagtcctcctgcattggcctcccaaagtgctggaattataggcatgagccactgtgcccagctaaattttttatttttttatttttatttttatttatttatttatttattttgagacagtttcactctgtcacccaggctggagtgcagtggcatgatattggctcactgcaacctccacctcctgggtccaagagatgctcctgcctcagcctcccgagtagctggaactacaggtgcgcgacatcaggcccggctaattttttgtattttttttttttttttttttttagtagagatggggtttcaccgtgttagccaggttggtcttgatctcctgaccttgtgatctgcccacttcggcctcccaaagtgctgggattataggcatgagccaccgcgtctggcccaccccagctaaatttttaaccaaatttgttttattcattaagagatcgttcatgcttttcttctacaatgctgaacctctctctttaataagatttgtagtactaatgatttaaaacaaacaaaagcaaatgtgttctgaaattctgaaagatgagttcaggtttcttgtgtctctgatgaagtaaactcagataaatacagagaagtgcaaattatcctttatcacatgtcttggaagagccaattccatgaagttaatcagtaattattttggcaggctgcacttgtgaggaacttgcaccctccctgttgtttgacgaggggtgtcttgtcagaaagtaaatttataacattgttcatttttttctttaagtgattgtaacaaatatttggtggtaaatttaactactgaaattaggaatactttgtgaaactaagagggtagcattcagcagctttagaatcttttctttctttttttaaagacagtctcgctctgtcaccgaggctgaagtacaatggcaggatcatggctcactgcaacctccacctcctgagttcaagcagttctcatgcctcagcttcccgagtagctgggactacaattgtgccaccaccatgcctggctaatttttgtattttctgtagagacgggatttttgccatgttggccaggctggtctcgaactcctggtctcaagtggtcatccagcctcagcctcccaaagtgctgggattacaggggtgagccaccacgcctggcctagcagctttagaatcttttaaaatttatgtgcctgtgctattactgtagatgattttttaaattatgattttaagcatcaagagtgtgatattaagaatgtacttttgttaaaaatacttcccaattaaaaatgccagtgtttagttatatacaagtgttacttttgtttaaatgtaaggcaaatattacatttcatcatataatattttctacatgatatatactgcctgctacgatatatttttctaatattattgtctttttctgtcttctaagaaaacttacagagttgaggattcttaaaaggtatcctcatctttgaaaataatggatctatttcttagtggatgtattctgcatagaatttggttaaataatctgttatatttacctcttctagcatctgattctgtcttgtgtttctgtgaaaatgtgacttcctacattatctcaaatggtacctagggcttggagtaggtaaaacaatttgttttgtctgagcagtgttccataaaatgataggggctttggttttgttcctcctttcccctcctccaatttagcatcatcactgtacttaaattgtattttcatatccaacttgtcagggacagctactgtgcagccatctccagtcagcattcttttgtgaggaaaaccacagcagctacagtgcagaggaatgggagaatttctgtagtgtccaagacaattctgatattaacaaagcagtgctgcctttaggttgtgggatacagccatgtaatgatgaatgacaagctgatggtatgtgcagcggtgttctgtaaacagacagttacagagggacagacgttttgctctattggagcttaatttacaaattaatagcctctatgatatatcttattgtggtacaaacacaatgattcaggtgcttttttttttttttttttttttttttttgagacggggtcttgctctgtcacccaggctggagtacagtggcgtgatcttggctcactgcaacttctgcctcctgggttaaagcaattctcctgcctcagcctcccgagtagctgggattacaggcgcccaccactatgcccagctaattttttgtatttttagtagagacggagtttcaccatatttgccaggctggtctcgaactcctgaccttgtgattcgcccacctcggcctccgaaagtgccaggattacaggtgtgagccaccacgcctggcctcaggtgcttttttatggtaacaaacagctaaattgtgcagattataaatggttcttaggtatttactgcgtctagggtctttgatgggtcaggttacatacatacatacatacatacatacatacatacatttatttatgatacagtctcgctctgttgcccaggctggagtgtagtggcatgattatagctcactgaagcttcaaactgctgggcttaagggatcttcctgtctcagcctcccaagtagctgggactacaggcatgagccactgtgcttggcccaggttacatttaaattgggcatctcttttacgcattcataattatggccctgaaccaccatagaggtataagaaatctgggatgtacctagatttccacagggatatatatcctaatatatttgatttctgagattaaaaggcaacaggtagcattcgctttgatattgtactttctttttggcagttgtcattaaaaaaaaaatagccaaacatagattgaactagcattaaaatgattagatgttaaaaatcaagtgattgaaatataattgacattggaaataaaagtcacatttaattagctgttgctctgagttaaaaattcatactagacaaattgtgtcattcattagttactatccctttttttcacattgcccctgacagtttcctaagcattccccaccattaattaatttgattcccaatatttttctgaaggaaggagggcggtatagtttagtgcttcaaagaaatgtagaaaacttgaatgtaagccatctggacttttaggtcttttatcacacataaatatattacaactaccattcctagtatgcattgttcgattgtagtttatgtgtttatacttttttgctgcagcatcgtcgtatgttacatattagaatctgtaattctctaggggtcacatctctcttgagtacaacagccacactctttcttgtttgacacaaattaaaggcagtcccaggtttttagaagggtctctaaatttaggcaaagtctgactatatcaatattagtcttttatagtcatacatatcaagttagggggaagatggggttgagtttacctattagagcatgagtgaattaaataagaaaactgcatttcaatcaggctagcaaataaaaggtctaaagtctaaatttttagagagatggactgtaaatcctaatgatattaataaagggtctcatctcctatggagatgagatgtaaaatccattgatgtaaatacctctgtgtgtgtgtgtgtgtgtgtgtgtgtgtgtgtgtgtgtgtgtgttttgaaggaagaataagccccaaagaatattttttaattaaaaaagtaagccgaagtctaatcaataccatgatatatgcattctttgccatctgttaaacatccatgcagagaattttaaactttactgaaaaaaatctctgataattacagttgctgctgttgtcaatttgtttatttgtactatataaattccatgacaacttgagaactataaaataattatgtccccaaatctcaaaaccaggaaagagacctacttttgtagacattgtgtccagttcactgtgtaagatgaggttgtagatgctgtttctgtcaaacaggtggtattttaaaaggatatgtactttttaaaagaggttaaaaagggaaagaaactatttgtctaattctttgtgaatctcagagagtctggggaaaactttctagtatcttacaaaatgaagaaagtgcaattattttagctaagtatatttttatagcttctgccaccagtattcctccctgtcttcctctgttagaattctatcctgtgtcttgcctggactatcccctccaataactccagtgcagattctgttattgaattttacttgcattaaggagggagtttatcttgagtttctcttctgtgtgtttgtccataaaatggcattctgtgtttttgttcataaaatggtgaaatcttcacttagtttctgtttccattaaacaatacatacattttactctagattgtaattttgtctctaatgttatgacagtaacacatcccctcttctttagaggataattttgtggcacattctgaagactgccctgtctccttcctgcatcctcagcgttgatgaatattggtgtgacttatcaatgcagtggctgagttttagttagacggtagaaagtcttttttttcctctttgagtaagttctgatctcatcaacaaataaacatttctccaggttagtttttccatacgcgtaaaatttagtatccttggtttcattttgagcaattggtgtgtctgaagacccagaaagattttgagtaagatttgatacctttctgcatttgtgaaaagttacaagtctctatcagcctctggtataaagagtgaaggttgtatttttagattgcatgttgattcatggaaggaataaaaggatgcatctttaaggcaatactgtgtaagaagatgtcttgagtgggtgtggccctctaataattgatacgcaacagatactgccatgtagagcacaaaccagtggagtgactgaatgtgtgaaaaagcagagacttgcagcactgacatccagttgtggagggcagggtcttggagtttcttttgagagaagctttctaaaatttgtgggagcaatttttgataggaataaactggtgggttgattgggtgggggcagtccttccgtctctccgtctcccttctctgttgacaaaagccatggaacgtgacttaaacggtggaaaaacgaacctgattttctgttgtattagacctataaaattccgtatttttcttcaggatctgtcttgctgtcgtgtgaacacgttgatagtatcgctgaatgtcacaatattgatcaccgtgactacctgtcttggaaactgtgacttgaagtgtcagaggctctgtgaactcttctgcctgaacaagccctgatgaaacccagtgatgcgaatgtcaagggaatctaaggctccttgttacatgctgggtttatggagcagttcttgacagatggattgaagtgggcggtactagcagttctggaggcctggcacgttggcttattgtttatagaaatatattaagaagaaaagatgataagttattaattttttctccctctctcccttccgtctttgttctttccagctttcttttttcatttccctgattttttccctctcttttaactctcattaacttatcagtgaatgatgaatggccagtttgtgaaatttagccctttctcaaagcttcaggataatgttccaatatagttagctacatttaaagatctccattatatgtgaatacctttgaaaatatcaaatcatgtatgccagtataaccttcgtcagtgaccagcagcagtcatgacgtcttcatttaaaacacatagtagtaaaaatataggctcatctcctgtggagatgagaggatatcctttatatagggagcagtgagaaccttggatgataccacacagctagggtttttgagatattttcgccgtattctcttgctgccacccagaagtggtactgacctaaatccggggtccctctgaagtcatttgagtgctgtgtttgccagagctgcaagactgaactagaacgagactggattgtgagacttagaaaagccagctaatatgcacagcaactctcctttactcccagtccttggaagagcctgcagggcctccacacctaaggagcacctctgctgcagagctcacctggctttcagttactggtttctaagtgcagtcatctatatttaagtgacagagggcatcagtgcttcctcaaaatcttgatttaaaattttttttttttcacagatagcaacagacatgtataaccacacacgcagtattctaatctggtgaacacagcaaggagtaagggacaattcatttctgagtggcagtttgacataccaacgctatcttttaaagaaagctttacccagctcatatgatctgacctgtaatgcagagctctctttctttttccttttttttttccctcctctcaaggactgatgtaagtttgcaagtattttgatcatgtccccccaccagcccccaccccaagcttccacggctttgtttcaggtcctgggggaggagcagttgtgaatgcagtgtgactcacttgactcccacgctcctgattctggttctgattggtcgtcaccttgctctagccatatggctgaagagtagtactctagcccgcatcccttgctcctgctttccctactgttcccttctgttgtacatgacattggaaatgggttctgggctttgtttcttgcttctagtgtactttagctaggcagtgattaggagagcacattgtgtttcctaaggatggctgtagaggagaaaaaaacaccctttccttttgtgactggtatagtaattagtttcctgtgctgtttttgtccaaagtttattttttggcaggtgtcatgtttatgttgtattatttcctcctgatttatctccttcttctgatttgatctgttttgggttttttattgttgtttttgttttgtaagagctcttagggttcctttctctggctgctgatgctgcacgttagctagttcgttaatatgtttgatgtctgatggggaggaggactgaagcaactctaaataattacttaatttttaaatgtctaaatgttctagcagtcaccaagcaataaaatttacatgagattctcaacattatctgcagcaccactgctattactttgccttctcctaaactacagcagtttaattattctgccttttatattggagaaatagaattttgaagacttgaaagttaactttataagcatttgatattttattaatttgcatttttattattctgcagatagtttctgcaaagactttaaactctgcatcatttaaaaaaaaatatttactcagagaggcagtgctagcagaatataatgcatagcagaatttttccccccaaaattggcctttatatgatattttagttgtctgaaaagaatcaataataaaaatatttttctaaaaacctctcagccgggcgtggtggcttatgcctataatcccagcactttgggaggccaaggtgggcagattgcatgagctcaggagtttgagaccagcctgggcaacatggcgaaaccccatctctacaaaaaataaaaaaattagctgggcatggtagcacgctcttgtagtcccagctacttggtaggttgaggtgacaggatcgcttgagcctggggcgtggaaatggcaatgagccaagattgtgctgccgcactccagcctgggtgacagagccagaccctgtttcaaaacaaccaaaaaaaaaaaaaaaaaaaaaaaaagaaaaacaaaaagagagaaacaaaccaaaaaataaaaacaaacaactctcaagagaacttttttttttacttaaagattttagaaattcattttatacatattttaatgttcaaatatgttaaatgagtaatccacagatttggattcttcagagaatatgggggatgaagttggttagagccataagcaggcatttgagaattaacctggctcttatggtttcatctaactatttaaagctcttcattcacttctttttcttcattcataatctatattagaaaatcacaatctatttttatcagaaatagcacacctctgctaatgaactaacttgaaagtgtatgagatatgagaggaatgctgcttataccttcttcctcctattagggcaggagagtcagagcccaaatatggccccaaatagttattatatgctttatgagccatttgttggtctttggtcccaccactttacacatcaggtaaagagaacaaggacatttactgagcaatatagtttttttttttttttttttttttttttgagacagggtttcactctgtcacccaggctggagtgcagagtgcaatggcatgatcttggctcactgcaacctccatctcctaggttcaagcaattctcctgcctcagcctgctgagtagctgggattacaggtgtgtgccaccatgcttggctaatttttgtatttttagcggagatggggtttcaccatgttggccaggctggtcttgaactcctgacctcaagtgatccacccaccttggcctcctaaagtgctgggattacaggcatgagccaccgtgttgggccagcaatatagttataagtgcagagtatagttgtgaaccaaataagcccctgcactcatggggcttacatgctgttgaagtgtattataataatgaaggtatccagaaacacatttctcttggatttgagcaaggcctagaaagtttgaagaactttgacattaatttttcactccacgcagttaaatccctactctgcctaaacaaacgtgtgtaccgccacagaacctgtcccagcaaagaagtcctgctcatgagttacacatttcagtaatttagaatgtgttgtttatatggcatattactgggatcaaggtttctttgtttaacagtctgtttaatgttttcaactgggacagatacatgatgtttgcttaataaaaattactatggctagtatctgtgttatcatatgcaaaaaataataagctgggcccagtggtgtgtgcttgtagttccagctacttgggatgctgaagtgagaagattgcttgatgccaggagttcaaggctgtagtgcatgcactatgactacacctgtgaatagctactgtactccaacctgggcagtatagagagacactatctctaataataataataatgatcaacaatgtgccaatcacagttctgagtactttccatataacaagtcatttggtgctcataagaacctcaagggtactgttaaccacctcattttaaagagcaagacagtgaggcacaggtaggttcataaacttacccaacatcttagagctgtgagtagcaaaactgaaattggagttgaagtaggatggctccagagtcctgctttttactgctacgttgtatactgctctcagcatgctaagttaataataggacatctgagctctgctgtgtgatctccttcagatttttcatttgtgtgcctcagttgccctttatatataaaacatttcttacaccatcagtttcatattaccaataatgtatattaaatgctttaagctcttcatatgtagaacctgtgtaaatttagatgtaataagttttagatgaagctatttatagaaaagatgtcagagcatatttctgtgcagctgatagagcagtattctaatatcttttatttctttttgtcttcatttggtagaaaagagtagttgaacagctacggaagaacctgatagtaaagcaagaacaaccggacaagttccaaatacagccattgccacaatctgaaaacaaactacaaacagcacagcagcaaccactacagcaactacaacaacagcagcagtaccaccaccaccacgcccagcagtcagctgcagcctctcccaacctgactgcttcacaggtaaatgtgtggatggaacattgcaggctgcagattgtagactgatttgttgttggtcatatagaactgggtcctgtctcagactatactaagctcagctagaactaaacaaaagttattttgattgcttttttacagtataacccagataagtatcacttgtaatcattggcagaaggaaataacattactaagaagcaaaaattaaatgatttcccacctgtctgaagaaggggagaaaggtagtcaataacaaaaatcaattatctgctttacagcagaattaaaaccttattttgaatttttggaggtatttatttacacttgttctaaaagtttgtgacttgacctcttctggaattcttagcaactaggcatagagctattccaggatcagtgctcttgggaccagatagaaagaagcatttggaagggtgctatggctgggctcagtagctcatgcctgtaatcccagcactttgggaggctgaggtgggcagatcacttgaggtcaggagtttgagaccagcctggccaacgtggtgaaacttcatttctactaaaaatacaaaaaaattagccaggcctggtagcaggcgcctgtaatcccagctactcggcaggctgaggcaggagaatcacttgaacccaggaggcagaggctgcagtgggctgagatcacaccactgcactccagcctgggcaacagagcaaaactccgtctcaaaaaaaaaaaaagaagagtgctatatttgcactattcatagaaacactcatttttaagcccatatttataagaaaatgtatttgttctaatacactgatgggaatctgaaatgaaagctacaggtcaaaactaaagaaatgggagcttaataaaattctaacttggtgtagctgtgcaaatgtttttaccaaaaagggcatttaaacaagcatacaatttaagaatcgtgaggcaatcaagatacacaaaaagggcgtatttggaaatgatattccaaatgatacttggatccttgaaggtcacagatccctttatgactctgttgaaagctatagatccctctccagaagaatatacattcacacttaatacactcatttttgcacacttcaaggactttgggatcctctgaaacctaagcgtggatacctcttacaaccaacaccaggtcttcactgtgtctttatatagagagaaaaagagtatagttcagttggctgttcactgtttatggacattggactggttcatgtgcaacattttgcaagtaaagaatgaattttttataagaacactaaagataagttaacatttaatagaggttactgtatactggcagtctcctaagtgttttacataatggacatactcctcaccctaatcctaagaggaagttattattaccatctctgtttttttgtttgtttgtttttttgttattgtttttttgagacggagtctcactgtgtcacccaggctggagtgcagtggcgcagtcttggctcactgcaacctccaccgtcttgggttcaaacaattcttctgcctcagcctcctgagtagctgggactacaggcgcgtgccaccatgcccggctaatttttgtatttttagtagagacagggttttaccatattggccaggctggtctcgaactcctgacctcgtggtctgcccgcctcggcctcccaaagtgctaggattacaggtgtgagccaccgcaaccggcccaccatctctgttttttagaagagaaaactaaggcacagagaggttacataatttacctaagatcatggagggtggtatgtggtgtagctaagatttgaacctagatgttctggctgaaaaataggtccattcaactactcttctgtactgccattcaataccaaaaaaaaaaaaagaagaagaagaaaaaaaagaaaaaagcaataccaatactgtataaaaccaaagaaggaaaaagaaaaatccctgttgtaaatcagatagctaggacagcctacataaatttttaccctaatcaccaccccaaggctatttggaaattaggcattcaaaactgactttaaaaatctccttaccagcacttgtattagttctgaaagaatgtttagaggataatttttgtttaagttttaaacagaattgggttaggttgttctctttccaaagtacaggttgatcagaaaatgtttatctgaaaggagtgtggtagaattcattgtttcctgttacataggagttttctgtcttaacccatggaaacatcctgttcaagtaacattttatgttataaaaatcaaaggaggctaggcacagtggcacacgcctgtaatcccaacactttgggaggccgaggtgggtggatcactttaggtcaggagtttgagaccagcctggccaacatggcaaaactccatctctactaaaaatacaaaaattagccatgcgtggtaacatatacctgtaatcccagctcctcaggaggcttaggcatgagaatcacttgaacccgggcaacagaggttccagtgagccgagatcgtactgcactccatgctgggcgacagagcaagactccatctcaaaaaaaaaaaaaaaaaaaaatcaaaggaagcatttccaaaatataatagcttttcctttccctggtagtctgtgttgctttgggatggtgaatggtaagaggcccagggctacctccaaaacagtgttgtatagcacctctccatccagtagcccacctgacatatttaattgattttgccaaccttttttaaatattgttttatttaatgcaaatgatgcaaatgtttaatgttaaaaaccaaaaggatcctctgagtttttggtttttgagtttacaggtaaactacaaatctggtttttggtgtttgtttgtttgttttttagacaggatctggctctttgacccaggctggagtgcagtggcacaatctcagctcactgaaacccctgccccaagccatcctcccacctcagcctcccgggtagctgggactacaggcacaggccaccatgcccagctaatttttgtattttttgtagaaacagggtttcaccatgtttgccaggctggtctcaaacgtcggagctcaagtgatccacccatctcggtctcccacagtgttgggattacagacatgagccactgcgcttggcactactaacctatttattggtactaccaatctatgtggtagattctggtatacaaagagcagtggtccctgccaaaagtctggtatatcattattaataatttttattcattctgtaaatatttgtggagttcctactgtgtgcaagcactgttctaggtaatgtggagactaaattcacaaatcagagagtttctattttcaagaattaaaaaaatttaagatgtagagaaattttgaggacagagtaattttgactagagggatcagaaagtacttgtcaaggagggttgcatctgagcagggcgctgtcagatgaatgggattttagtgatagagcaaaggggaaagagcttcacaagtatagagagtagtatgaacaaaaggatggcgtcaaaatagtaaatgtatgccctgggaatcgtaagtaggctggtgtggttggagtgtgtgatccacgaaacgatggagaggagataaggccaagccctccaaagcatgccagagcttctgggttttttaacagtcatagggaagtctaaggcaaggacaaatgggaggttatatatggcatatattaaatacatatatttaatgtgtgagggcaaggacgaatgggaggttatatatggcatatattaaatacacaacttcagaaagaattaaatattaagtagcaatcggggggccagggggagatgctaagaggagaaagttttttattctaagtcgggtgattggcatataccaaggcgtagagaaagcaatgaggaattctttttgggagagggaatgggaacagtttgctttacttagttaacgtcaactcatgcttataggtgtattttaaaagttttccaatctacagaaaaagtgaaagaatagaacagttaaatacaggtatactctccaacctatattcacagccctctaatttttaatggcataatgcaaatgtaaagaagaaagcagttaataaaaccaaatggaaaacaaacctttggagacaaaaaagggaaaagtttctatttgtggttgtttgagtatacatcatgactgcattcaaaattaaaccagcaaaataatataaaatagatgtggaagttagatcccatagtaataatcccttaaattctgatttgtatattggagttcatctgttttattttattttgttttgttttgttttattttattttattttattttattttattttgttttctttgagacagggtctcactgtgtcacctaggctggagtgcaatggtgcaattacggttcacctcagccttgacctcccaggcttaggtgatccttccacctcagcctctcaagtagttgggactacaggtgtgtgtcaccatgcccaactaatttttgtattttttgtagaggtggagtttcactatgttgccaaggctggtctcaaactcctaggcttaagtgatccgcccaccttagcctcccaaagtgctgggattataggcatgacccactgtgtccagcctgagtccatctgttttaaatcaatacttcatatttggcaggcagacaacaatgacttagcaaataaataaataaataaaaaggattttgctattggcagtatttgccatgccatgtatttctgcattaacttctagctcatgcaatttgggttttgtcaaaataaaggaccccatcatgaaactgtggagaaacagctaccttctcttaaaggtgatcatacttagacactgttaactagctaaaaacaaatcacagctttcatataaataaatctcttggttgggtgtggtggctcatgcctgtaatcccaacactttgggaggccgatgtgggaggattacgtgagagcgagttctagaccagcctgggcaacatagcgagatcacgtctctactaaaaataaaaaaaaattagccaggtgtggtagcacctgcctttagtccaaggtactcaggagaatgagatgggaggattacttgagcccaggaggtcaaggctgcagtgagctgtgattacgccactgcactctagcctgggtgacagagcaagaccctgtctcaaaaataaataaacagcaataataataataataataataataataatttgtcgtttgacacctttcttctctatgtctcttcttcctccttccagaacagttcagacattttaattagacttggatttcaaagttctaaattccttttgtcatctaaacccaggagtttggtttgtgttccctaatacttgggaaagaagaagcaccagagtaggggtaaagatctaagcactacctgggtcttggtgtcaataaatagtaaatatattcttcaaaaagttttcactgaagcatacagtactaggtcttgtgcctgtatactagacaaacaggtatgtagatgctagaaatcatgtagtgaaatcagccataaccatagttgtaaaataaaagaaaactgctaacctaagatgtgaacaaacttgttaggtttcagtgtttttaaagtgttgggttaatggtaagtatataattcaggtgagtttgaggctttagtcagtattttgtagaatcatcagtttagagttattcaaaatattgatgatttacttgaaacaaaagtacattgacttctcttaaagcagtaacaacatgcgtttctttaaaatccatgtcagtgagttctgactagagctttactcccacaatccacgatagcactggattgaacgccatctggtgtgactggatcaccacttcagaagttctttaaatcgacatgttttaaatggaaaacaagggctaatacactgtggtaaaaacacttactacaaattgctgataatgcagtcagtccttgctgttacactactattaatataccatttctaataataaatagcatttggcttttatttggttttcatcactgatcgaagataggtgatccactgcaccccaaaataaatatcagtgttccgcgtttactctcatttcacatttaaggaggcaatggcaaagagaataagccacttagcgaagaggaaacaaagatttggatgatgatcttaaaagattagataatatgtgtatatgcgcataaggcagaaaaatagagataagtaactccctagaagcaaacaacttaatacccctaagtagaaaagcatagacactgaaatagaaattcataagggaagttgtccagatgtgtttctgagagaatggaggtacttttcactggtattgcacagtgatagaactttctgtgatgttggaaataccgtctatctccactgtccagtttggtcaccactaaccacatgcgacttttgacatttgaaatgtggctagtgcaactgaggagctgatgttttaattttgtttttgttttaattaattacatttaattaatttagtttttatttttatttatttatttatttttgagacgaagtctcactcttgtcgcccaggctggagtgcaatggtgtgatctcggctcactgcagcctctgcctcacgggttcaagtgattcccctgcctcagcctcccgagtagctgggattacaggcgcctgccaccacacctggctaatttttttttttgtttttgagacggagactcgctctctcaccaggctgagtgcagtggcacgatttctgctcactgcaacctccgcctcccgggttcaagcaattctcttgcctcagcctcccgagtagctgggattacaggtgcctgccaccaggcctggctgatttttgtatttttagtagagatggggtttcaccatgttggccaggctggtctcgaactcctgacctcaggcaatccacccgcatcggcctcccaaagtgctgggattacaggcacgagccaccgcacctggtctactttttgtattcttagtagagacgggctttcgccatgttgaccaggctagtctcgaactcctgacctcagacgatccacctgcctcggtttcccaaagtgctgggattacatgtgtgagccactgcgcctggccaattaatttccttttaaatagcaacttgtggctagtggctgccaaatcagacagtgcaaatatacagtaaaggtggagtagtatcaaaatcagaatcaatgagtttgaccagataaattttcatgttcctgaaatgttgatctatctccagatagatgtttaggccatataatgagtttgtttatatttttttgtttgttttgtaactgattcctttaattattctagtaaaaagtctagaaaagtacagcttcaaagctgcaatagcacttaaggagcatcagtcaagtcctctcacctcagttcatcttctgatctctcaggcttttaaaactcagatgtttgttttcaccttgtcatgtttcattgcatctttgatcacttctgcagcagttctccagagaaaagattataggtagtaactcataatatccctttagtatcaagaactggtatttactatatactcattggctaacatgtttcattatctggagctttgggactcattgcctccagggtaactacctcagaggcgacatgctaatccttatgtgagtttcccttccttctctccagggtgaccccataaaaaaaaaaaaaaaaaaaaaaaaaaaaaaaaagaaagaaagaaaaagacactgtccttttaccccagcctttgtgtctcaggaagcagatatccagaactgtatggtggctttcttcatattggtgagcttgtagcagttaggatagaaatgacatgtacctcattgatttgcaactagtacaaagtttaaattaattgacagcaagcaaagaactagaaaaactaaaagaattaagtatactcacattctgtatctgtatacctaccccatttgttgttgaaaaccctgtgcctgaattagtctgcagttattactatgaacttacccatttacaagtgacaccaatatgagaactcttgaaaactagagattgcctttctctgtagtaaggagtatgctgtatgtacacaaaagaaatgttgttctacagagaaacttgattatgagaattattgttttgttttcttccaaggttaagcagcatattgtttagtgggatttagtttattatttagtttagatttagtgtcctaatatctgttttccctgtctcctagaagactgtaactacagcttctatgattaccacaaagacactacctctcgtcttgaaagcagcaactgcgaccatgcctgcctctgtggtgggccagagacctaccattgctatggtgaccgccatcaacagtcagaaggctgtgctcagcactgatgtgcagaacacaccagtcaacctccagacgtctagtaaggtcactgggcctggggcagaggctgtccaaattgtggcaaaaaacacagtcactctggtaagccagcagctgctcctcatgtgtgatcacatgagaaggttaggatacgcatttgtatagtatatcccttctaggctcctgctggatttctcagtttccatcattcttctagcataccaaattcccctttggggctgacaagggaatatggcatttctgctatctgctcaaatcactacagaagcgtcctgacaccaaggactaaattcagtgcattatctgaggtcaaagtatgacttgattttagggggaaggtctccttcacagaggcatacacactgtttcatttatgtctccctctcccttcactctctctacagtgttttcctgtgaaacttgagtgcttaaactctcttgtgctgtattactgccttggtgaaaactccctgataattcttttagttttaatatctctttaaattgattgtacccagaaagaactggagttagttgaggcactttaaaaatattcaagaaactcacaaattaaccgtgtcagtgcccaagttttgttcaggaaaaaaaaaaaaatccctttaaggaggaagtacttgaacaagaattttcatgagagttctaggatcaagccatttagaaaactgatattctcagaagcttgggagaaatatatctaaattttgatgtaaaattcccttaaaatggcacctaagagctcttggtggcttttgaataataccagtggtgagtgaaactagagagcaataaagtgaaggttcaccgcttatccaggaatccttagagaagcaacgaggtcactcaaccagatactgagagttagaaaattttctataggaataaagccattcactgttagcttatatcaggaaaaagcctatttggctaagcagcaagtttgattttactttggatccagtcttgacttttaaaatatgttaatgcaaaagttcttgagtgtcaaagaaaattgtctaagatttactgagcctgctatgttctccattaggtgtaggaggaaacagaagtgtggttggttcattttatagggtaaagcacacaggtgggagagttaaaaagtttcctaatgcagtgttaattcagatgattaacttacgatgaaagcttgtagaaaatattgtctgatccaaagaatagtgatgctaaaaatactagctttgatattgaagagtaattgttctctctggtttatttatcttcctcattttttagcaggttcaggcaacacctcctcagcccatcaaagtaccacagtttatcccccctcctagactcactccacgtccaaactttcttccacaggtgagtaaaccaatgacaagctcaatgataggttagatgggacagaaatcctcatgggctctttctaagtagcctgtaatggggcttgtcagcccagctgtctatcccgcttagctaaacattctgactgttgatttctgtactatgaagaagtttattttgtcatcatggtttattagcaatgaccaaaggcagtagcagggggaagtaaaggaaagggaacattttctaaatttaaaataattaaaaccattataaaccttaaacttactagaagaatttagccaaagtctgcctggcagtggggaaagaatgcaattaacacttcttatttctttcctacatgccaaaaagagtagggaaggaaacaacagctaaaccaactagtagaaactattcttcagttctgccctggaaagtgatggttttgagaatcatgcttaaaggcaaagccttgcttctaaaggcttaggctaggggtctgtacagaggactttctccctaggcctgagcagctctgcatgaccatactctcctgagagtgttcttccagcaattaggctaactttcaccattcccagtgcaaaatgtcaagatttccccattctggaccttgaggagtgttgacttccttggtaggaaggctgagagttcctatctgaggccctagttttcagacaaagggagaagaagaaggagttttgtggtcagtagtgtaaatgatttccaaatagcctctggggagaaggatgggcagtgctaatatgagataagatgatatcatttgtttatcagataaatccctagtaaatacctcagagggtagtctgagagcacatgggagggatacctgcctattttttttttttttttttttttttttgcaatggagtttcgctcccatcgcacaggctggagtgcagtggcacgatctaggctcactgcaatctccacccaccaggttcaagcgattctccttcctcagccttccaagtagttggggattacatgcatgtgccaccacgcccggctaatttttgtatttttagtagagacggggttttgtcatgttggtcaggaatgtctcaaactcctgacctcagggtgatccacctgcctcggcctcccaaagtgctgggtttacaggcctgagccaccgcgcccggcctgcctgcctatttttaagagtattagagaaggtttcttcaagctttctttgatgagttgacattcagtctgacctaaaatcctagctgagttagcctgataaaactttgaaagaagaataaaaatgtcccaggcagaggacagaacatgtatgtagttccagggtggagaaatgtgttaagtttaaagaaccaaaggaggtttgctgtggctgagcacagagggccatgtggctcatgcaggctagagttagttagagctgaggttggagaagtccactagggccagagctggtggaaccttgtaggctatgcaagaacctgggccttatcctaggagcagcaggcattcattaaagcattttcaagcaagcacttgatgtggtcagatttatgttttagaaaattccttcttgcctctgtgcagagaataaattggggatggtcaagactgtgggcaggaagaacagttaagacattgtcaataatggtaataaccaatgttgagagaatcttgctacatactaggtactatgctaggcactttacatggagtatccattttaattgttacaacaaccctatgcaaataggtattactctttttagggtaaggaatctaaggtttagtccatgtttttcaaacagtggatcatgacccacttgttgtgaaagcagtttagtggattgtaaccagagtgtttaaataaaatgaatagaatagaatatgaactattaagagtacatagcacatactgtgttctctatttcagaaagtttttgttttagagatacatgtctataggcacatgctgattacagagtaaaatatatttcttactgttaagtcagtagcacccaccacagggtcgttttaagttcagtcagacattcataccgacaagactttcatgggccacacttggcaccagtctacttggaatgatacaggacagaaaccacagcttgtgagcaagatagcatcagacatttgtcttcaatgagtccatacagcagtccctacagctgtccaaggatagctcaggtgtaaggaaataagctccttatctaagacagtgggaaagccaccttggcatagaagccttatgcccacaggagccaatgtatcttataaaaactacataggcatggcttcaaggtccccacaatggatgtgcccaagttatgagagtcaccccacttagggaagcccaaatcatggggtcccctcaagcccatccagatttgatttagcaataagggattttttttttttttttaagacagggtctcactctatcacccaggctggagtgcagtggcactatctcagctcactgcaacctccacgtcccaggttcaagcaatccttatgtctcagcctctcaagtagctgggattacaagtgtgtgccaccatgcctggctaatgttcgtatttttagtagagatgggtttcactgtgttggccaggccggtctcaaactcctggcctcaagtgatccaccagcctcagcctcccgaattgttgggattacaggtgtgagccactgtgcccggccaggaaagggtcatttttatcataagcagtgttgcctggtaatatagttgacattcttatttccaggagagcagagctaaagagttaattgaaggtcaagcttcatgcataaggggaaagcgttttgcccacagggtcacagttttaaaagtttgaaaaatactggcttatggctgggtgcagtggctcacatctgtaatcccagcactctgggaggccaaggcgggtggatcccgaggtcagaagattgataccatcctggccaacatggtgaaaccctgtccgtactaaaaatacaaaattagctgggcgtgctggcatgtgcctgtagccccagctactcaggaggctggggcaggagaatcacttgaacctgggaggcggaggctgctgtgagccgagatcgcgccactgcactccagcctggcaacagagcgagactccatctcaaacaacaaaaacaacaacaacaaacaaaaaaacaaaaactggctattaaaaatcaggtatgttacctcaggttacacagctagtgagtggtagaactaggatttgaacccaagcaaggctgacctcatgtttttaactgtaactttttttcactgtttttagtgagccaaacataagctaggatagtagatagtggagtgaggatagaagtagacagatattagaagtatttagagagtagagggtggggtaggaatcatcaagagtgattccaaaatttgtcaagaaaagggcacttactgaggcaattatcggaggaagagaagattggaagaagaaattgatgagtcttagacatgttgattttgaacttttgagatattcaagtattgtataattctgaagttcaggaagtgtctcaggttctgaggtaaaagtgtgaaagtcttcagtacatagatggtaattgaagccatgagatgggcaaaagctcctaggaataatgagaacattgggaagaaaaggggtgccagggaaaaaaatcctaagaaatactcacatttaggatgaggcagaggaagagtaagcccacaaaggagactgagaggaggagtggccaagaacagggagttagagggccagaaatgggggtgcactgaagctgtggatatgaagaaatttcaaatgcgagttaaggctattggcaacattatgactatactgtgcacaagttctgggtgggaccagtctctggattaggcctttgacctcagctagaagaggtggcatggtatagaagagggagctcagggtttagaatcaaaagctatgttctagggtgaggtttggacctcaagagctgatgagtcttgtataagattatatgccctgaggtctatagaattaatgtaccaaaatgaacattaataagtgtattaaacaccatttcatacatagagtgtggaagatttgcttttataggacttgagcagcttaagtaatacaataattattctctctttcccctataggttcgacccaagcctgtggcccagaataacattcctattgccccagcaccacctcccatgctcgcagctcctcagcttatccagaggcccgtcatgctgaccaagttcacccccacaacccttcccacatcccagaattccatccaccccgtccgtgtcgtcaatgggcagactgcaaccatagccaaaacgttccccatggcccagctcaccagcattgtgatagctactccagggaccagactcgctggacctcaaactgtacagcttagcaagccaagtcttgaaaaacaggtacaggcagagtatgtacctgctctgggcagtagccttgtcgttgaggcatatggctgctgggctttctctaaatacattttctcaagggctcttcatctcaccaccattgtcagtaagctgtcgcttatgtgcgataattcatccacgtgcagaagggtcattcttactgaagaaagttggtttgcttttcccaccatcccctcgtagatgggctgggattcctgtgtgagtgagctccccctggtggttctgatgtggaaattcacagacaggctctgctgccctccgtcagtaagcacagatgaggtagtaaacagaaaacgccatgttagtttcggcccaataagaatccagatgaaggtaggactgtgaaagtcaggaagaataaacaaaacagggaaagggatttcatttcaaagacttttctttgattgttacagataatggggagccaaacaaaaaaaattaaaatttccaaaaagcattctttaactttagaggatgcagatattttagctcaaatattgaaacatttcatttatatttcctgaagtcagattttatcttaaaaaacgaggctagagacatacaagtaacctgcaaaaatacttgaaggttctgtagcagaaagacctctgaaaacaagaaggatttataggcagtcaccgtatcctatttgaaaaacgactagtgatgagaaagaagaatttggcaaagaaaagcattctctctcaagaaagttgctttaaaaagtcatcgacctatttctaattgttcagtcttgacttctcatttatctgaaaatagtctgtggtgatcctgaatcttctgcttctggatggaccatgattcagagaggctgttcagatgctgcctgctgccttagtcttcttgagcagaggaacctatgcatagggtactagaccttaaacccaggcagctcacaaatgcggcagaccttgcattcaagaagctagttatcaaaatctgtgcttaggaaacacaagaacacatctcaattcctggggaacctattcaaaccccaggaagtgctttgagaaacattcagaaataaattattattattattattattattattattattattattattattattttgagatggagtttcactcttgttgcccaggctggagtgcaatggcacgatctcagctcactgcaacctccgcctcccaggttcaagtgattctccttgcctcagcctcctgagtagctgggattacaggcgtcagccaccatgcctggctaattttgtatttttagtagagacggggtttctccatgttggtcagctgatctcaaactcccaacctcaagtgacctgcctgcctcagcctcccaaagtggtgggattacaggcatgagccaccacgcccagcccagaaataaattatttacacatattttaacacagaaaatttcaaacttattgacagcagaactttggtattaaactactgagagtcagatgctcaagcttaggagtttgggtggggacctgttgttttgcactggctctcaaagaacctctgaggagcctcagtgttccacagaacctcgtttcacaacactattttaggttattaaatattatttctctttacctctttttttgataaagatatttttaggagacaaattgttttggtttcattttatttttacatttcttttctgattacaaagatagtacaagttcatttttaaaacagattcaaacattacaaaaatataaattgtagaaggtgcttttccccgtaatctaaagagagagtaaacttttatcataattttacccccaggagttaattactattaacagtttagattatattcttacagatttttttttcttttcttttttttttttttttttgacacagagttttactcttgtcacccaggctggagtgcaatggtgggatctcagctcactgcaacctccacctcccggattcaaacaattctcctgcctcagcctcccaagtagctgagattacaggtgcccgccatctcacccggctaatttttgtatttttagtagagacggagtttcaccatgttggccaggctggtctcagactcctgacctcaggcgacccacctgccttggcctcccaaagtggtgggattacaggtgtgagccaccacacccggcccccagatattttctatgtacgtgtaaaacatttttaaagcaaaaaccaaaatcaaacttatgtattttgtaatttggttttttccctactttaatagatcttaagcatcttttcctgtcgtggccttcacgttgatagagctttttattttaattataatattataaaaagatatccttgaaatcttaagaattaaaataatttcttttgtagcagtaaatttcatgttctctcttctcttttttgagacagagtctcgctctgtcgcccaggctggagtgcagtggcgcgatcccggctcactgcaagctccgcctcccgggttcatgccattctcctgcctcaacctcccaagtagctgggactacatgcgcctgccaccatgcccggctaattttttgtatttttagtagagatggggtttcaccatgttagccaggatggtctcgatctcctgacctcgtgatcctcctgcctcagcctcccaaagtgctgggattacaggcatgagccaccacgcctggccaatgttctctcttctttttggtctaataaaggaattcagtcattgttattttagtttgctgggcagcctggcataatagtcttagaggttaccgagcccgatcagcagagactctctttagactagattgcattctcaggattctcttacttcgtatctttcaactatccttgttttctatttatatttcagttccagtatcacatttatagccagtaagagatctcatagatcatagagctaaaggtaaaacaatgtaatgtatgtagccatggaagaacctgttcacacctgttcacagagttaccaaacccgtatccaacgttctctctatgaccaggctaaataggttcccttttgctttctgctattccctttagatgataacatcattcatttaataaaaatgtgttaagtaccagttgctatgctgcatgtgatgtctatatataaggtggataaactaaagcccgtaccctcacggaactcagtttctagtgtgtttggagcaggcactgaggctgtgtctccagggaaggaagcatggcctcccacattggcataggaatgggagaaggcaatgccagttataacagcagtggtctcacgtgtccttcccctgtcagacataaccaacttccttatctaccccagataagagatcttatcccttattagaaaccacgttacactgtggctctgagaaaacaagtgatagggtttaaaaatctttgaagctgaagactcgttttagacagaaaagtagatgaagccagaagacttacgatatagccttcacatcacctcccctgtccttgtcctctccagcgctctaaaatggggctaacacctgttggtgatgaaatgaagtcaggtatttaatgtttattagattatgcttgatggagttctcaggaattatgtttcttctccaccccactgccaccctgcaacaaagacttctatgtatgtcgtcaattcagagctactgaaaaaaatcccaaggttctgtggggaaaaaaattgccacgttaccataaatatttttcataggaatctgcacagtatcttctaaagagaagtacttacaagataataatattatccaatgtattatcttcaaatttctgttttccctgttagtcaaccagagctgatgcctccccttaccccattttaatactggtgcaatagtagagaaactagttccaagtgaccaaaccatggattttgctttgccttcaatcccaatctatttaaccttgactaacgaaattatttggacatttatttgcacctgcctacctttgatttttcatgcagacaagtatataaagtatacttgattaacttcattctaggtttgtgcagagtttttggattcttttattataccaaaaagaacaggagttgcaaattccagcaaccgtgggttcgaagaggagatgtaagtgagtgaaacaggctaggagtaaacaactggactttttatttatttttccactttcagtgggaacatgagtataagagatatcccgcttttattcttaattcccctttaaaataataagtaagacaagcatgataataattgacaatagaaaatggaagaaactgtggcaaactgcacagtaatatgcttcatctcaaggaagcagctgcttcttggcaataacaaacttttatcacatggagacttcttcaagaaaagcctgaaatccagatgtttttaaaagttgccaagttgttaaaatactggtaactgtttaaacaccatatatgcagaaaataacatctgcaagacaatttcgagtctgcatcatggtttataatctcagagaccaaactttagattcatcgaagggatatccatgaattcttttttgttttctaaatccaatttttttttaattgaggtgaaatcacataaaattaatcattttaaaataacagttcagtggcatttagtatattcacagtattgtgcaaccatcacttctgttaagttacacaacattttcattaccccaaaataaaacccagtatccattaagcaattatttaacttttgccctctgccgctggcaatcaccagtctgctttctgtctccatagatgtacctgttctggatatttcatatacatagaatcatacaatatgtgatctcttatggctgctttcacttagcatgtttttgagagtcatcaatatggtaatacatatcagtgcccccttctattttaaatggctgaataatattccatgacatgtatataccacaatgtgtttattcattcatctcttggtagacctaggaaatcataagacattggttggttccactttttggctattgtgcatagttctgctgtgaacattcatgtgcaagcatttgtatgactacttgttttcagttctttagggtatatacctaggagtagaaattgctgggtcatacagtaattctgctcaactatttgaagaactgccaaactgttttccacagcagctaaatcattttccattcccaaaggcagtacatgagcattccattgtctccgcatccttaccacacctattactttcctttttgttttatttatagccatttcagtgggtgcaaagtagtgttgatgtgcatttccctaatgactaatgatgctgagcatcttttcatgtgcttgttggccatttgtacatccatggaaaaaggtctattcaaatcctttgccaatttttaaattgggttatttttctgttgttgagttgtaagagttctttatataatctggatactagacccttaccagttacatgatttgcaaatattttctcctgttccgtagtttgcctttttgctttcttgatacagtcctttgatacacagctgatttttgtcttgatcttgtaccctacaactttgctgaatttgtttattagctctagtatttgttttatggattctttgagtttttttctctgtaagatcatgtcatctgcaaatagagatttacatcttcctttccaatttgggtgccttttctttttcttgcctaattgctctggcctaaacttccagtacaatatcaaatagcaatggtgaaagcaaacattcttgtcttgttgttgatctcaagtggaaagctttcaccattgagtatgatgttagctgtgttttcataaatgttttttataaagtcaaggaaattcccttttattccaagctttctgagtgtttttatgaatagataactggaatttttaaaataaaaactgtatatgtataaggtatacaacatgatggtttgatatacatatacatagtgaaatgattactataatcaagctaattaatatatctatctcctcacatagttaaccttttttgtgtgtgtagtggggtgctagattttgacaaatgctttttctacaccagttgagataccatgttttttttcccccttggttctgttaatgtggtatattatattgattttcttacattgaaccacccttccactcttgggataaatctggctttgtcatagtgtaccatccttttaatatgctcttggattcagtttgctggtattttgttgaggaatttttgttgttgttgagggtttttcatttatattcataagggatattggtctgtaattttctgttcttttggtttttgtttttttggaggcagggtcttgctgtgttacccagactggagtgtagtggtacaattgcagctcactgcagcctcaacctcccaggctcaagtgatcctcccatttcagcctcccaagtaactaggactataggcatgcaccaccatccctggctaattttgttaaattttatgtagagatggggtctcactttcttgcccaggctggtctcgaactcgtggactcaagtgatcccccgaccttggcttcccaaagtgttgggattataggcatgaacaccaagcctggtctataatttaatttttttcgttattttttggagacagggcagaatcttgctctgtcacccaggctggagtacagtggcatgatttcggctcaagtgatcctcccgcctcagcttcccaagtagctgggactacagttgcgcaccaccatgcctggctaatatatatgtgtgtgtgtgtgtgtgtgtatatatatatatatatatatatatatatattttttttttttttttttttttttgagaccaggttttgtcatgttgctcaggctggtcttgaacccctgagctcaagctatctgcctgccttggcctctcaaagtgagccaccacgcccagcccattttctattctttggtgtctttggctttggtatcagagtagtgctggcctcatagaatgatttaagagtgtattttctggaatttgagacagattggtgctaattctttaaatgtttggtagaattcactaataaaaccatctgatcctgtactttttcttttcggggagaattttgattactgtttcagtcactagttgttacaggtctgttgagattttctttatcttgagtcaattttggtaatgtgtgtgtttttaggagttttccattgcatctatgttgtctagtttgttggcgtacagtttttcaatatattctcctataatccttttgaattctgtgagatgtaatgtcctcagtttcatttttggttttagttatttgtatcttcttattttcttagtctaagccagaggtttgtcgattttgttattcttttcgaagattcaccttttggttttgttgagtctgttgttcttctctatttcatttatcttcatcctagactttattttcttttttctttttttttttttttttgctttgaatttagttctttttctgtttcttaaggtgtaaagttaggttattgatttgagctctttcttcttttttaatatagactgttagcagctataagtttccctctgagtactgctttcacagcatcgcataagttttggtatgttgtggccttgttttcatttctctcaaagtattttctaatttccctagtgatttcttcttttacccattgcttgtttaagaatgtgttgtttaatttccatacacttgtgagttttctagtttttctgctgtcattaatttctagtttttttccattgtggctggtgaagagattttatgtgattctagtctttctaaatttattaatatttgttttgtggcctaacatataatctgtcctggagaatgtttcatgtacacttgataaaaatatgcatgctgctcttgtggagtggagtattctttctatgcctgacaggtctaattggtgtatagtgttgttcaagttccctatgtcctttttaatctctgcacaagtttatccattacttaaagagggatattgaagtctccatttattattgtagaactgtttatttctgtcctcaatcctttcaatagtttcttcatatattttggggctctgttgtctggtacatatatgattataactgttatatcatctttttgaatcgacccttttgtcagtatattatataatgaggttctttgtctctcgtaacagttgttgactttaagtcacttttgtctaatagtactatagccattcattataaacatcctttcactttcaacctttttgtgtctttttctctaaaatgagtctctcttacagcatatcattagatcatgtgttttgttcattctgccagtcggtcttttaattggtgagtttaatccagttacatttaagtgattactggtaaggagggacttacgccattttgctatttgttttctgtatatcttacgttttttgttcttcatttcctgtaatactgccttttttgtttgatttttttcttagtgtgtcattttcatgctttcctcatttctgtttctgtatataattattttcttagtggttaccttggggattacagtaaacattcatacgtttttaacaatctagtttgaattaaccccagcttagatttttaaaaccctgcttgtatggtttcagttgaagccccaatctcagcgtcatgcaatatatccatgtaacaaacctgcactgtaccctcaaatctaaaataaaaataaataaataaataataaaagctttgccagtgacaatgaaggaaaaagaagctctgctcctatacagctctgcccctcctttatgttgttactgtcacaaattatatcttatacattgtgtgcccactaatatagatatataattactttgtgcatttaagtcatataggaaacaaaaagagaagttaaaaataaataataacactggcttttatatttattcatctagttagctttattggagttcttgtttctttatatggcattgagttactgtctagtgtcctttcatttcagcctgaagggactccctttaacatatcttttagaactggtatactagcagtgaatgtcctctggttttgtttatctgggaatgtcttaatttctccatttttgaagaatagttttgcagcatatagaattcttggttgataggggtttttttgctcagcactttaaatatattaacccatttccttctggtctgcaacttagttctggctgatagtccttcacaagtttacagtcaaactagttggctagagctgcagtaattttaaggctgtgctacagcttaataatccacatctgagctcatcacatggttgttggcagacctcacttcttcactggctgttggctggaggttccgttcctcacacctgggcctctccatagtgctgctcacaacgtggcagctggcttcccccagagcaagagatccacgaaggaaagacaccctccaccaccaccaatgttttgattgttttatttgtatttttgtttttggatccttttggtattatttatataacactgagataattgtactttttcttgcatgagagagagaaatttgaaccatgggtaattttttagtggaaaggaattgatttgcccttccttaaaagcactgctgctaattgctttactcagccttagaaatggaagtaagagactccaagagacttcacacagccttggaatggaacagcacacccttatagttgaccttcttttctccctcctccatcatacttctctccttcctattcaaagagacatgaaaataagatttctgggcatccaggactttaaaatgtcactgtaaactactttcccactggtgttttgttttatggaggaaatgtgtcctttttgattaaaaagtgtgtgtgtgtgtgtgtgtgtgtgttggagagagaaagacttgagtgattctcgcttagatcatactcttcacccagaagcccaatcaactctttactatacacccgctctgcatgaagtaccataataggcacaaagggatgcaaaaacaagaggtgcataaaacaattcccactcttacatagcgtttagtataaagggggaaatacgagagaacaccagtgggggaaaattacaaagccgcatttgtgccccagagcactggttgccacagtattgataaggcagatgcttacgctttctttatgtaatcatataaaagcagaaggaaaatatggaagtggccaggaaagaaaatcaaagatctatgtgcttgtgtttttcagatctagtaaaatatttccagcataatgatttttgagagctttagatgtcttgtttgtaggaccaaagtctcatgtagcccctgcccatcaataatcagttttattctcacttatttaattattgttgccatatgaaaggagcattacttccacattttttctaattttgaaaaagtaaattaggtttgtgtttatagtttgatattttctgttttaaaattatttcagtatttacggagagcttcataaaatgagttagacattggtcatggtaagaataggaatgcaagcccagtctaccagtatgctagctaccttttgtgtttgaagatggtaatcaactggtgtttcttctgcttgagaagaggcttctggaagaagaggcttggaaaaattaggaagtcagcctcttgcaagatggcccactcttagcaattgcatctctcctctgatggattatatagacagatttttaatattccatgtaagggtggttctgcagtctctctgagattatgactggaattgttccgaaataggagactgtgtatgtgagatgtttttaacatcattctgatcttaagcaggttgtgagctggagcttgacctataatataaaaacagtgggctgggcatggtggctcacgcctgtaatcccagcactttgggaggctgaggtgggtggatcacctgaggtcgggagttcaagaccagcctgaccaacatggtgaaaccccgtctctactactaatacaaaaattagctgggtgtggtagcgggtgcctgtaatcccaggtactagggaggctgaggcaggagaattgcttgaacccaggaggcagaggttgcagtgaactgagatcatgccattgcactgcagcctgggcaacgagagcaaaactccatctcaaaacaacaacaacaacaaaaaatagcaggcttgcttctgggcaactatccccacattctaaaatacgtggaaatcagaaaggacaacctgtaccgtatttctatacttaggaattaaaccatacttttcttttcatataccttatttagactcgtatttatagattcatatttactctagccatgcaatttaataacttcaactggggctttacattttagtttcccctcccccaatgaaatctataatactaacctttttattaatatgttccacatttgaatatgttgtcttctttcttcttgactactactattaaacttctgattgcttcatccttttaataaaaaacgaattctgaatttttatttaatttttctctcctagacagttaaatctcacacagaaacagatgagaaacaaacagagagccgcaccatcaccccacctgctgcacccaaaccaaaacgggaggagaaccctcaggtaggcctatgtttccaaaggcaggtctcagtctatggtgtatggtttattctcatgtaccaggaggggcacctgctctctgaatgatgaaatgaactcgatgttcattttcttatgcacttttattattcagcaatgttattgccaagtcagattggtctagagtggaattcttagactgtagtcttgagggtccatgcactagtacataggcattttgattgtatcaaaggaaaagttttttaaaatgttattcttcatatgcatgttacaaatttgaaatgttaagatgagcgatgattttcccagctgtcccattacattcctaatcattactgtgttctgtttgtctcagccaacatttataagatatctagttcactcagctaatgtgtatttatattatcaattgcagttgttaagtgtgcgtttttgttacaaccattgtattacattagaaccccaaaccccaaatgaatcagtagctcagaagtaatccattgaagcataaaagtagggatgaaaatagtaacatctatactataatttaggatagaattataaacataaatagcaaagaagaccctgataaaaatgtagaatgtgaatctgtatgtccttagacaagcaaattttttcagtttgatgtttttgcataagcagctataaatggaaaatgtagacaggtaatatgatgatgaatatctgacagatttcatttggccagtaattctcttgcccctatccttagtgctttcttcataatgaaaccatgtgaaatagtggcataaagccatcaaagcttcatgccatttttttaaagcagtgatttattgagccagttcaggtttcctaaaacaagtacgaaatgtaattctttctgatatgaaatgaatgaatttttaattttatcttgaaaaagaggaccaaaacttaagccaaaaagaagtactagtcacaaaaattgctgaggaacttgtgaaatcatccacagaattaatgacaagtattatgctctgagaaggaaaaattgagcaaaatttccctatcaaaggaaactgaaggatccagcctgggcaaacatagtgagaccttgtttctgcaaaaaataaacaaaattagccaggtgtggcagcacatgtctgtagtcccagctacccaggaggctgaggtgggaggatcacttgagcccgggaggtctaggctgcagcgagctgagatggtgccactgcactccagcctaggtgatggagctagacccagtgtgggcaagcaagtaccatcatgtgtagtagcatatagttcaccttctagttggacagaatcactgccataaacaaagtaaattgctcttggcatatgtgggatacatatatgaggtaaaagtttttgacagctttttattctatcatcaaaaatttaggctgggcgcggtggctcacgcctgtaatcccaccactttgggaggctgaggcgggcggaccacctgaggtcaggagtttgagaccagcccggccaatggtgaaactctgtctctactaaaaatacaaaaattagctggatgcagtggcgcgtgcctatagtcccaggtactcgggaggctgaggctggagaatcgcttgaacccaggaggcagaggttgcagtgagccgagattgtgccactgtattgcagcctgggtgacagagtgagactccgtctcaaaaaaaaaaaaaaaaaatttattccacaagagaggacattttttttcacttaattattttatgagcttgatctaaactggcaaagatgatttgggtgtgagtggccaataagggtgctgttacttgcttaaaagagggtgcatctgaatatcagtccacacactgcttcatcaaaagaacaacagttaggggaaagcctcttgatcttgattatatttctaaggaatagtgaaaattaggaatgtagttagttggcaaccacaaagtgtatgtcatttcaacatacagtttagaaagcaggaaagtccaagactgctttttcttaccagactaatctggctgtcaaggggataggtgcccatctcagtttttgaaataagaaataatataaaaacatttcttcaggactctgaagttaccagtaaatgacatttctatgttctcaagtggcttgctgaagaagtttattttcaaataggctgaacctatcacttcaggccaaagtagcataatatcgaggataagatgtcaggacttttaaagatcaaattgtggtataaataactctacaggagtatgtcttttacaattgaagatgttctttattcatcagagaaataaattgataatgtattatttggcatatttagaaactgcatgcagtagtacaacagaaaatgaagacacacttttcagaccacatgcaagcaaagaaaagaatagaaatcaatttgtttccctctctggcttgaagagtcttaacgttccatcttcagggcccagtattttgaccagcttagtttctgatggagccctaagagtggtcttcagagagaaattgctccataatttttaggttcatgtgtgattgaaaaatcatagtattcagcagaaacacctgctgtcattcctgaaaatcatttagctgtgagttagcattgtggcagtataaatgtgagaaactgacctagtcgtgacaagtgaaacactcaggatttggagcttgttaaatgggaggctctttaaaactctctgcatgttttgtgagtatgaaatcctcttctttttaagaggatttttctgtggggcgggtcactcggatcacacaagatactgatttctgtcattgagaaagaagatgtagaccccagtccttctcttttggccctgttagaccagagagcctctagagcaaactttctaacctgtggcccaggatggctttgaatgcggccccacacaaattcgtaaacttccttaaaacatcatgagttttttttgcgattttttttttttgaagctcatcagctatcattagtgttagtgtattttatgtgtggctcgagacaattcttcttcttccaatgtggcccacattgaaggaagccaagagcttggacacccctgctgtagaggatctccatggctgcttagagaatgcctgctcttgtgcattcatgagacccgcccattgggctggctttccctaatgtcctactaggaactggcaattggctttgtgagaacccagactgaagcatattcttcttttgtttctctggcacagaaacttgccttcatggtgtctctagggttggtaacacatgaccatctagaaggtaagagaagatattcttggcactgcctttttttctggcccacagctttgttcctgaaaatgatgtttgattgaattcctggaatagaaaattggaacacaaatagagtatgattcagccaatgtggactttatttcctttagtgggaaaattgccttccctctgtctaatgttcctatcattatccacactactgtcctgggaaaacctccccagttgcctaaattcaggtgacttctgttcatttaggggagctcttctttttctgaacagcacagcgaagtgctcttctgataagcctttatattttctggtcactccaggttatcagaatgttgacaacagttacaaagctatacctgtcctgattatttaattcaagaatgatgaactttggttactcagtttaagtcttatggataaagctcatccagacctatatatacagcagtctaaaaatcaggacaacttgtttacaagtgttgtctattgttaaactctcaacagagaaccacgtgtaggacagcgtggtcttgcaggtgagagtagatggtcctacatatttgcttccagtagtgtgcttgcctctgctgaggcttcagtgaaacagagacttgtccctgattctgatttcttatgggaaaaccaatagataaaacaatgaagttaagttttttaggttctccatgcctctctgctaatgaaaaccttttcttctctcaagaaatccaaagcaagaggcaagagcgaaaaagaagaacaacagcaaatccggtctacagtggagcagtctttgagccagaggtattactggccagcatctggcccttccctcatgttccagttttatttatgagctgttcagtgcctcccctctgaaaacctgctgaagagcagcaccctgattgtacttggccagttctgtgaagtggtagattttttttgacttatcatttttattagtcactgcttaccccttaggtttttttcctaagtttcagcagatacatgcctaccttaaaattttaattcaccctgacttcaatacagctgtcatcggcaacagaggcaggcttctctgagagagtctctgagagccaagtacatacaataaaacccttgagcattgagaccttaggatgattagcactaactagtcggcatgttgacagtcatgccatgcttggtctttagcttgtgccagtattagtaataaccacactactcaacagtcacctttcctccttcaaccctcaaagcgtaagaagagtgcagtgacatacctaaacagcacaatgcaccctgggacccggaagagaggtgaggacctttttgtatctctcccttgctgctgttgcttttgctttgtgtgtgtgtttcttctccttccctcctcccatcattataggacctaactcctctatcctttgaaaatagttttgttgttgttctctgagaatgggagagaaaagagaatgagatttcttattagagttctgtatgctgaatcaaaagctgactttactaggattctggcaaagctgactcaggggaatggcttaatgtagcatttctgccccaagcctgccaggccatccatgaatagcacagtgaacagaaccccatgtaaaaggaagcatttgagagtcattaagcagaacagagcactgccgttgccaaggtgttcctaatagcgtcttggttgtcctgctgccggcaaggccagagtgtgacgctgagtttcttggagctgcagactttccaggaaggaaagaggtagccacacttgagaacttagaatctttgagaagagggcatctccaactaaggaagaaaaggtcactctcaaaacaggctccctaaagaacagattcctaaagagctccaatcccatatttcagaccttcccatggacattccagaatcttactcttaggcagagcagaaaaaatagcagtagcagcagcagtgtctctcaccatgcaagtctaaataggtcttaacagctcagggtttgagctcataaacaaggtactgaaatttttctttgatgtcagtaatacatcccaagatccttttctccacatggtaatgtgtccctgaattatagttgcaggctagaaaggttgcagagtgagcggagtagcatactaatttttgcatgtgcacacacagtctcagagctactggaagctcaggaggtcatcctgaccctttgtctgccttaggcaggactacactattaccattccctctccacaaaagagatatacccacccttagtaacccattctaatgtttcatcagtcctgtccttcaagtactcaaaaatatttagatgggaaaccctaagtcatggctttatattgattcctgggccacagtaaccagtactctaagttatttttgttttgttttgttttgttttgtgcttggtgatttttttagtgacccctgatgcagttctcggaaaggagccccccagccagaagccacaataattggcctgatagtgggcagtatctgctaagaggacaggggttaaatgagccagaaagaccttggcatctcttgctaaggtcagaggataaaagcttgcatccacagtgcctaggatatgccttttgtgggtaaacaagagagcattcatcttgttcttccccttccagcagcactgaactccctagaaaagataaaccagtacgatctgtctttgtactataggcatcaccaatttaatacagagaggtaatatttttgtaacatctgacagaatcatgactcttgtgcataatcctaatataaatgataactgttggcaaagtcatgatcctacataccatttaccagtgcttataggcagttttgtatctctctggcccttttttttcctttggtgtgttgggcatatacttttgatcactcatagcttagaagcaatgaccttgcccctagaagacaagggccctgacttagatatgtggtaaggcaagagtggctgacctagactttctgtacccacagggctcattcaagttcctttgtagccttgaagtttgagtcaaaatgctcttacacaaatcaggtctctcagttaggagtgctgatgggagggcctttcctgagacttttaaacagccccaatttttagagatgtagtttatcaggatgtttgtcatgtaaagtgggggagacagctgccagtcaactggggagggtatccagggacagaaatacttaaacattaattgctaagcccagagcatcttttaagctcttaggtttcagctactcccagaacatgcctctcaatagctctaaaagcaagggataagaatagttaacttgaattttgcctccttgctttgccggtctccaccctcataaaatgcagacagaatagagaaggaaaagcagaaatcctaaataaatcagtttgtgggaactgagaatcattaaagtattgtgagaatgctgattgcagagaaaccttagagaacagtatgcaagatatgaaaaaataataaattcggccaggtgcggtggctcacacctgtaatcccagcactttgggaggccaagatgggcggatcatgaggtcaggagatcgagaccatcctggctaacacgatgaaaccccgtccctgctaaaaatacaaaaaattagctgggcacacgcctgttgtcccagctacgtgggaggctgaggcaggagaatggcttgaacccgggaggcggaggttgcagtgagccgagatcgtgccacagcactccagcctgggtgacagagcgagattccgtctcaaaaaataaataaataaaataaactcattcctggccctggctcccactgggctttgacatcttggttcttgcactagaaatctcaaattgcaatagtccaggaacttcaccacaatctgcccaaggtgaggtctttctacataagccagcaccttctgtcattctccagagctctcttatcctcccttctcttgagagtcatatagttgtttctaatgacatttaaatctttgcttctcttccttcctttgggactgttgaattaaccttctgtctgctacctcacttccttttccatgctagccaatgaggaacactggccaaaggtatgtaagatcattttccccctctctttccctccccgtttttcccttttgttcccttctcttggtatataggtcgtcctccaaaatacaatgcagtgctggggtttggagcccttaccccaacatccccccaatccagtcatcctgactcccctgaaaatgaaaagacagagaccacattcactttccctgcacctgttcagcctgtgtccctgcccagccccacctccacagacgtaagtaacttgggaaaagcacactgtctttctgagagcttaaattgggaaaagcgttatcatatgttgtctccttatcgacttgcaccttcttgactaaccctggaacagcaattaaacactatagaatgctttttatgccatgtaaggcagctttcttctgagtttccaggccttccatgtccttgagaaacatgttaaatataacctcatggaactcagccagccttcagagtctgaatttgatctactgtgaatgagttctcagaaaacagatggggtggggagatcagctcatacagttgagaggtgtgcaggtttctatcatcagtgttttgggagtggggaaaatgaacaagacatacagtcccccagcagcccttgtttgctgcttcaaatacaattccaaaagtggaaagttttctttagagcaactgttgatcagaaactgttgagcagaaactctgctctttagagcagagttgatcagaaacaggttccggaaaaactgtcaaatacttagtagcccttcacccacaaactgcaggaatgtgaactagtgctctaaatgtttaaatgaacctcaacaaagctcagaattcactcagcagatactcactgagcgctactctgctgagcaagtgctattcttgaggctggggatacagcagggaacaaaaccaactccctgtcctcaaggagctcatctaaagaggcagataataagaaagtgaatatataatgtcaggtaatgataagtgctatgaagaaaaatggggccgggcatggtggcttatgcctgtaatcccaacactttgggaggccgaggcaggcagatcatctgaagtcaggagttcaagaccagcctggccaacatggcgaaacctggtctctacaaaaacacaaaaattagccgggcatggcgtgctcctgtaatcccagttactctggaggctgaggcaggagaatccctggaacccaggaggcggaggttgcagtgagcagagattgtgccactgcactccagcctgggtgacaagagtgagactccatctctaaaaagagatcaaaaatggaatggatttaagggcatatagcatactggcaggaggctgatgtttatgaagagtggtgaagcctcgggaggatctgggggaagagcctgccaggcagagggaacagcagtgcaaagccctgaggtgggagtgtacatggcatcctgaaagaaaagcaagagggccaggatagcgggggcagagcaagctggccagggtggtgggaaatgaggcctcagaagtggctgggccagttgcgcagggctttgtggctttcgttctcagtaaaatgggagaccattacagggttttgggcagaggagtgacataatttttcggtatttattttgaaaattttcaaacctacagaaaagttacaataatggtacaaagaaccaatgtatatccttcacattgattcatcagttgttaacattttgcctatgcttctcacctaccatacacacttattttaggggaacaaggtaacaagaagttgcagacttcatgaatcttcaccctaaaatattttgctatatatctcataagagcaaagatactgtcttatgtaggtacaatgcatttatcaaattgaggaaatttaacactaataaaatattactatataaaatatacagtccatattcagattgctccatttgtcccttacttacttttgtgacactttgtttttcctgcttcagggtccaattcaagattactcttgacatttattgtcatgatattgtctgtttggtaatcctttattttggaagagtttctcagtctttgtctttcataacattgacgtttttaaaaagatagccagttcttctgtagaatgcctctccgtttggattgtctgattttttttctcagcagtagattcagggtatgcatttttgcaggagcactaataagtgacgatgggtcattatcagggcatcacagcagggggcacgtgttgtcagtctcttctgttgttggtgatgttaactttcatctcctaagatagtttctatcagatttttccacctgtaaatgtgcctttttcctgtggtggagatagctttgagtctgtatgaatatccagtttcccaacaaactgttatctaatgatagcatcctttaatgattcttgcttgcatttattatttttaagatgtatgcaaaatcaacttggattttaaaaaggatcactgtgtcgaaaatatgcagaagaaaagggcctatagggaaaataggatggaagcaggaagaccagttaggaggcttttgcagttgtccaggcaagagatgatgatgggcaggcacggtggctcacgcctgtaaatcccaacacgttgggaggctgaggtgggtggattgcttgagcccaggagttcaagaccagcctggacaacatggcaagacccctgtctctacaaaacattaaaaaattagccaggtgtgatggcaatatagtgaaaccccgtctctactaaatatacaaaaattagccgggcatactggtgtgcccctttagtcacagctgcttgcaaggctgaggtgggaggatcacttgagcatgggaggctgaggctgcagtgagccatgattgcgccactgcactccggcctgggtgacagaacaagaccctgtctcaaaaaaaaaaaaaaaaaaaaaggaaagaaagatgatgatgatgatagcttggaagaagcagagatggagaaaagtgatcacgtctgcatatattttgaagagccatcaggattgaatataggttatgagaaaaagaatggtcaaggagaaaaccaaagtttttggcctaactgactagaaagatgaagcttccatttactaaagattaagagaggagcagatctgaggagggaaataaagagtttcatttcacacatgttccagttatttggtgaattacagagcttgtcattgaccatcctaagataaaatgtcccttgaacttgaaggttctcagaacctactagtggcacacccctctccaaggagcagcagaataccatatgaatattctgagttaaaattccagaggtaacaaagaaagtgttacctttggaggactagggtcatagaagaattctgttctcttgacaggtttccttgtttccttccttagacgtcgctggtggttacagattcatcattctctaaagattcagcattttgtctcgctttcctgacttttggcattaataattgacacaggtttcctaactgtcctgttaatgagcagcagggtctctctcagaaatcttgtttgctagcgccaaagattgtcccaactttttctcagttgaagtattgccaaaggatcaccagctcattggcctcttggtagagctctccctctagggtggtacacaaatgctaggggacagttgattttgtggttctgcatgtgagtctctctcctaaacagtgttgtttttgttgtattttttgggtcaattgggattatggttttctttgaaagattgaacccaaaggatccactcatcaactcacaaactaagagcttctgccaggtttttttaaaaattgaaacattctttttcttttcagaaatctacaggtaaaagaaagcttttctaaagaactccctaagttaaactcagcagaaggtatttttaagataattgacttctccttttacagtatcccagtagtggcagtgattaaaatcaacacacaggtctctgtatgtttgctgctgggtagcataagttccaacaacattaattaaacaataacacttgagaggcaggcatttctagggatcaataaccattttgagggacttggtataatacaaaacctaccagacactaatcctctggatgtaccgtgttgccactatcatcatttttatgagaagggaagatacgttaacataattataaaaattgtttagcacatgatgaaattgcagttggtattgccagagtgcttcctaaaaacatacgtcctcagcgcctagcaaagcatcatgggccagctgtttttcaacttacctaccgtctggtttatagtaataatttggtcagtcatcaaagcctaagcattttgacctggtatggtgcctccgtaggacttcctctgctctttttaggcaaagagccggttctgtatgggtaaaatgttttggcattttatattcatttctatgggcagcagttctcaaagtgtagtctgggagtccccgagactctttcagggagtcataaaatcaaagctattttcataatgatactaaaccatcatttgccattttcattctcattctctcaagaccgaacagtggggtttaccagatattgcatgatgtgtgatgatgtcactctggcagctaatggaatgtgtacctctgtgttttggagtttaaaaatgttttaatatgctttgtttgtaatttttcatggttctgtaattcagaattgaaagtttttaccagcctgggtaataaagggagacccccatctctacaaaaaataaaaaaattagccgggcatggtggtacgcacttgtagtcccagctacttgggaggctgaggtgggaggattacctgagcctgggaggtcgaggctgcagtaagccaagatcacagcactgcactccagcctgggtgacagagccagacccggtctcaaaaaaaattgttttttaactgctattaacagtaaatattaatagatataactcatataaaagctctctgggatcctcagtaactttaagagtgaaaagggatcttaacaccaaaaattatagggtatatacaccagataggaagtttcctttgggaacttaaataaattatttaatttttattttctgtctttctgccttctgtttcttgatgtgctccttgctcaggagcaaaggaaagtgaacgcctcttcgtttatcccaagtccgtctgaataagatgcccagtttgtctcattcactccatcactgataattttttctgtagttcacataaaacagtctctaaaatcacacattttaaataaactttctaaagacgcagactcaccacttagggataaggttcaagaaaggctgaccctctagaggaaaagagtagccctcagcctgattaaaatcataaaataatgaaggaagaaaatcatagttaatctagggatgaaaccttacctcttttggtgcctagaagttaaactattaggctacattcacatgtaatattttagaacatatgttatcttttttactgtccagtggtcacattttcctactaagaaacattaaaatctgccaggcgcagtggctcacacctgtaatcccagcactttgggaggccgaggtgggcagatcatgaggtcaggagttcgagaccagcctgaccaacatggtgaaaccctgtttctactaaaaatataaaagttagtcaggcgtggtggtgggcgcctgtaatcccagctactcaggagtctgaggcaggagaatcgcttgaatccaggaggcagaggttgcagtgagccgagatcgcgccactgccctccagcctgggcaacagagcaagagactccgtctaaaaaaaaaaaaaagaaaaagattaaaatccatccacactatgatgtatcttaaaacttgtgtagccttttttctgggctgccagataccctagtggattacagagcaggtttcccttggagtgaaattgtaggtccatgacgatgtgttccttcactagtggtggtggagggattacatcatagaaaggaaggattcacattcctctctattattgcttcttgtgcacaatttctgtattagaccttctggcagaatagccaggaaatccacagcagcacattggcttgacttgctgggtcacctctagcacttcccttcagtcttcccttccctggtgttcttatcagtggatttaatcccatccagagaatgagctaggcattgactctctggaaaagacctctttaatagctcttttttttttttttttttttttttgggctatgttctcctcttccaattttaagtagatctgctttattctgatggtgccttctgttcagaggctccagcagacttacctgagtcctaacactatcactgtgatgggggtggtagagagacaggaccagcagaacagactggggctgctcgtctttttccagctggtgaagtttttatagggataaagcctcccagaatagaatggcccattgaacagcaaacacaaaatactggttttaggagaacattgtcagctgttgctttggctttttaaattcttcattttagaaagaactcgcatatgaatttaatttgtttctgacttaatattttcccatttgaactttcactgtatttttttcttcttgagcaagcaaattcaggaaaactccaatatttgtctgtcttctttcccagtccttctaaactccccctagaattgataggtgatgagaattgtttgtatcatattgtgaaacactttgatgaatggatttccgtacctgtaagatttatgatatgtaggttgtcctctaccaaaacataataaaactcttaggtatcgcctataatgttaattttggccttggcgactatagacctctcctgtaaactttaagaatacagtagtcccggccgggtgcagtggctcacgcctgtaatcccagcactttgggaggctgaggcaggcagatagccaggtcaggagatcgagaccatcctggctaacacgtgaaaccccgtctctactaaaaatacaaaaaattagtcgggggtggtggcaggtgcctgtggtcccagctactctggaggctgaggcaggagaatggcgtgaacctgggaggcggagcttgcagtgagctgagatcgcgccactgcactccagcctgggtgacagagcgagactctgtctcaaaaaaaaaaaaaagaatacactagtctcccccttatctgaagtttcacttcttattgtttcagttacgcatagtcaactgcagtctgaaaatattaagatgttttgagaaagaaaaaagaagatagacctcattcccatcttttattacagtatatcgttataattgttctgttttcttagtcactgttgttaatctcttattgtgcctaatttataaattaaactttattgtgggtctgtgtgtatagaaaaacatatttatagggttcagtacggaggtttcaggcatccactaggggtcttggaacatattccccaaggataaggggggactattgtactgtccccacccagggagccttagctatgtggagtgagtaggggcatgtgctattggtgattcctgcttctcttgagtactcctggaacgaggcagctgattgtcctaaaacatttatatgcatctagaatgtgcatgttaacattaaaattttaccttttttgtcctttttcttacctttcctctcaactttatagggtgatattcatgaggatttttgcagcgtttgcagaaaaagtggccagttactgatgtgcgacacatgttcccgtgtatatcatttggactgcttagacccccctctgaaaacaattcccaagggcatgtggatctgtcccagatgtcaggaccaggtactgtgggtgggtccaacaggggaggggccgaggagaacaaagacacggccatcaggaggaattcctttcccggggaaatggcagtctcttctctctcccagtccgtctccgggctgcatcttccctgtttatgacacagcacgcaggcgcatggccttcattccctcagaagccctctgccatattactgagctggatagatgcttccttgtatttgaaatgacttgtcttctctttaaaagtcaagaccctttaaagtccagtgtgcctcattctctaggaatggtccagaccaagtatatggttttaaaactcttctttgggaatgaaattaagggaaattgcccagttgattaattaaaataacaccctgggccaggcgtggtgactcaggcctgtaatctcagcactttgggaggccaaggcgggcaggtcacctaaggtcaggagttcgagaccagcctggccaacatggcgaaaccccatctctactaaaaatataaaaattagccgggcatggtggcaggcgcctgtaatcccagctacttgggaagctgaggcaggagaatcgcttgaacccaggaggtggaggctgcagtgagcggaggtcacaccactgcactccagcctgggtgacaagagtgagactctgtctcaaaaaaataatactaataataaaacaacacccatttcacttttaacctattttgttatatcaggctcagagaactaagtgtaaagtgctgtcgatattttatagacttaaaaggcaaacatattagtaactgtcctagcctccctcgttctctctttggtttctggtcgccttttctcaactatgcatgtatatttatgtctttatgattttattataagctgtctcaagtcttttttagaggtaggcaaagtataaataataaataagcaagcccaatagctcagcaagtactgggattctgctcagttctttggaatcctgctttgaacaaattctggttttcccttgtaatattgtcctcatcctgcagcctgtggtgcagcggaacacttctctcactgtcctcctcttgatgctgctttgtgaccttctgacgatttttgacatagggtctagattatactttagtatttggaactaatatttaattttcttggtcaggctgtctttgagggacatcgaaatctaaaattgagacaggcagcccatgtcaggtcaaggacgaaactgccagtggctgctgccatcatgctgatgtgcagcttttgtgttggtggttctagctgtcgggagtggttgggtgtcatgtggcgtgtgtgaaaagataggaatgctcagccaagtcccagctccttctaagcctgggctcaagtgtcctggctcttcctgccttgaacttgattctcctaagctgatatttggaactttttagtccagaaactatagaccagggttttgcaacactgctaccataaatccttcctggattttatctgccagtagccacagataccactgctagctgttacatagaggatgtgtgtttaaacctccttctcaaggtaaaattctaaaaatcttttcagatgctgaagaaggaagaagcaattccatggcctggaactttagcaattgttcattcctatattgcctacaaagcaggtaaggagttatccatacccacttttttgtaagcttccccttgtttgaaaaaaatactggcagtatttgttttattctcaaaagggaatttaaatttaaaaatgaaaaccttttgcccttaactattggaggaaacaaagcaaatgaaaactttttattggataaagtggaaaacttctgtagcatttattattattattattcatttattttttgagacaaggtctcactgtatcaacccaggctcgggtgttgtggcatgatcacagcccactgcagcttcctcctcctgggcccagtcgatcctcctacctcagcctcccaaatagctgagactataggtgtgtactaccatgaccagttaactttagtattttttggtggagacaggtttcgccatgtcacccaggctggtctcaaactcctgggctcaggtgattcacctgccttggcctcccaaagtcctaggagtacaggcatgagccatcatgcctggactgtagcacttcttgggggaagaaaatgagatgtggtatctcatttatgtaaagccagacccaagccaccgacagttttagcatactgtacacagaaaaaggaaaagtccaggtgggcagattctctgcactgggttgtaggactcatgggagctctggggaaaataccttctttggcaggcattctgagcacagaggacatttcaaagaattaattgtcaaaaaccgttccttttttttttttttttttttttagcaaaagaagaagagaaacagaagttacttaaatggagttcagatttaaaacaagaacgagaacaactagagcaaaaggtgaaacagctcagcaattccataagtgtaagtaaacctcatgccttcagcagtcgatacataggtgcagagacctaggcctttccaatatacgtaacagtacgtgtgggccccaggctgtttcgggtccttctgtttattaacgtgattaacttgggcaaatgcagtttgccatccagttagagttcagacctcaggtacaggcggccagttggtaggtggtgccttacccaagctctgtaacatcctcttggctttaatcagagagaggattttcagtcttcaggctgaataagtaacagctacaacagtgtagccatggccctgcgtattcctgacagtgtgtggggggagtgtagcgcctcacctgacactgagcagacacagaccaggtcccctcgtgtgattcttcctagtcacctgagcgagtgggcccatccgtacggccctccctcgctctttcttccacaccatgctgattgcatttcccggttttcctgaccagtgtgaggaagcgggctttctagagacaagtattggaagtaagtactgcccagcccggcctgtccaagtgggaaagagggttgtatttgcagcagggggacagaggcttctcccaggcaaggagccagtcttcttttccattgagtaggtcacccttgttggagtgaagtgacctcagccctcatggataccaggtggtgccttgtacttggtggcagttgaactgtcctgcttacctgctttctcctcctcaccatacctacccatggcatgcagatttaacacctctttcctctctttccctgcctaaaatagaagccagcaggtgtgggaagctgagggcaaaagggcaaaagactctaagtccccggctgagcagaaggtgtactggctgcaggcctttgtccttggggcttcgatcctcctaaatgctgctggcctgtcgtctcacttcctgctgccctcagatggaatccagatagcactgtgtgttttccaccctggagagctcagtccagtcctgaaggctccccagttagcatgacagaagcatatcaaaacctgcctaaacaggctgcaggacagctgtgggaactttttttttttttttaaacaacctttgtttggaagtctgatggcggctctgccggtttgtttttaagcgttagtactcctgtgtgttggtgcccgcatgctctttctccctctgttgcctctgggacctgggaccccccagcctacccactccacccgccctgttccttaggtggtagccgcccactccactgaggaacacagcaaggcccaggggctgcacagcagccagcagagcttcttctccctgggcagagagaaggcgctctgctcttaggggctgccaggcctgttagaaaccaggcggctcagtgccactgcccttgtcatttgctgcagaaatgcatggaaatgaagaacaccatcctggcccggcagaaggagatgcacagctccctggagaaggtaaaacagctgattcgcctcatccacggcatcgacctctccaaacctgtagactctgaggccactgtgggggccatctccaatggcccggactgcaccccccctgccaatgccgccacctccacgccggccccttccccctcctcccagagctgcacagcgaactgtaaccagggggaagagactaaataacagagcccctctaggagaagccacgggatcccggcggcaaggagaacagaacactgaagactctagaaaagcaaagccggatttctggaaagtgcagaattcttttggttctttggttccagagagagagaagatgcttgtgccaggtggcaccagagtttgccaattgatccttcttattctgtgtgtacatgcaaagattggaccatgttacatgaaatagtgccagctggaggttctttgccagcaccatgccaagtgaaataatatatttactctctctattatacaccagtgtgtgcctgcagcagcctccacagccacgatgggtttgtttctgttttcttgggtggggagcagggacgggcggagggaggagagcaggtttcagatccttacttgccgagccgtttgtttaggtagagaagacaagtccaaagagtgtgtgggctttcctgtttctaaactttcgctactataaaaccaaaaaaaggaattgagatttcaccaaccccagtgcccagaagagggaaggggagtggctggagggagcagggggtgggacagtgtatcaaataagcagtatttaatcacctctggcgggggcctcgtgcaaggggagactgacaccaagaacagccagtaggttcttctcccctgcactctgctccctgcgcggtaaccccaccactcctgaagcctgcccagtctccttccttccctgcttggtgagtcgcgcatctccgtggttatcccgctgtctcctctccaagaacaagcagagcccgggccactggcccttgcccaaggcagggaagaaggatgtgtgtgtccaggaaggaaaaaaaggtggatcagtgattttacttgaaaacaagctccatcccttttctatatttataagaagagaagatcttgagtgaagcagcacgcgacccaggtgtgtgtgaattgaatggagacgtttcttttctctttctttaatttttgtttttgttctttttttctttaaggaaagttttattttactgttcattttactttcttggtaacaaaaactaaaataaggaatagaaaagctgtttttcaggctgacagtccaattaagggtagccaagaccttgcatggtagagtaggaatcatagtgtcagtgaggtcccgtgagtctttgtgagtccttgtgtcatcgttcgggcactgtttttttatgcaagggcaaaaatctttgtatctggggaaaaaaaacttttttttaaattaaaaaggaaaataaaagatattgaggtcttcctagtgttacttaaattaagatcaaggtaagaaacattgtaaaaaaaaattacaaaagtgctatttgtttcctaaaaacagtgatttctattaaaaaggtgtcagaactggagaaaatgccgtgtagttataattttttagcacagaccctgctgatcacgatgacattttgccgtgtgtgtgtctctagactggtgggccagtctccttgaaggacagaggcggagctccccacccttctctctcctcagaaaagaccgtgctctcttcttggtgcagggatcttgtctcctgttgtgaagcccaaatggaagcgtggatggtatcagggccctacccgtggtcttctcagattctgctagagcaaaaggctggtgcctaaataagatcccttcctttggtgctgcttttggtctttcagccaccagcattatgagtgcctgggggacacctccgagggaactggccagcggagctctgtggtgcgcacgcaccctggccgtgacaggagggtgcgggagtacggctgcatcagcccttggtgcttagaacagaggaggagtgacatgttttgagggtacgtctctgagacagagccccagcgtggccttcgctctgtcttgcctttggggagaggtctgaagctcccactcctttctctgcctgttggctccaggcaccagaaatttactccactccacccacccacaagcctcctgggtgaccctgggctagaattgctgcgcttgcctcggcttggccggttgtggcctctccttgagaaaaccagggttgtgaaagactcagaccattctctcatcttgccttgtcagaagtaaattgtgtcagatttgtgctctcgctggagacctttgccccttgcgtgcccctggccgatgggagggcggtggaggctctgtaccctggccctgctggagcatctcccccaagcccactccaggccctgggaatggccagagtctaggagaggtagaaacgatcctatcagcttctctcccacccaattaggcccagagagacaaagacagatctgaaagcaaatgcaacagagaagagacacttcttagagtaaaatgtgtctcatctctatcagccatcgcctttcatcttcccaggggcctcagaagaaggaattaagttaggctgaacaggcctcagagttaggccctggctgcttgattggctgagggggaaagagttcccttttctcattcagaaaccaaggtgctgtgtctagtcagggagccttggagatgcctggactagttggaggaatcgttggcagaggatcagagaccagcagcaggctgtctgccctgtctagagctcttcccctcaacttgtctgggcccatctgggggttgccacacaacacctctaacttaccttttcctgaaagaagttgggaaaccatcatcactagaggcctttgctcagagaggagctgccttaggagtcttgggtcggaggacggggctaggaattgaccagggctttgcctgccgccctcagcagtgtcgggtacattctgacctcgcctgcagctgggctgtggattcttcctgacattcagatgtgagctgttttgggagtcagctagtatggagtacgagatgcaacccagcccccaaacctacattctgcactcaaattccaaaacactgctttactgtaaagaagaggcccctggcacccaatctccctgtccttcactgtcccctcagacctgggcggggagggggggggggcctgtgaccacctgagacatacgctcgtgacactgccccaccccagccacctccacttgcttcctcctccttccctccgctgctctttccccacggcccagaatttagctgctctgacagccacttttgagaccagctggctttgcagtcacttcagagagctggagcggctgcccactgggccctgactgggagtcccctgccagctcctgatcaggcgctgcgccctggtggcagtgatgactgggagtcccctgccagctcctgtccaggcgctgcatcctggtaacagtgaggccatgttgctgtcatctccacctctgcattcttgctgcctgtgggtcctttttctttcatggagcctgctgggtcttgtctcacctgtgctgagctcctctggggttttgatttcttccttccttatcaggccctttggggtaagcctgctggttgtacctgacatagggaggcagttaggggcagtccctggtggggccgccctggcagcctccagctggcaccatcgtgtgcctggtttccctgcaacacctgcctctctgtccctgctgctgcttggctcaggcccaacaggcagcgtgcatggaggtggttacacacagctgtttccgtgagggtgaccgtgtctgcagcacgcttccgtctccgcatgcacggctgcctctccagccacctctgatacttctctcttggggccatcagagcctcccttgggctgtcacctcccagctcacacacactcttcagtggtttcctctcttcattctcttatagggcgtggtccttcttatttatctaaagggctgaatttaggagactttttacccaggggcaaaaggctcttagggtaatgagatggatggtggcccaggtgcattttccagggcctgggttctccagatcccgtggcttctgttgagtggaggcaactttgctctgtgtgaacctcgcccctgtccctctgccgggcacccctggcaggaagcaggactcccatcctcaccctgacttagactgtcctctgagtcagctcctctccaagacaggagtgggcagccctgggcagtcttctggccccttgctaaagtgaggggcaggaagctggggctgccctccagaaagccggggtagggactctgaaaaatacctcctctaaacggaagcagggctctccagttccacttggcgccccctcccacaaggcccttcctccctgaggaccccacccccctaccccttccccagcagcctttggaccctcacctctctccggtgtccgtgggtcctcagcccagggtgagctgcagtcaggcgggatgggacgggcaggccagaggtcagccagctcctagcagagaagagccagccagaccccaaccctgtctcttgtccatgccctttgtgatttcagtcttggtagacttgtatttggagttttgtgcttcaaagtttttgtttttgtttgtttggtttttgttttgagggggtggggggggatacagagcagctgatcaatttgtatttatttattttaacattttactaaataaagccaaataaagcctctcagcctcatggtgttgggtttggggcaggggagggtgggcaggacacattccagtcccagcctctgccctccctgactggctgtctgggggtggggggcgggggggtgcttgcccttaagggcccaggccctcctgtgaccccagctggatgtagcacctcccttgtgcactgacgccctagccccagagtgcccttgctcccccaaaccaggaacacaaaaaagatgttttaaaactttaattatgaaaaagggataaacaattcaagatgggggaaccagccccaaactggctggggcagagagagaccagtccccagccatacaatagcagcaaggggaagaccccaccccacagatgctctgccccagcccttcccagagaccttaaataatttaaatagcagggatggcggagggcaggttgccctggtgtctgcccaatgctaagatgaggggcagcgccggcccagcctcagcctcgggcagggctctggggctgctgcagggctgggaggtatttgagggcagcagccccatggtggcgggacaagtcctggtggaattcgtccttgagggcctggaggcagtcacgataggtggggctggagcggaagcgggagatgtccaggcttggagcgtggggcagatggatggtgaaggcctcgggcagcaccaggagctcatattcctgcagggtggggcagaggagcagtggctgcctggcttgcctggcctgcggggaaggtgcagctccagagaacaggcttaccctgtagcccctgagagctaaagcaagggccaaagggcagattattttaattccacagaagggggacatttctaacagtgttgcctagtggtgtggtcccccatgcaggtgtcgtgagttccctggacctggaggtgctcgagtcaaaggtggaggcagcaaggtgccctcctcacctgggcatccagctccacaatgtgggccactttgttccagccgaagcccacaaagcgaggatcatagcggggacagtctcgtggcaccaccacgtagggttcatagttggccgcccattgcacacggtacggggcctgagcctcccgccagcgggcatagtctgtgggtgcgtggcctcggggccactcgtggtacctgtgcagcagggtcgggtgggagccaggctgaggctaggagctcgtgggtagtgggggccagtgtgggcaagtgagtggagtgggcagagaagtagcctctcctacctgaaggtgtagagagtgcccgcatccagcaaggccaacagctccaccttggaatgggggaagctgaagcggtagcgcagggtctcaaatgccggcaccaccagtgctgccttgcgccggctgcccagccccagctgctcaatggaggccctgaggaggagcacccatgagcaggggagaagagcggggcatctaggactgggccagtgacactcatcagggcattagccacaggactagaccaccatgggccatcttgcctgatgcgacgggtgggcacaaccacaggtggagctgctgttgaagccggccctggcctccctgttgacagcccagagaaacagcctaatacaaaccccaattgacagaggccactgaggcccagaaaggagcagggacatggaagcctggggtcccacacatgccccgtccacgtccaccccatatattgttcccctctctgcctgcaggcccacctgaggtagtcgtagagagaataggcaggcaggaagtcaatgtcactgaggaagacgtaaggcgtgagggcctgggccaaggccacgttgcgaagctggttgacggggtataggggcccctcacggtacaccacatggtaggccacgtcctgccgggcagcaagcactggtgaggcctcgacgaaatgcaggaactgctgagcttctgcgtctgtcaggtacaaggccaggctcatggggccaggccagtgcctgcacagggcttccaacatctgcagcctatggggagagggaggtcagcacagctctgcccctcttgcacaggagctcagggaggcctggcaaacctccccagttagctgctgctgccacctcctcaagtgacttactgagcacccttcaaatacttttagagccagtctgattgaatcttcacaactacccccaccaggtgggtactttctcatttgagagagaaaactaggggccagagatatgaagacttgctcatggtcccacagcgaccgaggggcagctccgggcatctgaatgactccagagcccaagctctttccaccatatccaatgtctccaacttctggaactccctgagggacaggtagctcactaccacagcatcaggctgccagatggaacctcctctcagaagtgtccaaccccagcccatgccataccccctgggctgccctctgcaccctcaccggtccatggacagctgggccacaagggtgacatcgtgaggccgggggggtggcggttcatggggcaggaaagtgacatgcacacggtgcacagtgagctgctgctgccggaactcaaagcaggggtcttcctcgtccagttgtgccagggcctgctgcaactgagggggcaaggggtgacaaggaccggggatagggcagaacaacacatcccccagacaaggctgggtcccaccaaagcagagaggggcaggggaaggtgactccttctcacctgctcagcaccaggtgggggctggctggggcacacaaagagctctctccgcagcaggttcccatcgtactccaggaaggtcaggtagaaattgcggaagaattccacatgcttgttcttcacccgaagcttctttggtgagttccagtggatcacctgggacccaggagggtgttggggggattctttcagaagcnnnnnnnnnnnnnnnnnnnnnnnnnnnnnnnnnnnnnnnnnnnnnnnnnnnnnnnnnnnnnnnnnnnnnnnnnnnnnnnnnnnnnnnnngccccccaccaccacacagcctcttgtcccactcaccttgaggtcagacgcctcagagtagcagcgctcggccagtgtgtgatctgacagctgcacattccagacacaaggcagacgctgcactagccccgggtgctccttgatcacagcgttgaagatgtcctgagcagagacacccatcacatcccagcccccagcctgccacaccccacccggcaaggcttcctcagacctggtcagccagtgaggtggcaggcaggctaaggagctcccgcctggctgtcagcctccacatctgctcccagccagcctgccggagccggtccagccgcagcaggatcacacctgccaatgaagagatgctgtcatgcccacctgggacgaccagctcctgggggacatgggggtcatgaaggtgtcctttgttttttgacattggtattttctgactgttcagacatgatcatggactacttgttttttgttgttgttgtttgttttgttttgttttgttttttagagacagggtcttgctttgtcacccaggctggagtggtgcagtggcacaatcatgactcactgcagcctcgacttcccaggctcaagcaaacctcccacctcagcaccccaccacaacccccaccgagtagctgggactgcaggcatgccaccacacctatcctttttatttatttacttattttttatttatttacttatttatgtatgagatagagtctcactctattgccaaggctggagtacagtggtgtgaactcggctcactgcaacctctgcttcctgggttcaagtgattctccctcctcagcctcccaagtagctgggattacaggtacgtgataccacccctggctaatttttgtatttttagtgtagaaggggttttaccatgttggccaggttggtctcgaactcctgacctcaagtaatctgcctgcctcagcctcccaaagtgctgggattacaggtgtgagccactgcgactggtcaattttttaatgtttgtagagacaagggtctcactatgttgccaaggctgttctcgaactcctgggctcaagcgattctcccaccttagcctcccaaagtgctggaattacaagcctgagccattgcacccagcttgctcgtagactacttttgtcaatagtcaatcctcgggggtgaagaggaggcgctgtccagcttacagagcacatccatggccttctcacacttggtgatcccagggctgttaaaattatcccccatttaatggatgagaaaactgaggctcagagggagcacgagagctggccaaagtcatccagcacacacaggactgttggaactgctgtctgtctcttcatccagggttcttttcacagcaatgttcttcctgggggacttcctagcattctttgccccacccagccccaggggcccaaggaccagcagaccaccccgcctgcctcccctcaccactgtccccacctgtgttaaatccccggcccaaggcaggccagggcctgtggttcttccagaggttgcccaggtaccagtcactctggttctccacaagaccgatcgcctgcgtgtctgggaggggagggcataagggagctgtctgaagctgccacaggacctgggctcagggctggatgcagggatcctgggcaggccaggcaggctcccaggcctctcaccagaaaagtgagcaaagagggcccagagctccgagatgtcagaggcgaaggtgacatccgtgtccaggacaatgacgcgggccagctcagcaggcaaggcactgggcagcaccagcttcattagcccatagaggccggagtagtgcttgttggggatccaggagacctggggctgtgtgggggaaaggcaggagatgagatggcagagaggggcctatgagcaccagaacacatgcttgcagtgacacagaggagagggggtaaacccccaaaagagaggggtttgcgcttcagtaggtggaggggggactgatgattctcttctccaaccccaccaggtcttggagagaggagagcggtggacacagctgaggggaggggggaagggctgggcccctgccttgagctggtcggcatgataaaagctgacacggacagcaggcaccatccatgtgtggaagagcgtctccaggatgtttctggccacggcgtcagtcaccaagtggaggtgcagtggatttttccttttgggtgggcaaagaggaagcctgagaggccccagcaggagcaacatgggacagcccccaccccgaggggcgcagagatggaagcgccatctgcaaagagcttttccacgcccggctcaggatgttcttttttttttttttttttttttttttttttttttttttgagacggagtctcgctctgtcgcccaggctggagtgcagtggcgggatctcggctcactgcaagctctgcctcccgggttcacgccattctcctgcctcagcctcccaagtagctgggactacaggcgcccgccactacgcccggctaattttttgtatttttagtagagacggggtttcaccgttttagccgggatggtctcgatctcctgacctcgtgatccgcccgcctcggcctcccaaagtgctgggattacaggcgtgagccaccgcgcccggcaggatgttcttacaactgcccttctaagggaggaaggggacactgtccccgcgtcacagatgaggaagctgaagctctgagaccagcagcctgtcccgggctttgtcccttccccactcctgaccctcctccacggacacctggctgtacctgtagaagagcatggacttcaccagggtgatgacgtctcggctggagttatgccccgcacacacgatggccacatgcaagagctggggagggacgcccaggtcggcagcaggccccccttctccgctaggcggtgaggacccatgttgagctgccccaccccgcagcagagcccggaacagtgtgcggagggggcagcaggagccaacccttcatttcaaatggggaaatgaggtcgggagcagaggagctgcacgttcgaggtgcgccccagccggctggccagtgctggacagacgccaggtactgtgattcccgcagatgtccaagaggccgggctcgggggcggcgcccccaggactcccgccgccagggccgcgcgcacctacctcgcacttgggcggcggcggcggctgcgggccgcagtcggagcggttgtggtccccggggccggcccccgggtctccgtcgagggcggcggctctccgcagcctcccgtctggggggacacgtggcatgagcgggccggggaagcatcccggggcccccgctcgcccgccaggctcgcggcgctcacaccccaggtccccaccgaacaggaggaatccgagcagcagcagcagcagcaacagcgcggcggcccccagcgcccgggggcgccctcggggcagcatggccgccgacgggggcgctcagggagggacgcgacccggggctgcaggctccatcgcaggccctgcggaccgaggggcgagatgggagactcagccctgggcggcggggcccgacggccgggttgtgcggctcgcgccgagccacctccctcacctgctccagcggctcccgggctgggccctgcgctcgcagccgccggccagggtgcgggaaccaggggagaggcgcgggccggtcccgcccccgacctgggctc

SEQ ID NO: 309 - DNA, 3441 bp, Homo sapiens
ggggctagagagctgaaggagagccagtttccccaaaattgctgcagtgagaagaggagtttgttactttaaacagaggctgaagaaactatagaattagcagagaaagtggagaaggtagaggatggagttgcagactctacaggaggctcttaaagtggaaattcaggttcaccagaaactggttgctcaaatgaagcaggatccacagaatgctgacttaaagaaacagcttcatgaactccaagccaaaatcacagctttgagtgagaaacagaaaagagtagttgaacagctacggaagaacctgatagtaaagcaagaacaaccggacaagttccaaatacagccattgccacaatctgaaaacaaactacaaacagcacagcagcaaccactacagcaactacaacaacagcagcagtaccaccaccaccacgcccagcagtcagctgcagcctctcccaacctgactgcttcacagaagactgtaactacagcttctatgattaccacaaagacactacctctcgtcttgaaagcagcaactgcgaccatgcctgcctctgtggtgggccagagacctaccattgctatggtgaccgccatcaacagtcagaaggctgtgctcagcactgatgtgcagaacacaccagtcaacctccagacgtctagtaaggtcactgggcctggggcagaggctgtccaaattgtggcaaaaaacacagtcactctgcaggttcaggcaacacctcctcagcccatcaaagtaccacagtttatcccccctcctagactcactccacgtccaaactttcttccacaggttcgacccaagcctgtggcccagaataacattcctattgccccagcaccacctcccatgctcgcagctcctcagcttatccagaggcccgtcatgctgaccaagttcacccccacaacccttcccacatcccagaattccatccaccccgtccgtgtcgtcaatgggcagactgcaaccatagccaaaacgttccccatggcccagctcaccagcattgtgatagctactccagggaccagactcgctggacctcaaactgtacagcttagcaagccaagtcttgaaaaacagacagttaaatctcacacagaaacagatgagaaacaaacagagagccgcaccatcaccccacctgctgcacccaaaccaaaacgggaggagaaccctcagaaacttgccttcatggtgtctctagggttggtaacacatgaccatctagaagaaatccaaagcaagaggcaagagcgaaaaagaagaacaacagcaaatccggtctacagtggagcagtctttgagccagagcgtaagaagagtgcagtgacatacctaaacagcacaatgcaccctgggacccggaagagagccaatgaggaacactggccaaagggtgatattcatgaggatttttgcagcgtttgcagaaaaagtggccagttactgatgtgcgacacatgttcccgtgtatatcatttggactgcttagacccccctctgaaaacaattcccaagggcatgtggatctgtcccagatgtcaggaccagatgctgaagaaggaagaagcaattccatggcctggaactttagcaattgttcattcctatattgcctacaaagcagcaaaagaagaagagaaacagaagttacttaaatggagttcagatttaaaacaagaacgagaacaactagagcaaaaggtgaaacagctcagcaattccataagtaaatgcatggaaatgaagaacaccatcctggcccggcagaaggagatgcacagctccctggagaaggtaaaacagctgattcgcctcatccacggcatcgacctctccaaacctgtagactctgaggccactgtgggggccatctccaatggcccggactgcaccccccctgccaatgccgccacctccacgccggccccttccccctcctcccagagctgcacagcgaactgtaaccagggggaagagactaaataacagagcccctctaggagaagccacgggatcccggcggcaaggagaacagaacactgaagactctagaaaagcaaagccggatttctggaaagtgcagaattcttttggttctttggttccagagagagagaagatgcttgtgccaggtggcaccagagtttgccaattgatccttcttattctgtgtgtacatgcaaagattggaccatgttacatgaaatagtgccagctggaggttctttgccagcaccatgccaagtgaaataatatatttactctctctattatacaccagtgtgtgcctgcagcagcctccacagccacgatgggtttgtttctgttttcttgggtggggagcagggacgggcggagggaggagagcaggtttcagatccttacttgccgagccgtttgtttaggtagagaagacaagtccaaagagtgtgtgggctttcctgtttctaaactttcgctactataaaaccaaaaaaaggaattgagatttcaccaaccccagtgcccagaagagggaaggggagtggctggagggagcagggggtgggacagtgtatcaaataagcagtatttaatcacctctggcgggggcctcgtgcaaggggagactgacaccaagaacagccagtaggttcttctcccctgcactctgctccctgcgcggtaaccccaccactcctgaagcctgcccagtctccttccttccctgcttggtgagtcgcgcatctccgtggttatcccgctgtctcctctccaagaacaagcagagcccgggccactggcccttgcccaaggcagggaagaaggatgtgtgtgtccaggaaggaaaaaaaggtggatcagtgattttacttgaaaacaagctccatcccttttctatatttataagaagagaagatcttgagtgaagcagcacgcgacccaggtgtgtgtgaattgaatggagacgtttcttttctctttctttaatttttgtttttgttctttttttctttaaggaaagttttattttactgttcattttactttcttggtaacaaaaactaaaataaggaatagaaaagctgtttttcaggctgacagtccaattaagggtagccaagaccttgcatggtagagtaggaatcatagtgtcagtgaggtcccgtgagtctttgtgagtccttgtgtcatcgttcgggcactgtttttttatgcaagggcaaaaatctttgtatctggggaaaaaaaacttttttttaaattaaaaaggaaaataaaagatattgaggtcttcctagtgttacttaaattaagatcaaggtaagaaacattgtaaaaaaaaattacaaaagtgctatttgtttcctaaaaacagtgatttctattaaaaaggtgtcagaactggagaaaatgcc

SEQ ID NO: 310 - protein, 633 aa, Homo sapiens
RMELQTLQEALKVEIQVHQKLVAQMKQDPQNADLKKQLHELQAKITALSEKQKRVVEQLRKNLIVKQEQPDKFQIQPLPQSENKLQTAQQQPLQQLQQQQQYHHHHAQQSAADNLTASQKTVTTASMITTKTLPLVLKAATATMPASVVGQRPTIAMVTAINSQKAVLSTDVQNTPVNLQTSSKVTGPGAEAVQIVAKNTVTLQVQATPPQPIKVPQFIPPPRLTPRPNFLPQVRPKPVAQNNIPIAPAPPPMLAAPQLIQRPVMLTKFTPTTLPTSQNSIHPVRVVNGQTATIAKTFPMAQLTSIVIATPGTRLAGPQTVQLSKPSLEKQTVKSHTETDEKQTESRTITPPAAPKPKREENPQKLAFMVSLGLVTHDHLEEIQSKRQERKRRTTANPVYSGAVFEPERKKSAVTYLNSTMHPGTRKRANEEHWPKGDIHEDFCSVCRKSGQLLMCDTCSRVYHLDCLDPPLKTIPKGMWICPRCQDQMLKKEEAIPWPGTLAIVHSYIAYKAAKEEEKQKLLKWSSDLKQEREQLEQKVKQLSNSISKCMEMKNTILARQKEMHSSLEKVKQLIRLIHGIDLSKPVDSEATVGAISNGPDCTPPANAATSTPAPSPSSQSCTANCNQGEETK

SEQ ID NO: 311 - DNA, 59637 bp, Mus musculus
  misc_feature (1)...(59637): n = A,T,C or G
tccagtctaagcagcctcatgagggagcaagtcactgtggtcctgcatgagaaatacaaaactataggagttcttgaaaataacaggaaaagaaacaagatgaccttgggtcttgggtggccaagttttcagatgtgacaccaaaatcgcaattcttatgaaagaaaagtaagctggttgcattaaaatcccaaactttgggggactagggagatgatttagtcaatgaaggaacccgcatgcactgctgctgggagtgcacagtggatccgtgagaatttccttgaaaatctaaatatatgcttagcagatggttctgtgattacactccttggtatttccccccagagaaattgaaaacttctgcccacggctgtttgtagacactttctccacaactgctcgaccatgagagtggcggagtgagtgagtaaacaaacgatggcacatccagccagatgagatgccatccatagctaagaagagttggcctagccatgcatgaaatacatggaggagactgaagtgagccagatgtggccttacacagcgataatcccagcgcttgagaggaagagggaaggagggttgaacgttcttgaccagcctggggttcttagttagagcctgtctcagaaaggaaagcgagggctgtgagatggctcggcagtgtaagcatccgccatgcaggcatgaggagcagcattcagatcctcagaattcacagacagggcaggtacgagtggcagccacctgtgagggcaaagataagggaaccccacaacctggtcagcaagacctgattcttcctccaagcagctgaggtgttgccacctctgggaagccttccttagcccccgcacctgggtgcctcagctcagagcttgtttcccttctccatgcaggactccatgcagcccgctgggcacagtgctgactcagcagatatacagtctccctccttcattaggctgcacgctcctgagggtaaatgacctgccttctcctttatgtctgttcctagaatacaacagtttctgacaggcaggtcatcactagtaattttgagtacaagaaatgaatgaatgtagaataaatgacccatcttgtgcaattgtgatgcataggccaagattatttatgaataagaattgtcatggtctgtacaaaataacagagtattgtgggttcaggccctttctctgatggtgttagtctcatgacctttgaagttattgaagccattcattacacatattcctacttacaacgcgctgtgtgctaggcctttcactgcgtgcttagctctttcagtcctcaaactcagccattgttaggtgaagatacagatgaacagactgggggtcagaaaggtgaagtgactccttcagagttacacagctagtaagtggccaggctgggctcggaaccctgatctctgtgactcacgccggtcagactcctttggaagtagaaggaaagctcacagcagcgggtatgtttcctaagcagggctccagtgtacagcatttctgactaacacattcatgttctatgaatagctgccttggccgcctgccccagaccttgtgataattggtgcttttcactccccaagaaatgaatgactcgtacttgatctaggtgcacagccccttgcatccttctctttctgtaccagctgacactgggaggccccgcccactcccctcttaggctcagcagcaccactccctacccaagcagctcaggatgacttcctataagaggatggaaaggcctgcctgcctgtagacagtgtagggctgtggccagggtccttgtccccagctgtaagcctggctgagtgctgtgaggattgctccagatcccagtgtactgtagcttgcacaggccacggagaaggactgtgactgataccccgtctccagcatagacacaggctgaggatggtgcatacaggttggatctccttctagagtagtgacatagagctgacccccctctgcgaacctgcaatggttgtgctaataatggttttgtctaaaacaccctgaacaatgggggaggaccctaaaatctacagtccaataagaactgtctttaatgttagatgacctcactcctgagaaagaaaccatctttgccctcaagagaaattttcacccagagtgagaaccagatcatttgatccatgtaaatttgccatcagtgcatacatcaagtgcacacatcaagtgcatacatcaagtgcacacatcaagtgcatacatcaagtgcatacatcaagtgcacacatcaagtgcacacatcaagtagtcctatttgaggaagctgagaaaaagtcttccacccagaattgcttggagacattagaaaggtgaaaaagaatcattgaaatctgtgttctcaaagaacatgaaaacataggtaggtttctcagccactgaaggatggcatcttcgtgaagataagggcatagcctgtactgtgaaataatagttccccagtgtccagaaagtgtcaaaaatatactaggacccagagaaatgactccaaggttaagaacagttgcagaggacctgggttcatttctcagcgcctatatcaggtggctcacaacagagtttaaccccagctccagggcattcaaggccatcttctggcctccagagatacccatactcacttgtacaagcccacacatacatataattaaaaatgataaaaaataatagcaactccaagtactcgggaggcaaaggcaggcagatttctgagttcaaggccagcctggtctacagagtgagttccaggacagccagagctacacagagaaaccctgtctcggaaaaaaaagaaaaaaaaaataggaacataaacatttgttttgaatataaattattacttaagaatgtcttttagcaagcctgatcacattttattgccataaaatcataaagaatcaactttgaatttttttgttgcaaatgatatacatagatgtcctgttctacaatttagacagatttcattttaattctttttatataaaaatcattaattagtataagaataatatatgatacactctttattcatgtattaatatattcctaatatatcccttgctggcctggaactcactatatagttctcaaactcacagagattctcctatgtgtgtctttttggttgcttatttttggttttgagacaataagttgcccacgttggcctggagctcatgcagcagaggctagcctaaaacccacaaccctgccactgcctccaaagcacagagatgacaggtgtgtgcactatacctgcttcctgagtgtgtgttttgaatgtgttgttcataaaagtagcccacaggaataagtgtgctttccctccatggggcaaggacagaacgtggtaaaagcaccatggttatgggatagtgttcttttttttaagaggtcattccaagccttgtgcttcttggcacacttgagttcttgctctgttacattaatcctttggagagaggccacctagaatctcttaaagtattcaaaataacacagagcctttttccaaggaaaaagctcaggaattcacagttggttttctgtcccaagctgctctggttgtgattcttgctggtttttcagagttcacctgtaggtgtaattttttgaattgatgcataggctgaaactgctttctcttaatcacttgcaaagaagccagcatcagtaaagagactgtatttgaattgagtttgtgcttcagacaacttgagccacatcccatggtctcctctggctggcttcctcatgagcagccattgtgttgtctgtaaccaaatgatgtctacccagatggaaggaagtgtcagaatgctccaggggactctcaaaatcactagcactgttttgtggggcagtctagtgttcctttcgccctttcctcctctgcagacccttgccctgtctgggcttcactgagagactgagggagagaagaatagccacgtcagcagtttctggcagaacaaggctttcagcccctagctaagtgagcctggcatttgactgttcttttcctcaggaggaagtgagacactcggacagttgtaactgtgcatttttatttcattgcttagttcccccacaaaacctgacaggaagaccgtcttccagtgatttagctagagtgaggtatccaccaggcggtgatggttatttccgcccttaaaagagaaagtgggaggagtgagatagtttggtgggtaaagatcttgcctacaagtctgaggacctacacagttccgagttccatccctgagacccccatggtggaagggagaacccacagttttctctgacctccatgtgcacacgtgtcaaggaaagatcagtcccactgccccccccatacacatatactcacacgaaataaataaatgcaataaacataaaattttgaagagaagcatgagctctgcctggtggcaggggcccataatctcagcttctttggaggctgaggcaggagaaatcacaagttcaaggccagcctaggaaagttaatgagacgcttatcccaaaaagtagagcaacttgcctatcatttaggtggttcagtctcccatactgagagggagggaaggtgggagagattgggagagatggggagagacagcgtggttgctgctcagtttgcattccactttgccatttgctaacaaggctttagccaagtggcccagcccatgtggacctgtgtcccacaggagaatgagacactgcagtcatagcttaccagtagatcttagtagggtgagccctactaagtttgtatgggcatggagtatagaagatatacaggcctgcttccatttggtattcactgctggtcagcatttggttcttctcagtttggacaccgtgctccatgtgtatgcacacacaaagactcttccctccctgtctcagaacgttgtccttgtttgaactcctggttgtcacagatctcagtgagatagattgacccaggcattagctgtgcgtttgataattcttgatgagtcatctgcattacatgaatgattgacagttttccaggcatatttcaagctactttctacttcgtcttcttattttgttcctcttccctttgcttcaggaggcacccatgccttcacctcccagctgaaactctcaggataaatagcattcagtaaggctttactttccactgccttgtgccccatttgaatctctttgaataatattcatgcttttgcgtcttagtgcttcatcccagaatgactaatatacaacaactgggtgttaaatttctatatataaaatttcatctcaagctaaacatagtggtataagcttataatcccagcacttgggacatagaggcaggagttcaaggtcatcctcagctacatagggagtttgcagccagcttagaatacatgagaccttgtctcaaaacacaaaacaacaacaacaaaaaccaaccacatcaactccttacccattccttccatggaaaaatccaaatcaaagagtagaaacagtttttccaggggagtagggttctacaggcctttaggataccatttgggggtggtataaattgtgctttcagaagcttatagagctccacctaagcccccagcgcctcatatgtcctcacaacagcaggggaaaaaaaaaaaggaactctgtgtgtctttatctttatttgaaggatgtggggtaggtggtgagggtccagagcaggggaagggtgcgtcagtcacagaccccaccggagtcatttgcaagtctagggagaatgctgtaatgggttattaggttggaagggaagctatgttgcagccttgctggctttgggatgaagtgtctgaaaaatctaaacggcattcaggcccacacagaaaagacatttttatatttgatattgtaaaagtggtaggttgagggatggttccacacagagagacacacacagactcatatttgcacacacatgcacacgcaagcacacacatgctcttatgactgtgagtgaagtgaccacagagaaatcagtagtcaccggttctgtttctttccactgctgaccatttggaataccacttaagtactagaacggtaaatggggggaggtctcgaggggcttcctcaagtgctagaggggacttgagatgccttcctattagccctgtatctcagagaagcagatgaaatcatcttcttttcctttgaactgaaattctggtttgtcaacatggtgtgctgcccttctgctcctgggatggcatgtacctgagagagactgcgcctctgcaagcagaaaccaggcttaattcctgggtggcacctccttgtgagaaggcaggttcccaggcttcagggtggagtttccctcctaactcaacaccaccctctctgggcactagtgaagaatcactgggaagaaaatggggtgtctccacccaaccggtgatctagagtcagccgagagaacagcactggaatgtagtagctcagagaagtaacactcctgtgtgctgggcttcccaactcctgacatgctggggacatgctgagggttttgccactttaccggcagaaaatcacttcttacccctatgtttctgagaaggaaagaaagatactgtctagttttacctggacaaaggcagttggatttcttcatacagacagcaaggaagtatgagagagttacagacagagaacagggaggccagcgtgaggagcagtggccgtgaccagtttttgaaatactgaggtggtaaaagcagtacggcctggtgactgatggcagaggagagaagggagaagaatgagtcagagctgggcagagagaggcctggaagcttgctggccgcctggccatctgcagagttcaagccaaagagagaacctgacgcagaccaaaggtgtggaagacactgagaactgatgtctaaggttgttctttggcctccacacacatgctgtatacacacacacacacacacacagagagagagagagagagagagagagacagagagacagagagacagagacagtgacagaaatagagacagaatcagagtacatcatatcttgttcttacctcgagtttctttcctagaaacgttagagccacacagacccctctccttccagataccctaaatggccaagatggccaagatgaaaatatcatttcatttcagcagctcagagtctcttcggtgatgagtttcacaccgagaccccattttcagtttctgatgatctctgtaagaagggtgagcatagcgttccatgaagtccaagggactaagtgaaataatgtgtgtgagctgctgtcacagtgcccgacacacacaaaatcaataaatcaggaactagagagccggctccatgagtgagagagagcgcttgctgtgcatcatgaggatctatgcttgaaacctcagaatccatactaaaccggatgtggctgcaaatgtgcctgtaacccaagaggtcactgggactctctgtgtaggttaggtaagagaccctgtctcaagagaataagtttgaacgtgatagcacaggacacaggatggctcctctgacctccaagtatgaaagagcactcaaacctatgtgtacatgtgtacatgtaccatacatacatatgccctatacacacattctacatacacattttaaagtgggatagagagatggctcagcagttgggggcattgactgtccttcaagaggacgcggtttcaattctcagtacccacatggcagctcacaactgtctgtaactccaagatatgataccctcacacagacacacacagacatacatataggcaaaacaccagtgcacataaaaataaaaataaatgatgaaaaaaattttaagtcagctttaatcctgactgcattattttctttgttagaagaagaaagagagtgaagagagagaacaatttctaaaaagcaaaacgtattcatgccaaagctgtgattctatctgattattaatatcaggctcataattacttttgccacaatattaagtgagagctcctttgaatggcagacaactgacaaactaggaagctattaacagagttgcctgctcctgttaccagatctagtgacataatagttctcactgggaatcctttgacaagtcagctgaatttcctgtgcccttgccttaagcactgcaaatgtgatccacatgtcccagtgttgtttctatcaatgaaaaaggagaaaggaggagatgctggtctgcacttgggctgccgcaggaaccccacccccacccggctattaggactggggctcttcttctgtttaactcattttaatgtttaaagcattaaacacttcatcctgatgtgttggttactcagctgttaggatgtgtgctgcagggaacccagcaaggtttagagaatggcccagttctttctcctcccatggaaataaacatttgaggaagtgctttggtttaggtcttgtggagccaatactggctgtgatgtggatgggggaggcttagtggggctagccttagctactctagcaccaaggaggatggctagacagaactatcactgtacctgcagggtgatctagacagacacaaccaggaagggccccaggttaggggaggactgcccccatgcctttgcccctcaggagggaaatgtcacagactcagaggggagcatgcataagtgaaagggccttgagttatccagctgtgtgctcaacacacacatgagccacagaacaggagcagcgtgagttttggtggtgtattcactgactagactcctagagggtcaaggctacacattctaggactgtcgcaactgaacctgactcctactcctgctgtgtgcctgagaaagcgatttacgttcctccgccattgtctccacttaacagaaagcccaagtcacccacccaagttcatgtagctgatcacatgtcagcacagtgtttataaatgccagaggactgtcctagaatcccttgctgctgcgtgtccttgtcacatccctgcatgccagagaggagactcttagtcttgccacattctacaaaccctcccagtttctcaagaaattttatatttttccctgaaaatgactggcaggattttgctatttttgtaagcaacacataagcaaaggctaggcagaggcttgaacagtccatcagagaagtagcaactccccagaatttgggaattcctgctggaggctgactgcagtgagcgttcccctgccacgggttctgatttcctggtgtatgctggaagactgcacagtgagctggagagatttccaagctggcattccctgggatggattctgaagctcccttctctgctgctgaagtgctaatgagaaacactaattgcacttggccaggggctgggacagtcccactcatgaagtagagagggcagtatccctttccagtaatgtctcctggccttctgagcttagagaagaaatggactaagtgggaagggggaagatgctgcaggcagctggcctttggaggagcaggattgtgatcatccaaactgaggaagcataagtgctatagagaaaacgccatgtctccacgtcaccccagaaccctgaaagcagcactctggcccaattaagcatgctaaggggccccggagcctataggccagttccttggcaaatccgatttctgtctacatattggtaaaatcccaggagaactggtccacttctctctctttatgacctctgaggcactaggcagagcaaagacccacattcccaaggctcagtcgggcttgtcctgtgacttagtcaggacagggagccctgagccctgagcacagtagctgtgatatggcgtgcagagtttcttctcccagtgtgactcctccatcttgttccctcacaggtgtcctctctctccctgcctacttcagtccctacaatggtgggtccctgggccacgatgagcgagcagatgcctatgctcagctggaacttcggacactggagcagtcactcctggccacgtgtgtgggcagcatctccgagctcagtaagtatggtgcttgggggagaaagtgagacagaatgctctgactgggtcctggcacttagacaggccttcccaagcctgctgtgtacctgaactcccatctctttcctcgagttcttgcctgtggcttcagttctagtcaaaacactagccaccacttgaagctcacatatctactcataaataatttagttttccattccaactagaaaatattagagtcataggacagagtcttgcttccttttgcctgcagctttcccagtgcatagaacgtcccccaacaccaataccagctcctggtgctcagtatgtgtgtgagaacataagtgtaaacccatgtgtacattagaaggggtgagttctatcccacccagtttggctcctgaaactctcctgagttaggtctctattttggcctggtgctagaccaggctatgtcatacaccacattgcctggttcctccctctgaaaccaaaggttttgctaacctactctgcaggggaggggacagaggtggaggcagatattttaatttttgttccagagactaaagactttaatgagcctagtgatacttggcactgagcaccgtggacctagaattcaccctaggcttcccgtgcattaaactctctctgcctagccagggccagcctgcctggtaggttaggaagctgcattcttctaacaggtctagctgcatggggagctctggtctttgggcttgctctgtccttccatacccatgaaaagttaaagagaaagaaccaacagaaaacaaacttctctcggagggtggccagatgttggaaggcttattttgaagacagtgctatgttccagactctcgcccgctgtttttatttgatggctcataatgagggctggaataacccgcgtgaaagctgtagcacctctaatcaagtcttttgtggctagtaaggggtgagggcttgctttcccatgcctggtaggtggctctgggcatctgtccaaggtttccttgagctctggatcagtcgattctcgagtaagatacagggatgtcccaaaagcatcaagcatccacctgtgtaacagcccagcccagccagctcacggcttcatgaacaagctgtgccaagggaccgtggagtccctgagctcaattacagattaaaacattgcaaaatagattcaaaatgggtatctagaaaaatgagataagatatgtaaaatgaaagccaaatctttaaaacttattcttaaacaccgtcaaatggctgtggatgtcattttttgtgttttttgtttgtttgtttgcttgtttgtttgttttcttcttcttctgagacaaggtctcaggtatcccaggctggctccagactctttagcatagatgaaaattaccttgaccttctgatcctgctacccctccctatctcctctaagagctgaggttatggacatgcaccatcatgccccaggtttattccatggtgaagatcaaaccctgggtttcatgcatgctaggcagcactctaccaaatgagctacatccccagcccctatgggaatctccttaaaaagtcactcttcgtgtttagaattaaactgtgaactactaacaggttcgtggctggtaccagcgtgtggcctgtctcagttcacagagcatgggaggggaggggaggccccaggtccagtcctaactaactttcatgctagtttgcagctgtgacccattttaaactcctggtagcgtatttcctctttttctataatggaaataagtacctacttccaaggtgagtctaaagattaggtgaaatttttacctgtggggtttgtttgttgttttcgttactgttgggttttttttttttctgtctatcataaagcttaaaaaaatagaaaatggcaggggttaaaattttacctaggagagtccaaggcaagctgtggttttggccatagatgggttgtggagatgactcggcttttacacaagtcctgtccgagttgtctccaggcatctgtcccttggtcttggagaaaagctgcccttagtaagggtcagattgaggaagccaggcctctcctctgccaccttcgtgggttttctgaacctctgagcccctgtgtcctgtttgccgttagaggaagctccaggagcagctacttctctggctgcctggagtctcttgcctacattctggctggaagtgagctgctgaagggagccccaccaataaccatgaaaggataacaatcacccgcgctgatggctttcaccctgtccagctcttggaacagtatctcagcacagcatctcttcgatgctatctcagacactttgatttctctttcttgtagtcctgtgtttcgccaactgttatgacatttagaccagagaaaagggagccaggtttcggctttctgccaccaactcagctggtactggctgctggaaaaagcacagcctcctgctgcttttgatgccagtttctgccacccaggagccctagggcagggctgggatctggcattgcagcaccagattcctcttgtcttggaaactgtggggcagtgtgtggctgtaggtagtggtcctgaggacttcaggaggctcaggaaggatggagggatgttgataacaggatgtcaatgatgctggtgttatcctcagctttaataaataagggttggttccaaagcggttaagtgtgtctcaattattattcctttgactcctctaaattgattatgtgctagcatctccatttcacagacaaggaaactgaggctctgaccattatttaaggtacacagactagaagtagctgaccttcgatctgaagccacaggtattggagtctggagtatcagctctgatcaggtttctcagtgatggtttttaaggctgagtattcaaggcaccaaatgattttacatattaaaggtgtcagatcctgccccagactaatgaaatcaaaagtctgtggacatgggtcagtatcgggaccccactctcaccaacacttttggccctggaattggcaagagtccccaggcaactaactgtgatttggggaatgagaatcagcagggaagagacagtgtgcaccttggttggggatagtacctgaaggactctttctgggtggggtgttccagttgtggtcattcgtccctgcttgtagctagttgctatctgtgactgtactgggagaatttggcagtcaataggcttaagtcagtccttagctgttgtagtatatgaaaatgaaatgcgtgcacagtaccacttcctctactcatcaggcatttctgagcagcttgtgtgagggagactctgcaggactctggaacacaagaaataccgaatcagacacccattaactgagaggtggaagctgactggttaaagtaatgaattgtctcgctgattgagttacgtcatatgcacagttagaccctgatgcttgctgctattctgtagagttagctgggtccctaaggcttcctgtgggtagggccatctgtgagagacttctgtgagttcggggcggctagcccacagcagagacgccctgagctctcaggcttggagaacacaaaggcagcgcttgttctagaacagaggcgcctgcaggtgcgtggggcggttttagaccatcctttctcagcattgtggcctcacacaatgatggcacatttcctgtcaggggctgctaggatgttgaaaagactaagacagaaacacaacacaggatatggggccctgtgaccccacagattccagtaaggcagggtagagcccttatcacagtgaagttcatgggctttggagtcacctagccgacagcccacatacttcactgcagcttctttgtgaccagaacgcatggagtcaggatatgttcagcaaataagtctcagtgcctctgacttgacccttagcgctgtaaggactgagttgagtttataatgaattgttgagtgtccaatggatggtggcagccattatcttccaaagtcccagggtttgcacacgagagcataagggagactctccacagggcccgtgctttggctggttcccatggtcagagaactgagggaaggcccctagggcggtggagagagtggagatgttgaaaaggaaaccacattagcataagttgtggaggaagacagccctgccaagtgtttgtaattcagctgttaaggcaagactggaaatgaaagggaaaccaaattgctattgtgcatctaggtgacagtctcctcctcagcctgttgactctggggtaaacagtaattacactaagtgagggagctgctaccctaggagaatgtgggctgggagctcagacttgtccttttcccccttcccaggtgatctggtctctcgagccatgcaccacatgcagggccgccaccccctgtgcccaggcaccagccctgctcgccaggcccgccagccaccacagcccatcacgtggtcccccgatgctctccacacactctactacttcctgaggtgtccacagatggagtccatggagaaccccaacctggatcccccaagaatgactctgaataatgaacggtaggtatcatttttgcctggtcaccaagtaggaaatgctcacaacacacatgtatcttctaacagtgcaagcagcctcctggagctggctggctggtcttaaaggtggcctgggtgctcagacagatgaaggctcatgtgcaatatgatatttcaagtcccatgtgtaatatatttctttatcagggcagatgtgttatggggtcaccaaggctgggaagtgggctttagtctcagcctggagttggtcagcttagcaccagctagatcagctctttgaaagttcagtttcctctacaaaatgagacatccttgcagctctggaaaggtggcagtgtggttgagtgagcacacactttgagaaaaagccataaggacagtggtaattggccctctatctgtggtagctgtcaccacagctctctttggatgtcatctttggatgacagtgacactattataagagggatcttgggcatgtttggtcccatcagcttgtttcttaggtgagaacactggggccaaggcaggtttttgttgtcttcagggctccagccctttgaagctgaacatatgtgcatgttgtgggcgtcccaagggtgatcctatgaggagcttgagaagggggtgcctgagtggcaggtcaacctgaggacaggactgcagctctaggtctcagaggtctaaaggctttgaaagcaccaggcatccatgtaggcaaaatattcacacacttaaaataacaaaacagccttaaaaatttaataaatattttaaaaacatacactccatataatctgggcatggtagtatatgtctttaatctcagcactcaggagacaaaggcaggcagatctctgagttcaaggccagcttgttctacatagcgagttctaagatagccatggagagaaacctgccccccaccaaccaccaaatacgtgtgtatttgagatatatgtgtgtgtgtagatatgcatgtgtctctgtatgtgtgtgtatacatattggtgctgcatgtacttaccctgtgagcttgaagttgtgttcttctacatgggaaaacccctcactacagggcttcacctgacagaagggtggcctgaggccttccccagctgactgttgtcttcaggcacatcagcctgctcctcagcgaaacccccttctcctgggcctctacagtctcctagtctacccactgaggttcagttccatgccctggttggttacagacagcttccaggcagcattggtactcctgagaacatacagcaatgtttggagcagagcatggagtgctgtgaacagatggcttgggtacaaataataacactgacattcgtgaaccttgagacctttgtgcaaggttctaaacctcacggtgcttcatttccttagctgtaaatatagagtggtgaagaagcctgtgtaagggttccaggaaggccgccagtgctcagtgagtatttactatgtatcagacacaatgctgagcacactatgggtgtgtgcctatctttcacattctaccaggaaggaggtgttcattttatacatgagtacatagaggcacagaaagactcagtaactagccaagaccacagaggctgtgctcataaccactgcaccatatagcctgtaactggaagaaacataaaacaacagtggcctggcacacacacaggagtaatgccagcagtaaatgctatcatcattgttgctattactgttatcactatgatgtcagcatcattttatctctctggatggctgaggaggcccatctgggcctgacccaaacaaggctgcagctggaacccaagacattctgaaagtcaagcccatacagtgggaggcgtggccagatcgcaggccctgctccccagctgtttctgctttgtggagaaagtgttgcggttgcaaaagttggctgggaagggctaggcagactgcgttagagagaggagagaggagacctgtttgctgtttagtgaggttccgagaggtgtgaggcccagcccaaccccccagcaaagccagcttggataaactgaacaaggagcagagcctgttgccccgggctggggctactaggtcctcaggccgtgacccccaccccaacccaagcatttatggctttgccccatgatcttaacaggcagcatcaggctcctctgtggcaggagtccattatctgcatgtggtggtagccactgagtttgaatagtaacagacacatgtgtatgcgtttagaaaccaattatctagaaaccacactctgcagcatgagtctactggtcacaaaggtatttttccatgaatcatttcaaacaagtattagattggtaggaaattggaaccaccactgtgggagcaatgaaatccaaaattttcaaatcttaatacagacaagcagatgcttctgcgatcccaggtacacagtgcttcatgaactggtccccctctgctgatgtaggccctgctgtgcctcagaccttcttggacaggacagaccctagaggctgtggagacagtgctgggctgggcctcagagccccttgagtctctgctaccccaacacccttaccaaatagctgagaaaatttgcctccttgcagtaactggagtttgccaggatcctagggctttgtttttgtgagctcacaatactcccctgactctacctgcttcctcccctgaggcccttcctcgctcatctcagaaatgtgcaacccaaactgctcagagactgtgattccaggtgtggcagtgaaggtgtggcctgaagtcctttcttggggactgatgtctgggtctctttgggactcttaagtgatcttcattcaccacctattccaaggggactcattttggcggcgtggctattcaagtcttctctatttgtgttataagaaatatactatgatttcgtctagggagggaccttgagtgaccatagctctgcagataaagagcagcaacatgctagcatcccgtttgtgtggagcacattgtggacattccctactaaacctatactgttcagtggggcctcagtatctctctgcaaggcaaccttcccctagacctgtgagctctgtgcttgggaagggagttaaaaaaagaaaaaacagtaggaaattagagtcacatgcagggcagggcttgtgaaaacgagtgggaaagcattctactgacctgaatcaggcagcatccaggaatagtgtacacactctgtggcagagtcctgagttcatccacatatctctcttgacagggaaaataactctacactagagtgtgtgtgtgtagagagagagagagaaagagagagagagagagagagagagagagatgtgagatgtattattatggcccttttaaagagcattctatccatttctgtttcttatgatcatatttttcagaagggcggtgtatcaggcctgggcctaactggtgaatgactagaagagactagaactatactcctgagccctgggcccttggctttttacagtgtttcagatctctcttctccctgaccccaaagctctcagacatcatgagtgtgtcccagctttcaggtctaccccttcagggcccctatagccttacctgcctcatctctaccaggaccccacttgttagccttgagagctctgccctcccaggatgccttgctccctggcagctcagtgtcacagcaccagccagacacacaaggcagggcctagaacacaggattagtcacagctgctgccctgtggggtgtgtcaccaagagattaagcttagaaagtgaaagaagctcctgtcagggatccaggagtctgtggatccctcccctgaggcctggaagaggatgggcaaccatctggccatgtggtccttgatggtggtaatgcctggaggcagagggttggccagctggggtggtagcctagactataaccatcctgaggaatgaggagaaggaggactgtatagacatgcatgggaggcaagagacctgttctcttgccagcaaattgctggaagatgtcatcagtcattaagaatggaaggagacacagagttaaatgttcagggtcagattggggtaaggtgaccagacctgtgcatcagagcccaggaccctgaagaagtaaggccagggagaaagagtggcagttacaatggctaccaggctatttgctcaaaacgtgggccctagctgcagttcctgacctccctccctcagctctacatagtgcctctttgtagagggagacctcttccagaggcttttgccagtatctcagaccctaaaccaagagtgtctgtactgggatggaaccttgcaagacctgctgtcattgagtcttcattcagttagtgtagtcttatctaaagaataaagttgtgctcaaagatacactttttgaactcagccttgctgcatttcagaaccttcagccatcagtgtgagaggaagcttgaattttgtggcagtgtgttaggttggctctctggatcaaagcctgcctagcttcaaatccccaaaccagatggcctcatgcctgtcacttcagctttatgtctcaattctgcttagcataggaacaatagtagcaacttcaggatgctctaagattaatatataaatatatataacagtgtctggcatgtggtatatgtgaagtcttcattaccacattaaggataatctctgagaagactagaattgttgaaagaccctggcagatcagaccaaggactttaaatagccctcacaacacaaccagagaaaattatgacttaagcatggcttaaacaacaaaaacacagggcttctggtattcccagatgcaaatatcatggcaaatgaattcacactttaaaggaacaaaactttggtaggacacctccacctaacccccagtcattaccagttcctatttagcaaatgtttcaatgtcaggctgtgggttagtagtttgccattggtgagcatatcctcggagatgtgttctaagagtccagttcagcgtttcttcctctgattcccagagactgttccttcttggtaatatgaaattccaggcctgcttctttagatggctccccaagttctggggacatgacccttacttacacagatgagccccacagtgaggacaggcatctattttcctttgttctgttccagatgcagaagggtgatgttcagaggcacccaccggttggtgttcgttgagtctaagtggctcgttaatcttttgctcagcttgcgaaagtgttttcttatcacataatagagatgatggtgatgggagcttcatgctactgacttgtgattcccttaaataccacttcaagaagatttgcaatgttaagctcttttctccctgcctcttccccgctttttgtgcattaaatctccatctgtttacccaaaatggaagtaaatgaaataatagctattgagtggtttaagtattgcttccatgttcccccactttgcattgccagtaacctccacaaggactggtatgtagttttcagatcacactgagggccgtctctcccatccaacacattccctgtcatctctccctcttttttctttttgaaatgatcttgtttaagtgtaaatctacttgtttggccatttctcaccccttgaaaatgtaaacatcatgagtcttctttgtttctgacatagaacagttcctgaaacacaaattattaaatattgtcttcagctagcaaaatagccaatggcatctaatggttggggtctgtgaagttagggcaaaggggttcctgttttatcatttaccagatatgtgactgcaagcatttaatttcccaaacctcttacttgaagtggaaatgacttgacctatttccaactgagttcatggagatcaaataaggtaatacacaatataagctccccatatgtggtaattgctaatgaactgtgcagatgttattatcataaacttatggaaggactaaaatagtcatgtttagttcacagataatcccaaaacattggtaagcttaaaaatcatatctactcaaagtgcgtattttccccctttgctagtatacttccctcttcagtgtctgtctttactttcttgtaactcagcaggaggtaaggaacctggtgaggagcaaagaggatggaggtagaccagatgtcccaagttgagaactaaggtgaagtgagaattgtttgaaactgaagtgtttatagatgtattagagtttaaactactatccgaggattcagagtattctacagccttgattttctctggccaagcaaactatcagtcattttccaacattcatttgtattgtgttcctggcctcctgctcattaaggttcagctaccatggtacctgtgtgtgacctgctgccaatgcatacctaggagcaatatgatctgacttgattatctttgttgtttcggtaagaagcaagaattcagcctagtagaatatattactctatcttacccacactccagaggggaggggagtcagtagtcacttctgatggcacttcaggatggcagtccaggatgcatcattcttagagaacattaagggattttgtgtagaccctcaacattaagatcaagcctgacagtctctgaagcactttacccagctccgtaacagttccttgcccatagctcttggaggaaacttttcttgttcccatttacggcagactgtaggtctgagcaggacctgggggcctgaggaggacccagacatgccaaggtctcagctagaaagaaagaggcaaagtagagttcaggccgggaattctgattataacaaaccagggacttcttactgtgcactctctcttgccttccccagactgagagggcaagtctcggacctctccatcagctccctcccctccactgtgacatgggtggctggctctcaactgcttcccatcagacttggtttgctagctctgggtggccagcctgaatgtgggcatctgccaacatccgagaaggagcgagccagggatttggagcagacaaagaaagtggcagtgccagataatagagtacggagacagaacaggatcctggccaggcctctgacaagtgcccctgcgggctgcccgttgcctgggacttcctgtcccattgttacaaccgccagtcttcacacacacaaaaaaagaagactgggaactgcccagcccaggcttcattcatttggagttacatgacagcaacaatcccttttgtctgtagtgtggctgtgtttctgagagtgcctggtatagggaaggcctccctctcaagggatcctgcatttttgaggtgcttccgaggcccttctggagatgattcagaccctgacagtgcgagcagctaggagctttagcagatcaagagccagaccaggctcgttttctggcctgccctcacctgccttccaggcatctccttagatttattccttcccacacaacccagacaagcagcctctcagctggctgtggcttgtcctgccccctccctttcccatgtttagtatatgcagttttggaatggggtttttaatattttgagtgcactctttgagacgctggtgtccagctttcagttcagagtctgtcgaggatgtgagtaaaggtggagtctgggcagcatgggtacatggcccacggaggtgtcccattacacctcctatttctctattggccagcagattcaatgtgccctatatggcagctggacatcatggaagatcccagtacatttgtcatgttttctaagggccagtctagttatggtttgactactatatgacctgagtgatgtgccttggctttcacactggtaagacatgaactcatgacaaacctctctggcaagcagctgaagggtcaaaggtgatatgcaaatggcctcaggcttgcttggcataagttggtgcccagatcctagcaatatagtatgcaagtcagaagtctgtgccagagtattcacagggctgcagttgggctataggtgtagaaagcagagttagatccagcacgggagcctgccttttcttcctcatttctgactgctgcctcccatccacatccccacccccatccacagggtcactatttacctatcaggaattcctctctacatgagatcatctctgtctaccctaagttcaacataggttgtttcccagacatttttagaagctccatatgtgacactttcgagtgtgtcacctttcttccctagaccgcaggtgagtggggaagcagatagagtatgatttcactcagctacatttgaatagaaataccatttccagggcctagctcaaaaactccaccatgttccccatcccagcaggtagatgtctgtgggataaatatcaagttgtcttgggaacaactgagccctgggatcctgataaggctaccttcctggcagagtccaatgagctgtggcaagtgcccacaagagaaaagagtatttgcataggttggaagtcctggcctgtctggcttttagatggtgagagaatgtatggtccgtagtcagctgtgtcagcgagtatggaaagagaaagtgggtctctggcacatggcagcactgggccctgtggatgatgtgtgacctatcgtccaagaaagccacaccggtggcccaggagttgagaaaggtttgctgtcacactcctgccaccccatgtgtgtgggtagcagtgataccctggcctgctggatcagtccagcaacaatgccgagacatgctagcctgagaatggatctgatagcctcaactatgaaggcttaaggcccttcctgctacgtggaaaagggtgtggtggcgacctgcatgtagtctccattggcacctagacctcctcacccacataagatacctccaggagtcgaggccggttgtgatctttccatcatgactcaaggctgcatgttagcacaaccacatcaccacatctgcctctccctttcctgccttatcctagttttccagctactttcctagagctaccttagccccagtctgcctggttctaggaagtcctcatgagacattgccagctttttatctaggaattaactgtttttatctaaaaagaatattcaagttacctgaagccttcaggaacaaaagactaggaagtctctctttgccttcagagtgcagctcaggagtaaatggacccctgagaacatgacccaagggctgagtaagaaatatgccctttgttataaactcagtagatggctcctaatggactttctttgctgaaagatggcaggagatgacagtgagccttagaaaaattgtactcaagggaaaagcccacaaaatcccacacaaataaaagaatacaaacctggtaagtcctgtatgtcatagggcatgttgctgaaggggagcatggaggtatgccaagctggtgggtgggaggaaatgcccttgcaaaacaggtagtgtggatcaggcagagggactgctgtggacaaagattctttagtcaagtgccctaacactgtgaggatgaagtgcctctttatacctggccatccccgtgttggcaacagcactttccttctctctcaaaagtggtccagagtgggagacatattacagatgcccctcttattgtgagatgggtcacatcttggtagaatcattatttttaaatatctcaggtaaaaacattcactgatctggacactatttcatttttttgttttgttttgtgttcttgagattcagtctggtcttgctgcatagctcagtctagtgtaaaattcattctgtaggctagatgcccatcaagtcatgattctcttacccctgtctcccaagtgctagaattacagatgtgtgcttccatgcctagacgaccaaagactgatcataaatatagattctatgtaataaatggttgttgaatacttaaataaaagtaaaaagcatgatggctgcatgagtgcatgcttgccatatcccaaagtttaaaataccattaggtaaagtcagccagacatggtgacacacaacgttgaaggcctgtgtagtctgcatagtaagttccgggttagcctagactacatggtgagaccttatcaaagaggagaaggcaggcagcaaggtggttcagctggtggaggctttgtatccaagcctgatgacctcagttagatccctgggatccacatgatagaaagaactgactttctatcatactgtaatcacacacacacacacacacacacacacacatacacacatatacacatacaaacacacacatacacatacaaacacacacacaggaatcatttgtaaaattaaaacaaaataaaaacagagctaaaggacaaactgagtggtcatgaaatgcattctgagaagggccttggagggtgtgcccttcctggttcacagcccatctctgctgctgcttcgtgaatagcactgggtgctctgcttgtccttgtgtagagtacacactttaaagagtacctgctttacaaagtgatgattaattagtaggacgtaagggacttaaaattacctgttctataaacattattcattagtgactgtcttttcagcctcatgtcccaattgtcatacagttgactgcacattccattgctgacagattccttggagacctctagagccaccaccagcaagaggccggagaaggatcatatctcgttgtgactaggccatgtttgaaattgaaattcatatatcatattaaatttagtctggtaaggcaatccaccccaatcctggtgcactgatacaaggactcacttgaactccaacattcaaggccagcctggacaacaaaatagcaaagtggagggaagccagccatggcatatacacctgtaatcccaggactagagagtcagagtcagaaggatcaagtatgaagcagcctgttcacctgacctacaaagtgagctctgggccagttagggctacataaaaagacttcatctcaaaaacaagcaaacaaacaaacagtaccctaaaagcctgggatgtaactctgtggtagcacttgcttagcatgcacaaggacctgagttcaaacccaagcactcccaaaacaacaaaaacctagaaatcatcacatgtgtagcatatctgacaagcggtttctagttcctctaatctgtaccagatgagttttaataagaaaccgtattggccccacccccagaaagccaaagccccaccttcaacagaagtacctgattccaaacagggattctgttaagatcagcccagttgttctgaggcagtgaggctcagccagggggacacaggcctgggggtccagggagagaaacgtgcttagctgctactccaagctaagccaaaccatcctggtttaccaagcaattctaggaaaataattagtccaagatgtgaggcaaactagaatcccttcctttgtgctgggttggaatctgacttcagtaagacaatattggctttattctacatgggcgtttggcttggtttggggccacagcagctctggaagtcttagggaaaccatgaagaaggcctcaggctggcatttcagagccgactccaactcttccagagaagtttctgtctgtggaatcttcacttggtggaaaaatctggcaatcttcacaacatttctctcctgccccatgcctgcctatggtgggatggaaggcaagagtgtgcagcatgctccacagtgaggtctgtggaaagaggaactcatccaagcagccctgtagctctactgtgcctcctgctgaaggtggagcaaaactggagaaactgagatctgaggccaaaaaacccacagtagcagcctgcaagctccttggctcctcctttcttaagcttcaaatgctctcaggctgagtgaggtattacttaaagatgatggagaaatatccatgggagtaaatcttaaactgatgtccagtccctaccctcccagcctatgagttgccatgaccctatacccaggcaagcaaaaccctggcccagccttcccacagtgaagctgatgcccgctctcatagtcttggtcagtaggcatctcctgttcctctccccggttcttcctgtaagagattcaaagaggtacagacctcagcacgccaggttggggacagagacataagactttcttctgcccagggtttggactacatagcctataggtacaggtcagtgcccatctatcaacctgactcttgttccaaggcccctttccacctcaagaaagaacagagcctgctttgagctagaaattagaggtgtttcctgttccatgttaagacactgcttacgggactgttgtcctaataaatcatacatgtgcaggggcaggccttttccaggctgcaggaaccttgcaaaagcaagacattaaaaagctttgtgtgtgtgtgtgtgtgtgtgtgtgagagagagagagagagagacagacagacagacagacagacagacagacagacagacagacagagagacacaggcagagactgattaggcacaaatagcaccagtgtgttttaggagcttctggtcccttaaagttgtaccctaccaccacatgttagtgacccacaaccttctatgactatgtttcttgtagtcacctcctgtgtaagtttctttattgccaaggcaagagtttgtgcctccagaaactttgtagctcactctcaacatagtggttgcatttgttttctctttttatgagctgggcttgagtggatagtgggcagcctgcctgcaggcttacgtgtttatgcttgctggcagggagaaggcagggagtcagctgacctgtaagaaggctggagctgaggcagccagattcctatggcctatttcttctattatgtgttttccctatcaacagatactaaagcagtaagaatacttaacgtttatggagaacataccacgtccccaatgttcttctgctaaacactttgtgtatatacttatagctgtcttgggaggcactcctataatttagacccattttattcatatggaaattgtgactagaagaagtgaagctactggtacagtcacagggttttgaccagtgagaaaatacctgatcccagccagccagtcagtcttcctccagaactataccctctgtctctggtccataggtacggttactgcagtgaaggctctacatgtaaagaagagttctgaccatggaagaaaatgtatgaacactaacctaacctctcatttaatagaaagctgggtccatagaggtcagtggcctgcctgaggtttccataagtggttcagtggtactgaagccactagaactttcttccagggaggatgctgcccatgaggatcccaggtcctcaggatcctgatcgatgggtggatgtgaaagccctatgccatgtcagggttcacagagactgtgtgctatcaagacagagttccagccccgggcagtgtcatccttacatactatgctagctgtcttttctgttgctatgatgacacaccctgaccaaaggaaaggtttatttcatcttgcaagttatagtttgtcattgagggaagccaggacaggaactcacacaaaacccatggaggagcatggcttaccgcctcatactcagatggctttctcggtagggtgtcgagacatatctgcctagggatggtgttatccacggtgactaggtccccctcatcaatctttgatcaagacagtctctcacagacatgggcacaggcaagtctgacctggacagttccccagttgagtgtctctcttcccaactgagtctagggtacaccaagttgacagtgaactagtccggcacagtgctaggttagccagccctcaagaggcagagggaggcagacttctgtgagttcagggccaacctggtctatatagtgagttctgacccagcctggattttagggcttcatagtgagacacacacaactcccaccgccctctcacaaagaaagaaaaaaaaagactcataaccagcagcaccagtacctggtgcctggtgtgatgttttgaagcagaagtcctcaaattatggccacccctggaaccctgaagacacttgccaggagagtacagggtcaacgttgttttaaaagaatgtgatgttttttaaaaaaatgtgatgtttgattttcaatttcattttttgcgcaatgtccaagggagttttccagaggcttttcaatgttatattgtcgctgtgatagatagcttgtggaaagtatttgtgtgttttcgcattttctctgttttacttcttgttggtatcatagaagatcagggcaagccctttgagggtttcagtaactttttggagtataacaagggacttgagaccaaaaatatgtaagaatggctactctaaggtatcaggtcccgcattgtctcagcaggcagatggctgcgcagaggggcttccctcggcctgactggggctcccggccccgggcctggccctgcagccaactgcatttcagcacaaagggactctcagccaacctcagctttgggaagcagcaaaaacttggaagggaaaaccaagacactgaggaagccatcagttaccctcagtcctactcctccaggcccttccaataggaagctgcagcacagggattttccagaggatcacataatgcctgctcttctcactgtgcccagtgggcaggatgaactagtagaaaggaaatagtattctggaaaccctagcccagaacaggatgttaccaagaaagcccatggattgcttatcattttacctgcctaagcaccacaggtggagggtgagggtgagtaagccatccttggcctgaagaggttggctgttagcaaggtcagctttgtttggagacaagatattcactagacaccacctgagatacagagggataattcatatttctagagtattaatcagtgttcaattcaggaaacagacatcactttaggtattttaaaacaggataggacttaatagagaattaaacactgactaaatcacagaaaggacttaggaaggcttccaggaacagccccacagacaatgtggagttcatctgttaggaccatgttcatagcgtcaggcactgggtttgagcatttatgtccatggagaagtgagttagaactgagactagggtcatgaatctctctggacatagattgtttccactatgctgtctcggcctctagcacacaagggaaagagagtctagatacaagcatgctctacgaagagagaagaactctacccctactgcattctctacccagtgagctgatggggcaccaagggaggaggaggacgagtaaggataccacccgacaaggacgtgtgcttcccgaacatccccttggagcttagagcagcggttcccctcctgtgggtcacaaccttctggcaaccctctatctccaaaaatacttatattacaattcataacagtagcaaaatcacagttatgaagtagcaacaaaaataacttaatggttgggagtcacctgtattaaagggaggcagcgttaagaagatggagagtcgctgctttagaggatctgggaaatgcccagttagaggtttcataccatagcagggcttggcaatgcctgcagtcccagaattcaggaggctgaggcaagagaaacacaagttaggccacctgggttacatagtgagacacacacacacacacacacacacacacggtttaatggccacactctgctctttgctgtacaaatagaaaatcatgaacaaccagttttcagtgtaatgatttaaacaaaaccttctcttgggctaagggctaaggacatctgtggaagtccctctgtactgccctccagccttgtaagagtcggaaattttacaggtatttgagggggtttcaaatggataataatcagggtggatcttgcagaaagtgataattcatgaatggtcatttttttctttctagattacacaagtttccccaaatagtcccacttcctatatgaatcaacaccatgcccttgaaaacgagacacatcatcatcattattattttttgagacaagactcctgtagcctaggctagcctcaaactcgatttatagtcaagggtggccttgaactcctgccttcatctctcaagtgcagggcttacagatatatgccaccacccttggcttcaggtgtcatagattgatgtcattcttttctcagcagaaacatgacttggtccgtgtaaaaacctgcatctgttaatgctaagtaacaggtgctaattcatggttttagtctgtcaacaaacatttattgaaaactgtagcggtgaattagttaactgctttgactccggtgggttgcatgcatgctgcacctgcccaggagccctctggattcatgaatggaagaacacatgccagctgactttgataagccttgactagctctgtagctgggcacttctaatcctccctgcgactagcatacacttccctcctgtgttcctggcttaacatcttctagatctatgttttatctttgctgccctgttaccttctgggcagtgtcccccaacccccaataaggtcactttccctttccaactacattgctggatggttttcttctgctgctcttaaatctgacccctctccctccaagtcatgaggattctcctctttggtccctttcctgcacaatctaaaagtcccgcctcagtctttatgcccagccgttagctgtgtggcaattctttactatcaatcaaagccagctggaggcaggggccctcaggtccagaagcacggcttttaggagctgaaataagacaaagcattagaaccaattctcaacagaaaacctgttgggtcaggccctgtgctaagaaatgagaaaggcatcgttcctggccttaggccattcgggatgatgggacacacgccatgctggaatagagttctaggggctgttatagtaggcctgagaggttgggtggagagaggtagtattggcactgtcctttcatggataaagcagcgcgtcttgcaaggctactttctgagactgtgtgctaaggggcccccttctgtgtgcagggaacactgcacccagacctgacctctctctgctgccccataggcccttcatgctgctgccaccgctgatggagtggatgcgggttgcaatcacctatgcagaacaccgtcgcagccccactgtggacagtggcgatatccggcaggcagcccggctactgctgccaggcctggactgtgagccccggcaactcaagtatggagcccaaaagaagtggggaggggtacaacttctctgtcccatcacctataacacctctctgctatctgcttcttctagtggctgggtgggcatcagagcaaggctgtagggcacctgagttacactaagtatcgttcaaaagttcatatccccccatagccaagtgggggaagaggtttgttctaggctttgtaattgctgtagtgctacccagcacatacacacctttgactttgggctggagtgcacatggagtgcgagtttggggtcctggctggggaggctctttcattcactgtggttttcttgtatcaaaccctgtgctgagctcttctgccttgtgcctgtatctcagccatcatgacaactttaaagagggctctagtgccctgtaacaaatgaagagactgcaggtcagagaggaacagcagcttgtctgcagaggtgcctaaatttaagatcatcatgttccttcccacagtaacccctcctgtagacaggactgctgcagaagctgttcatgggcctgctcctgctggccagccctagcctggcctggcctgagggatgcttgaatttctgtttcctgacggtgcccaaaccatactatagacatgaattttacaaactttgacctaattcaaagattcaggtaggagcttttaggatgctgtggtgtgccctgtgtaggtacagattttgtctataatggttcttagttgagttgattgttcataggattctgattctcttcctgccttgtccttgataatttggggttttactgggcaacctgaagagacaaagggaaaatctaggcattggcagcaatgcctacttcaccacctgaaggtcagcctgcttatgcaagcactatgcagtggccaaatgctaaggcccaggcctgggcaccagccctggtcagctttctcctcctcaagggagtcagagaatttgttccaacagttgacagatctcaagcgctcagtccactgcattagcccatgtgtaggaggccgagctttgtcctttctatggcagaggttctccacctaacccctttgctatctccaaagagtttacattatgactcataacagtaagccaaattacacttagggagtagcagtgaaagtaattttatggttggggtcaccataacatgagagtctgtaaagggccgcatcaggaaggttgagaatcactgccccaaggcaagaccagagcaaggccagccatagctgaccccttcacaattcagccagacccactgtgctgtgtgtcacagtcacactcacacacctcttggtctctcctgtgcagacccgagtgctgcttcagttccttccggaggctggatgctcgagctgctactgaacgcttcaaccaggacctgggcttccgcatgctcaactgtgggagaacagacctcatcagccaggccatcgaggccctgggcccggatggggtgaacacaatggatgaccaggtaccttctgcggactcttctaggccaggcatagagaactatgctagggtgggagaagcagtcacagtccctgtatcctgagcctgactggggcttgctcagtcagctctgggcttcaagatcctgacaggtggccagtctgggtcccccaaacctcctggacaactatggtagtgtgggctctgtttccctggttggaaggccagcagctatcctagatgaggccgggctgaggaagaatccagtgaaggcttggactgtagactcggcagcaagccgtgggacataatcactggcatgtgaacgggactgtgtgccagccactcacgagctccagagaaaccaggactcggggtgacactggtaaagcgagagtaagaagcaagcacctaagcctatcgaccacctaaggccaagtgcagctggagtcaacagcacacggcagctgtagcaggaggatcacgagttcaaggccagcttcagctacatagtgaattcagggccagtctggactacaaagtgagctcctgtcacaataaaactgaacgctaagcatctagttcattggtagagtatttgcctaacatgtgcaaggcccctggttcagtttccagcaccaaaagaaagaggaggaggaggaagaggaagaggaagaagaagaggaggaggagggcaaacacagaaaacaaagaaagagcacattgatgagaagtaccaagaagcaaaatgaaggggaagagggcaggaaatactggggtgaaccctgatttacagaagaaactatgaaggcgcctgcacagtcagaagactgcagcacacacccgctgtggaatgtttgggtgactctgtttgatcagttactatgtcccaaatgatactgtgtggtttggaagcctatccaaaagcctggggacagccaggctgccatggagggtcacggcccgtgtcttacgccatgacagtgcagcccagagactggagcagcagatgaagcgtgaggccaggagtgctttgtggggctgaaactgagcctgagggagggtggggttgggtgcagcagaacaggaaagagggtgaggcagctgccagcgagtgtggccaggccaggctgaggagccacagagcgaggagtgtctgcacagtggagaacctcaggctggtgtcggtcgcatgcaggcacagatgcaaggcctctgtgggagccttcttcccagtgggtgttcgcttcctcggggcctgcagtgttgaagcccaggcacttacagttcacactgttgaaggctttagtctaccacatcacagctgaggtatcttgacaagataccctgccaccaaagggaccttgctttcctttcctcagtgcctgcgtgtagagcagttggtgggatcttccatcaatggcagtacatgttcactgtggttcctgttgatatgattattactgctgttgtgttactgtcaaaacgatgatggttagccctgaaatctgggcttcagccctccatatgtgcctaagggacagcataaaaatgtggcttcctttctcctgctcagagcctggtgtatgctctgagtgtatacagatgtgtggagaaaagctcattacatacctggtgtgtgtgtgtgtgtgtgtgtgtgtgtgtgtgtgtgtggagtgtggaacaaagccaagtttccatcatgctgccactggcttctccgtagctgctcagcattgttgctctatgaacgctggtatttagaaacagatgcataggtaaacaggctgctcgccccatgattaatctcaagccatttccttatctccaggaactagacaaggatttatgagctgagaagatcttctctccacacagataacctaataaataatatcacagagcaccagacaaatgcttgccaggatccagctgtggcgtgcactttacgccgttgcctttgccgtcagactcccagtcagggagacaaccctgctagctgcccctgtagatacagtgagggagtagacacctcttacagtctgctctgtactgctcattagcacaagatatggtcaggcacatctcctcagagacactgctgagcacaagcttcaacaactcagaccggggttccagcctaggaccttggacagttaactccccttctctgtcccatgcgcatacaatgaggataacaatagaagccacacacacatagtaatagtacagtgattaaagggaacactgcgtgtaagtcacttcctatagtgaatccaggcactgtgtgcagtgtaatgtgttactgttaattacctctcacttggggttgtaagcttatcatgtatgtactgagcactgtgtatactaatgcccttctactaccaactgagacacacattgtttctatctctaagatgaagaaactgaggccgagaagagacattgggtctgggatctggctgcactgcttgccacgtaggccatatatttctcacccctatgctgatgactctgattagccttccagttccttggccctgggagtttaagacacaggacagctcctgaggagcagctgggcagagacctgtgggatgcgggatgctctgttccatgcctgacgatttagcatctacctttgattcacagggtatgacgccgcttatgtacgcctgtgctgctggggacgaagccatggtccagatgctgattgatgctggagctaacttagatatccaggtaaaaggaaacccctgtcctaggccctaacccagggagaggctactccacgatctccagcagccaggctgggcgtggtatttaaactctgtctaaaacaagccaagagtaagaaagatggtggtcagagcaaagaccactttcctctgaatttggactgaagtgggagatgagaagagagagtggccataactctattttcatagctcttgtcctctattgataggctaatccctagttgtccctgtctctgcctccttcagatgcataaagtgctccccttctgtcttctcttgctcaggaagacatcacttgttggctttgaaccttgtccacacaaatgctctcagaagacattacccagcaaatgtagatacacttctgttaacttcgccacccttgcaatgtatccctttagctaaagtacctgtgtcatctgctctggaaagtcaccttccaggaaatagtgaggatttgttgtattttaggttccaagccactctcccaggcatccgtccgtccaccctgacagcaggcattggacctccctgacatttgcggtgctacatggacacatctctgtggtgcaggtgagcttccgagggtgcaccatgtgccgcagcttccaaagtgggctttcaaagtggatccagccccagccagacactgctccaggccagggtccacctgactggcaaagctcacctgactcacctcaggagtgaagttagtgtagagttggaagaggagagccaggcctagccagggcactctccgggtgagttctggaagactggacttcagtctgctccatttcacatttgcaaccctcatctagccaggtgctcttccctcagacctggctctgtgtcacagtgtccctccactcctgtccctccctgtctcacagttcctgaggaagggcagatggcacagctcacatgtaaagctaagcctcgttgttgcccaccttgggttgggctgctatggctggcatcacagtgaggagatgatgcttctagaagcagaagctgtgggcagaagaggcaccagtgacatggcactcagttgacgagtcctgcaggactctaccgacctgcaccctggagtgggcctcactccctccccctcttctaggacgcaaggcctctgtgggtagtaaaatcgggcctgcctgtggtagtcagcgccgcctggcgtgcagccaaccctctgtaggtggttgttgcccagttggccactgcacatagtctgctttgtagtcactgccttcccaggcctgagcagagttactgcctccgtccaggctgggcctgtgggctgtgccctgcgctggcctggtgcccagtttcatccaacaggcaagtctccacccccactgcctcgtcccagcagggagcacatctggtttctgactgacaagtcgccagctgatacaggctttctccgtgccccaccccctgcagggaagcttggaactcacctgggattttttgtatctggttgccagggaggggtggtcagagatttgaggtgtgtcttcagaagcctggaagtgtgcaaagcaagccccctcaacagcagaatgcaggcagcacacttgcctcctctgactcctggcaaagctgtccttgatggaatgaggcctcttgcactcctggctagcctgcgacaatctgcttctccccaccccttgccaccccgggtagccgctgagcctctccagtgaggagtccctcagtgtgttgggcaccatattgtttaatctcagtaatgcttcaaggcaggcctctccccccaccttgtagctagggaagcctaaagttcaagccattccagtcagtggccagcaccgtagcccgttcgtctacacctgctgctgctcagggccttgtttccctctagggcagtggttctcaaccttcctaatgctgggaccctttaacacagttcctcacgttgtggtgacccccagccataaagttattttcattgctccttcataactgtaattttgctgctgttacggatcacagtgtaaatatctgttgtgcaggacatctggtagacccaaaggtagagaagtgctgctctaggtgacagttgattgtaggtgacactccctgttctgcttatctgtgtgagttctccagaaggtctctgaagctgattggtgggaaagtattgagaagagaaaaatagttccaaagtggccacagttagagcatagtgcatggtgggatgaagggggagattgcagaagtgcagatcctgagggtactaggtgtcctcagactccagtgcctcagctgccagtgggagctatttcatggtcacatgtttggagagacttgtaagtcctaccccctagagtactccacccctctccaggcaccctgttatgctgagtatgtcttcttcctgtgcctgacagctgctacttgatgccggtgcccatgtggagggctcagctgtgaacagtggggaggacagctacgccgagacacccctgcagctggcctctgcagccggtaggtacactgcttccctgtctctcatgttctcacatcatgatcacattttagccttgtcacccaggctggtcactgagctatgtgctaactctagaaacccttaaggttccttctaggctactaggagggggttccttccctctttctcccagcgcttttgctgagcaaagggtccagagagggccctgtacggtaatgagccttcccctcctgaggacctagacagggtaggacacagccaccttctctgacctcccatttatacccacgttatcattgcctgattgtgattgtaggtctcccccacttattccaagaatccaatcttggagaccccatctgccccaccttggtttccctcctcagatctcatgaaccctggtacttccaccttgtctttcagggaactatgagctggtcagcttgctgctgagccggggtgctgaccccctcctcagcatgctggaagccaacggcatggcatcttccctccacgaggagatgaactgcttcagccactccgctgcccacggccacaggtacaaaccctgaggtgccagccctgggtgaccaggcacactgaaatgcactctcatgagcctgggcttctgaggcaggagaagagccaggcctggtaatggttcctgaagccagagctagggtgcaagttctccaggatgatgtaggttcttggtcagcatggaggcccaagactttggagacctggagacactggatgagctctgacttctgacacgctggcactgactgggacctaaacctcaagcccacccctttttagcaaaactgttattcatgtagctgccaagactccagtcctctgtgaagttggtggtgattttccagtgcctgtggtgctcccagagtatccccagggcttcactcagcacacgggccagctatgaagaggttgctagtagctccaggagcagatggcaggcctgcctggccctgtgactggcaacagcaggctgaaaccagagtcgttaggctgtgctagaggtggaacgtggaggggaacaagagaagcagttactagagagcaggaaaggagacagaaaagaaagactggtggggcaagactccagcgcacagttcagggctgtctcctcaacactactagacttgtgctcctgctgtgacctccctgacagtgcctgtcccatgcctttttccagacccccaaaacccttcccatcaatgcataggaggaaagcagaaagggctggtgggcttgtccactgtggagtaggttgctggtacctttgcatcagactggcaccatgcccaagagagggtgatcctggcaccctgtgttaaggtggcaaagcagctataactcagagaagtagaagagcctgagatcacacagccaagtgcagagctatgactcctcagtcatactaacacagaagaaagatagggtccttggctcctccacacgtctgcgatgggggatgctgagagccctctgctgccctgaggtagtccatcatggcatgggctctataatatagctcagttgggcactgtccacccatcttggggattccagggctcattttgctatcttggcttacagaaatgtcctgagaaagctcctgactcagccacagcaggctaaagcagatgtgctgtctctagaagagatcctggctgagggtgtggaggaaagcgacacatcgagccagggcagcagtgaggggcctgtgaggctaagccgaacccgaacgaaggccctgcaggaagccatgtactacagcgctgagcacggttacctggacatcaccatggagctgagggcactgggtgaggctgctcaggtgtaaacagttgcacagaaacatatgcacggacatgtggcaacagtcactgcacagaaacacacagtgcatgggcacatgggaacagtcattgctctcagggtcccagccttctgcttgcaggccaactctcccttctgatggcacaccaggagtgtgtataggaccctgaagattacaaagatgtcagtgtgcctggttgctcagctggctttctactcctggggtctgtgaatcagtggatttctgcatcatccagggaaactagtcagcctggcagacttgaaccagatcctatgttatctgtatagtgttacatgatctaagcctcactccccacctttttgtgggtttggttctgattatcttcgttcgactaggaacaggatgctgtccgctagagcacaaggcatggtggtgtaattgtggggccaaatgccaaacccaataatggcagcagttctcacccttcctaatgctgtgccctttaattcagtccctcgtgctgtgtgactcccaacataacattattcttgttaatgcctcacaactaatttttactgctattatgaatcatgatgtgaatacctgtgttttctgatggtcttaggtgacttttgtgaaagggtcatttgtcctcaaaggggtcacaacccacagattgagagccactgccctaaggcctggccatcaaagcccaggcagccccaggaacaccattgggatataactggattttgacataaatttcacatcctagtcttgttgccccatggccccagactcaggccaggggactccagtaaacccctacatgtcctgctgtgcacagatacaccagggagctggatgcttcatctcttccatgatggagccacttcagacttctgttcttgagtgccctgcgtactttctgggtacatctggtcatccctcccgaatgggttttctcagcaaatagttgtagggccaacaagcactaggcccttagcttggctgaaggccttcctccatgtcatctgatgaacaggcagagcatcctatgccctgtcagctgagcgacactcggcactcagtggggcatcaagcagagcccaccctgaaaaggctgtactttcctgggaggaagtgacagcttcccttctttctggccaggtgttccctggaagctgcacatctggatagagtcgctgcggacctccttctcacagtcacggtactcagtggtgcagagcctcctgaaggatttcagctccatcaaggaagaggagtacaacgaggagctggtgacagaaggcttgcagctcatgtttgatatcctcaagaccagcaaagtgagtggggccccgcagccctgacctgggttccacatcctaggatggccgtgtaaatatacatgcacatccatcccacacacatgaacatacatcaccccaacacccagagttggactgcatggctgccagagggcagaggccatggcagtccagactggagcccagccaaaacagccatttgggaaatcacagatgaaatgacagtctgttctggccaacaagcctgatgtagctgcagctacagccagctgtgcgcatgagctgaaggtccttcctgcctctccctgcagaacgactccgtcctccagcagctggccaccatcttcacacactgctatggcaccagccccatccccagcatcccggagatccggaagaccctgccagccaggctaggtgtgtatccatgcccgctagggcttgttcccacgctcttctttctccccatcactcttgcctgccttcctgttcccaagtgccaaggccctagcttcagtatccctcactttgtgtcctctgctccattccaccccagccctcttctagagggttgataccctgacactatcttgtcttcctacccacagatcctcactttctgaacaacaaggagatgtctgatgtaaccttcctagtggaaggaaagctgttttatgcacacaaagtccttttggtgacagcatctaacaggtaggccacctgggtatcagccctggccccaggaacacctccagttcttttagcattgaggtgtgctgtgagtcttcctggggagatggaagcaagcatgtgtccaccccagacaggacactaataaatgattccacctaggtctagcttaggagaccggtgagtttgggggtcaggtcacttagaggaacatgatgtcccagaggcaatcccagcatggatacatgaagcctgcatttctgaagttcctggctgatttgcctatctgcccagtcttttcttcccagcagccattgctgcttatatagccttatagggagagatgatgtgaatttttctaagtttcaggaacttcctctgaactgtcttatttacttctagtccttgtttcatctaccttagaagaaagagctatataaggtgaccatagtgctagagaaaagggaccaagaggaccttataacttctgtccctggggtacaaagtgggtcagcctgggtgcagcaggagcagagtccagcgtgcaaggagaagttctcagggccacctcctgctgagttatacagttgactattagaacacagaagtattctagaataaagagctagcgttcccagcataggctcctggtcatcgtgcaaggggagagtgggggagcagaacagagctgggcccagcagcccaggatgatgtaaaatgacacctgccaaacattagtttgagaacagggcagtcatttttagtgttccatctcccagaagcagctcaaatggcagtgccattggcacagcaatggatctcaggccatgttcaaacctcaccttgtctccttgttccaggttcaagaccttaatgaccaacaaatcagaacaagatggggacagcagcaaaaccattgagatcagcgacatcaagtaccacatctttcaggtgtgtgggcctcagagttgccctctccttgaaagtccctctgcacagcctatcctgggccttatgcatctggtcagtctgtccctgagggcctgtgtgatttaccaagtcagtgaccacaagagagccacccagtcctcccctcatgcagactgatcctctgtgaggctgtggcttcagagctacctcaggaatccaggcagcctggacatagatagaaaggatgaacaccgctgcccacaggtgtgcgggcgggactcatgctgtagtgagctgctgaaagtttactggaaaggcaatggctgggctattaggcaaccatggtgtaggctgcccctcttctcagcagtccagggctttgcacaaggttcaggctgagcaacagacactgtggcagcagatgaggagggttggagtctcagctgagagagattttccaaaaagtcccaggtgtctttgtgttaggggttggtgcttggcctgtagatctgaccccctttagggctatgaccacacagaggcccagcagcagcaggtagtgctaggccctgtctggccctgtatagagtaaagatcccatgggagaccacagaatccccagccccaccactcaggagtacagagagccaccgtggaacactcctgggcctctgtgccaccacactaaaggccaggtgtggtgacaagcactttcagaggccaaggctgaaggctcatgtgcgtgaagccagagaggaccagagcgtgagaccttcaggaagtccaaagcatgcctgccccctcggcctcctctttagtcacattagctactctgggacagaggaattaaaggatggggccaccctcagtgagacagggctgtgactcttacaggagaaggcacttcctgggaaagtggccgccaggctggggtagcaacagtcagctaaccagactgcagactacagactgcgcacagaagcccgagtgggaagacttagcttctgtacccaggaagctcccaggggcgaggggcggagtgtcactgctcactgacacttcacttctagcatttttaagttacgtgtcgtggggtgcagaggggaggcatgccagtgtgtacagatttgctccttctactgtgagtcctgggcttgaccctcgagtcactgggcatgagagcagctcaccagacatttcttagacacgctaaattcaggcttccaccagctcctacttaagcctcacagcggtccgaggtccgctcccctcttgacagatgaggggtcagaggttgagtagcttgttcaaggtaacacccatgggaagcgacacgtaaggcaaggaaggactcggatttgattgataagagcttggcgacgagatggaaaagtcatgggacatggggggagaacaggtgggagcgggaacacggtaactaagggacgagacagggagggcagactcgggctctggccttctctccctccacactggggagacatgtttgctcaagaagcccaaagtccaggtgactgtagctgtgctcagatgtaggatggtcctggagagcagcagggattggtggaaaggtagcgagaggtgtgggctcagccttggggcagaggaaggtcacctgtgccaggctaggctggcagctcctgtggagggtaaatggggacagtagcctactggggcagcacacacaggccttgtaaatgctaccctcagctcccacccagggttagccacttagccagatctgaacatctacctgccttattccgtggatcccctgggcccatttccaaagtatttgaatgtatgtactccaacacatccatagtataagaaattgagatgtttctttttttagttctggagactaagttcagggtctcctgcttactagagaagcactctactgcccagctacatcctgggagagctgacccaccactgtcccaactgagtgagggtatcccagggctgagactttgtcctggtggctaaggagaaacagagtactcacagggacagactactgagccactgtgtgatggctgtgccgcagaagccttgggagtctggcttcttgatgggagcctgccagtacctggctgagctgccgtcctgctgtcaggttttctcctagaccctctggtgcctctgcagcctgagggccggtcctaacagagcctggccgtgcctgctggagccttgtttactcttgctcctgccagcaccttgctggggctgctgcttcagccaaccagagagaattgttttccttcttctagctgggaacctcaccaggttccagtgtaatggcaatattagtgctgtgaacctcaaactcaagagagctgcccattcctgggctctcccatggactcacttcctaagcgctctaggcacagatctcagccaggcagcagagcaagtgcctcctctcctcaggaggtctgccaaggtctcagaatctggcctgcttagacggttgtccctctactcacccctcgggtccatatagacttatttgcttccgagacagggtctcactatgtagaccagactagccttgaacttgctaccctccttcttcagtgttggattacagatttgtaccaacgtgtctggccattcatagaatttattttatacttttgttttgctctgaggtagggtgtccctggctgccctggtgatgtttggtccaagctgggcctcaaacttgagcaatcctcccatctaactttcctggatgctgggattgtaggcatgtaccagcacactgggttcatacatacactttggacaaaagcagtgagcacgtggtgggagtggggtgggagagagggtagtggccctgctttggaataacaaaccagagtgacttgaggcaagacatcttccctcctgggctacagagctctcatagggaaaggctccttgtcatggcaaggggtcagagggtctcggagctggcagtatagctgtgcagcaccacacgtgtggtgtttacataagtccgttcccactgcagatgctgatgcagtacctgtactacggaggaaccgagtccatggaaatccccactgctgacatcctgcaggtaagggcagggcatgtagcccagtgtcctccagacctcatctctcagccccgatctcagatccatgtggcggggcctgtcatccacatggggcatgatacctgtgtcatgtgtaagggcacttctgcagacagaacaggtatcaggcacacctccaagcccagctttcttgacatgcctgtggggttcagcccaggagcatcagacagtggctgagtctgctcgccagtggtacatggcccagaggctcactctatcttacagcccaaggtctctttggaggtcagaaatctcagcccacacccgtgcctatcctgtatctctcaaatcccagctactaccaagatgatctagaacagaaccatttcaagggaaccatctcttctcagactaatttggcaggagggctgggtcctgggacttaaaaggggacgctttcatttctaagaggcctgctttaccccctagctgctgtcagctgccaacctgttccagctagatgccctgcagagacactgtgagatcctgtgctcccagacccttagtgtggaaagtgctgtcaacacctacaaatatgccaaggtaagtgctggggacagtcagccactcccaccacactccactctctgtagggccctgtcacagcactgacaacaggcaggagatgaaatgcatgtgtccaggccacatgagggcagagtggccaacggaacttaaaacttcacctggagcctggggctcctgctgccagcaggggccctgacattggtttagagccatcttacatctcggccagctacctctgaagcccactttcctcacatcccactcagctatcctcagttctgctttgggagtagcatcctcatggtctctccacatcctgtcttccccatgtgcgaacctcatgtttctttcaaaagtatgaaaccatgctatcctgcaaactaagtcgccagcccatagcaagcttgacaagactcacagcatcccactctcctgggacaaccctccccctttctgtaaagcacttcccaggaccaaccagtcccatgtcttcatcagatcatgtccccaggcctcaggcattcccagcttttactgtccacctgtagtcacctggctggtctcattaatttctcaggttttatcctcctgcatgttagctccaggagagtctgagagggacctccatgccctgctcagagacagactggaagtgaatgcttgatactttctgcattagcatggctttggagcatcgcccatgatgctcgtgagccttgtgctgggccgtgtgtagtcactgcccttaggaaaagagctgttcaatagctatcatgtaacataggggaggggaagggaaggggccagggactcattagtgttcttggtgacacaactgagacttgaaccaggtactcccaggaggtactcacacaggggaggtggcttcaagagacagaccgggacatctccccaggtttaagctgagccctattgtgagtgggtgagtcggttagggcaggtttggggatggagaaggctataggaaggccacgggcctcacttccctctctacctgcagatccacaacgccccggagctggccctcttctgtgaaggcttcttcctcaagcacatgaaggccctgctagagcaggatgccttccggcagctcatctatggccgaagcagcaaagtccagggcctggacccactgcaggatctgcagagcaccctagcagagcgagtgcattctgtctacgtcacctcccgggtgtgaggcaggatggagggggactgttatctgagggcgtgcaaaggtctgttaaggccagaaaccaccagtgacacccccagtggagggaggcttgtaggctttaggggtacttcctgctcttcccctagataaccaatcatctgtggtgttgaccgacccttgggtgaacagagtccacttcactgttgctcaaccagtaactggcaagggggtgtaacatagttgcaccttgagggccaccctgtgccctctcccctccagtggctcagcagcaagctcacctcagctccagctctcgccatcctggctggactgttaggggcatgggcattcttatgaatgtagaaaatggatcctgagccccaggccactggatgcagtagctggtatgctttgttttcctaaacagagaagaaagggtttccaaatcctgtcctccaagctgtgcctttgaaagggctggtgaggtggcccctgtctgtgaagactggacctctagtcgcctgccccacgagactactatgttaggagtctgagctcagagcttccgagctgatgatgggctacagtacaggaactcaaggacttccgctcttgctgctacaactggcagccaaagtgaagaggttggttctagatcgggcctagctctaatgtgtctgcaggctgaggcagcagagtgccttccagttaggacaggggtgcaagagcacacttgtcacctgggatctgtgactctggggcatgaaggacaaggcctcggtggaagagaagctatgtcccctcccatcctgtcctcagtcttggctccccatcctctggcctgtttgtggacagatgctgggacagcatcaagaacagctaccttagaaactatttattcatcagaagcccccagggcttgcaatcctggaaagatattttcaacttgctgcttgtgcgggatgtacaaaggaatgaatggtattttattgctgtaatattgtataatactgtaactataccttaatgttgttacttactgtaaatgtgctatggttttatcaacaataaacactcattaacattggcattggcatctgctcctggtaaaagaagattgcctaggagttcagagttgcagaagagccccgctggaccatggagaacccagagctgagtctgtcccactgggcaggaaaaccccacagcagagctaccatataccttgccactcacctgtctggtatcactctgactctgtcctcagattggccaatttcttcacctgggaaatgaggcgcatgaaaatttgatgtgccaatgggctagacagagcaggactctcagtggggaggaggcccacctatggctttctctggccttatggcccaggcccctccgtcaggctgagatgaggaaggtcctgaggtttacacacctgtgccagctctacactgcgtggcctgccgagaagcaccagggagatgcaggagcaggcactgaagggcagcctgggctaggaatctggtaaatataccaccctcctacccctagttcttgttaagatcagtgggagtggctaccatttaagtagcatcctggaaaagaatgtagagactccagaaaccagagaggcccgtttcctagctctttttgggtagagggccggcagaatggcttgaacttcactctggggctctggactcagcagtgaggacatcctgtgcatattctcttccactgaggccctgtctttcacgccccacagtgccctctgggggccacaggaaggagatgcagtcctcagtaccaccatgtgaagcagcagagagtgtctgccctttaagggtttgtgtctgaccactccacctccagcagagctgttcctagctgaaaaggcaagtcagtttacaactggctccaacctgttcctccgcaggtgttaggattagatgaggagttagccccctaagctcatattannnnnnnnnnnnnnnnnnnnnnnnnnnnnnnnnnnnnnnnnnnnnnnnnnnnnnnnnnnnnnnnnnnnnnnnnnnnnnnnnnnnnnnnnnnnnnnnnnnnnnnnnnnnnnnnnnnnnnnnnnnnnnnnnnnnnnnnnnnnnnnnnnnnnnnnnnnnnnnnnnnnnnnnnnnggtacttatgtgaaaaactcggtgtaagcacatgcagccccagccaggactgtgggggccagagtcagggtcactgtggggcttgctggctgccagcctggctccagttcagtaagagaccctctctcaagggaataaagtggagaatgacaggagcaggagacccggtgtcctctggcctgcgcgcgcgcgcacacatgcacacacacacacacacactcacacacactctcacacacacacacacacacatacttctgtggggggaaagctaacttttcctaggacctaacacttatagcaacaggggtgtttgatcagttagcccagggcagcaactcaagatcatgcgagccacttctaagctgtcaggctgttgctactagcagctagacaagaacaaagttgacttttttttaaattagtattgtctttatttacatttcaaaaaagctccctataccctcccccgcccccacccacccactcactcccacttcttggccctggtgtttcccctgtactggggcatataaagttcgcaagacctaggggcctctcttcccaatgatggccgactaggccatcttctgatacatatgcagctagagacacgagctctggaagaccaacgtgtggatacttcattcctccttagaatagggaacaaaatacccatggaaggagttacagagacaaagcttggagctaagacgaaaggatggaccatctagagactaccccactggggatccatcccataatcagccaccaaacccagacactattgcatatgccagaaagattttgctcaaagttgacttcttataggagtccttgggtcacaaaggctggatgtattagcaatgaacccaaggacagcagacaaggcagttatacatcagggctagggtctgagacccctgtagcaacttggaagccaccagggttagtccagggccaccaaggtaaacactaggcactaaggcttctggccttccctggttccttccagtctctcctgatgctgtgctctctacactaaacaagagttcctttcttcataagagtcccctatgtagacaaaggattggcaaaccagaaagttcccagagatcgtgcccccttctcccagcctcggtgcacacacgcagttggtcactccagcatcctctgggattgtcaagaccagatgagcagtgagaacaggttgacactagccccttatagcttaggggtgaggagaccatgaaggaaccccctttgttccccatcctggtaacctatgcagagctggcccatctgacttcactttgaatgtgacttctcctgagacagaagagctttacagatgtcattctgtgggggccagatggtgaggtctgaaggaggcatgccctttcaggtttgaaggagagacaacacactgagacctgtgcaggaggacatggtttgaaaaggaccttgactgcacacagtggccatcctggtcaggttgagaagcccaaagacagttattactttgtgagcacctccaactgcaaagcacaggctgtgtaacccacgtgagtctggccagctcgggcttattctagaatatggccaggcccgcgtcattccatcatcctggagccactatcactgagcagcacctgtggttagacctggagagcaaccgaaatgcagactggatccactgttgtaagtcaggcactggtctaagcagcacctgctctttttcacccactgttcctcatggctgggggatgtgggtgccttcactactacttgtgatccccaaggtaaagccacattactttgttataaccgattttataggcactgcaggcaaatggtccttccaagacatcatttattaaaaatattctctctcccctcatttttgtagtaagagtctttctcgatagtctctcccaaatgaagaggcaaccaaaaggcatctggggctcagatgttgcagcctgcctaagcctttcctgggacgctgaggacagcagacctgccgcaggcagacatagaagggaggagcaggagaggtcctgctgacccagcctcagtgtcgggacaggtctgcagtgaggcagcgtgtgcctccagaaagccgtgtgctggagcacagggaggccaggagccagcacagcagccacagtgggagcaagccaaagtgagactgacctgggtggaacgacagcccctgacaatgccagagctttgcccacaccaagttctaagcagcctgttcaagagtgactttgtcttcagtcacggcgggcatacagatggaacgatggtgcctgcctttgctgaaggcccttgtcactgtcactgtcactgtccacactgctgcctggcctggcccagcagagcacagctcagaagtctggcatctcctcacctcactacttctttcgcttcagtttcatatcctttctgttgttatctctcttcttcaacttcttgctctgtttgggttcttgttttgtttccagtttccttttcttgtcactggaggcaaaaaaaatataccaaggatagaaacagaaagcattaaacatcataggcctgaaacactgcaagctgctatttgaagaaccaccctcacctgacagacacccagacatgttctctgcggccctttagagacagcttcatgcaggcccgggaccacatcacacaggcccaccctgaccatctgtggagtagcccaggctctcttcagaatactgaatggtctcctgtcccaatacctcaagcagctacctcagtgccagacagagatcatgcccactgcatggagcccctagatatcaccccagaggcagttgaccccagaggcactttttagcacaaacatgggatcttcaaggaaagccagagttcttcctaattcactgctatgaactgaattttcctaaaacagtggccaaactcccagtagccatgactcgggagtccctggcaagcctcatgccagggcagcatggggactgatcaggcaacctgcctgttagaaacccttggagataagagtctcttaacggccttttccctggaaacagaccccctaggagaccactaacatcattacatcaagtacctcatggaggaaccactgagacagacgggcaggggctagacagacggctcagcgactgagggaggaaatgccgctctctttcctccccgagccagggtcttcggggtcttcctacgtagctctcactgacctagagctcacaggtggcctcaaactcagagacctgcctgtctctgccttctgtgtgtcaggactacagatgctactccatggacccaatgccctcttctggcctcctcagataccaggtatacacatggtgcacacatacacacatacatgcaggcaaaacactcataatataaaaaatcttaaaacaaaacaaaaccaaaggcaagcctcaggaaagggcaggcttaccgcgcgcacttcacttcatctgagcccctgggatgactcacgaggctcccagcagcagtcgcagtgggagctgagctcaggctcgctctgcagagctcagagccagtgttctcacagtaggcttatcctcgggccttgtgatagtcaaaacccctggcatagctagagcccgggggagcctaatgcatttgtcacactgttcaaaccagaggacacactgacagcaggccagaaggcccctggaaggtgtggctgccatcagcactagaaccctctaagtcctggagtgatgtaaggagatggaggggcaatacctgactttgagattcatcacagacaatttccacgttataaactctttaggagagtaataattggtaattatgacggtgccaacaaatcagccttcccacaagcccgaagcggctatgctagccttttgtgtacaggctctgggcacagggtgtctcctgctagtcctaaaggagcgctaacatttgctatatgaaaaggcaccactttgcagatgagacactggagaaacggtgttcagtgacctcaggatgccgaggtggccgaggaagtgaaaacgattttcatactgatcctttccttgcctgttccattctctgtctcttacttccattgtctctgagggcacaaggtaggcgggtaccacaagactagaggcagacgccggaagccggctggggcccagcatgccagagatgaatgggactggccaaagtaaaactgggtctttctcaagacttagctggatggtgaaagacttgcctagcatatataaagccctgtgcttgatcgccatcaaggagaaaagaaaaaagaaaagaaaaaaggaaaaaacaaaaacaaaaacaccaaacccacaaccaaaaacttaaatgcaaacccatactattatttatttcaaacaaatagttttcagtttctatgcgaggtagctacaaaaaggacctgcataaagaaaggttccatcttttaaggcataaaagagccctaagaccaaggattttgagaactgctggcctgaaggaaggacaaggtgactcacatgacagactctgcagtggacacacctggcccaactctggccctgtcgtccctggcgctgagtacaggaaggaagagatccatgcctaggtcactgtctgctttaggcgtgctaccaaggtggccccagagaactcaagagagaaccatgacccctccatcagcatttgctcctgcctcctgcttcccaggaacagctacacagcccagctgtgtgggacaccaggccctccttaccttttcaaactaacaatggaggcattctgccctgctttgctcaaaacttcattccactcttcatcgtccccacgaattacatatctgtaagaagaggggaatgtcaaagcctgttagaagagagactgctcaaaagaaaataagaaggtgataagatgcccaccccaggagacaccagagctgcactagcatgtaagctgcagaaggggtgacgggcatacagccaggtgtagtcccactggacagaagagtcataccaagagtggaggaaaaggggtcaccagggaccagagggcaaggcagtgtgccacagctacctttgccaccacctgccatcactgtcctcactgggacagcccctgtcctaccagcctccaacaacctactctgaatcctctcacttctttcagataaagcagtcttggcacatcaaagagaaaccagcttgagaccctgaaatggccttatggtattgctcaatctgatcaaccaatgacctggctgcggacaagttctgtggctccaagcctagagttagttacagggaaaggcctgaagcagcaggactgtcagatctgtcaccctggggtggctagaaaggaaacatcacaagtaacactcaacaggaacagaaggaaaacgacaaacatgaggaagggactactccaggtgggaggtgtcctgctcagcacccccttcctggaagggcctggcagtaacacaaacccaaagtgacaagaactctgggatcctgggaatgagacagattgcagatctcagctgtggtacttctgaaacagttatgagcctgtggggtgtgtggtaggacacctttagcaaagtctacaggccatggagactgggaagaactgattccctgagatgggaggggcttactgagagaggtccatgtccttcagcttcccgacttccttcttgtgtttctcctggaattcctttgctgcttcatcctgtagtccacagccagagagagcagcggtcagagagaaggagaagcggggacagggaggaaacacttcctcctgaggtacactcccaacactaagagcagctactacagttttacagtgtgcccacctataaaatacacatttggaaaagcatcaaaagggtaaccaacatttgcagcaacagcctcgaggttcccacactcacgcactcagtgagaaccacactggctttggacctacagagtgccacttagttaagtcagtgcacaggacccaatccttcagttgttctgtatcccaggctgacctgcaattctctaaacagcagctcaagctggtgaacaactcccctacctctcagcctgaggatacagaaatgcaagccgtgtaccagcacctccagcctgcaggacagctccgaagcagaggaggagggtggtctacatcgacaggctaacagtggccaaggggaacactgggacctctacagcggggacataccaggtcatcactcagggtcttcatagtgggctccatgaccacatccttcactgccaccatctgctcctcaatagccttttcctgcacatcattgaacagctacaaggacaacacaacaggaggaaagaaaagatgcaggagcagcaggggtctgtcactcactcttcagtgtctcaaagaaaagtactcaaagcaatgcttcagacattaggaacatagctgatcacagcacaagcatagacacaggcagagtatatacaaatcccagcagtggggtctctgagaagaaatccagttcacagacactggctgacacgccacccacctacttccactgtgtgtgtgtgtgtgtgtagatctgcgcaaatacatctaagttttagtacttattataaacaaagagtggatgtgttatgttactgaaaagaccaaaatcctgcccatggaccaaggtcaccttcacaactttgcggatgatccggttgaaaagccccatcaactggcctgagggcagctcaatctccttttccagctgatccacagacttgtgctgtaggccaattcccaagagaagagcctgaaggaaggagaatcagctggactggcttccaagatagccttgcgcattacaatagcctagaatggagctgcctcatttgatgaagcagaaaccagagagcagcagtgggggtttggcatcttccatcctgcaactaaggcaggaacactccttccttcctaaaatgcactttagttcacattgtcccaaaaaacatcaacttcacaaaaaaaccacatatatccggagtgcaggatagcctggccttctggtagggtgacaaggtggcagggagagtgtgggttcaaagtgtagcagtctgcttgctaacaatacagccacattgctcgcctcggcctgcagagtgaggatgggccaccattagctctgccagggctaaaggcacaaagctacttccaaggactcatctaagggcccagcaccaacagctccactgtcctcccttgtcccccatggagtcccaggtgacctaccgactgggcagccgacagggacaggtctcctagctggttcaggaagtacaagcgggaaatggctgggataagatccatgatgaggtggtaatcgaccatgttccgagagtacatctctagacgcttcaggtcatagggaaggaaaagtgcctccagatgctcccggcctagggctgtgcatgcaacaagagcccagtcagggcagtctgcagccctcacaggataggacgcagcacacaaggccaaccaggaaggggctggacggctcagcagttaagtgcactcgctgctcttgcagaaaacccagaacccacatgtgataattcacaaccaacaataactcaacttccagagactctgacgccctctgaccgccacaggcaccaggtacaaatgcacacatgcagacaaaataaggcacacataagtctctaagtaaatgtggtaagatgccttgctaccaataacataatcccaggctggtagttcagacaaccaccaatatgctgggtccaagaaagatcctcgtgccctaacgttctaaggacacacctccactctccccatttgtcactctttctccagggtcaccttacatgctctgcccaggtcaaagaacccagattttcccatcaaaatacaacccacaagacataatatacacataagaacgtgtgcatagccacagatatacacataaaaatatatataaatgtaactgttaatagaacaaaatgactgctcatgacctcttatgcaatttttaaaattttcatccaactaaacaatgattctatgctttctagatttataaagctatatagctttatagttatatagttcttctatataccagtcagaaggctgagacatattcttggtgctatttcataaatactcgaacacagagccccgagactgagctagttcccctcagagcccaggttccatagctaaccactgtgtgaacctgtcttacacctgaaatccaggcacagcctgggcaggagagaggcttggggaacagcaggcagcatggagactgtggactagagcagccctcagctcctgggtgacagctcacctggcagggctgacttggctacgttcctgttctgaatgatgttcagagacagggcaggagagaaggtgctgaactggtatgacagcaaggccaggaaccgtcttcggaaatctgcagggcacagaaaggcagttagcaatctgcaggtgccctggcctgtcacctcactgtcccctctccactcgtctggcgtttacctttccaaaatgctgccagccaagctccctgctcagcctcatcctcatcggccagcgtcttcagcataatgcacgagtgttccccagtcaggtcgttctaggggacacacattattgcttggaaccaatgtcatggtgctcccaccctgcccccatgggctcgcatggtaggcagccgcctaagaggccacgggattggagcaggcccagcaggagtttaggtaaggcctgatttctgctccgcacccactcctttcactgaagtcaaggccatgaaggcaggcttcaatccctcaccctgtcagtgaactttgttccttataaagcagaaacttcccag

SEQ ID NO: 312 - DNA, 3158 bp, Mus musculus
ggtgtcctctctctccctgcctacttcagtccctacaatggtgggtccctgggccacgatgagcgagcagatgcctatgctcagctggaacttcggacactggagcagtcactcctggccacgtgtgtgggcagcatctccgagctcagtgatctggtctctcgagccatgcaccacatgcagggccgccaccccctgtgcccaggcaccagccctgctcgccaggcccgccagccaccacagcccatcacgtggtcccccgatgctctccacacactctactacttcctgaggtgtccacagatggagtccatggagaaccccaacctggatcccccaagaatgactctgaataatgaacggcccttcatgctgctgccaccgctgatggagtggatgcgggttgcaatcacctatgcagaacaccgtcgcagccccactgtggacagtggcgatatccggcaggcagcccggctactgctgccaggcctggactgtgagccccggcaactcaaacccgagtgctgcttcagttccttccggaggctggatgctcgagctgctactgaacgcttcaaccaggacctgggcttccgcatgctcaactgtgggagaacagacctcatcagccaggccatcgaggccctgggcccggatggggtgaacacaatggatgaccagggtatgacgccgcttatgtacgcctgtgctgctggggacgaagccatggtccagatgctgattgatgctggagctaacttagatatccagctgctacttgatgccggtgcccatgtggagggctcagctgtgaacagtggggaggacagctacgccgagacacccctgcagctggcctctgcagccgggaactatgagctggtcagcttgctgctgagccggggtgctgaccccctcctcagcatgctggaagccaacggcatggcatcttccctccacgaggagatgaactgcttcagccactccgctgcccacggccacagaaatgtcctgagaaagctcctgactcagccacagcaggctaaagcagatgtgctgtctctagaagagatcctggctgagggtgtggaggaaagcgacacatcgagccagggcagcagtgaggggcctgtgaggctaagccgaacccgaacgaaggccctgcaggaagccatgtactacagcgctgagcacggttacctggacatcaccatggagctgagggcactgggtgttccctggaagctgcacatctggatagagtcgctgcggacctccttctcacagtcacggtactcagtggtgcagagcctcctgaaggatttcagctccatcaaggaagaggagtacaacgaggagctggtgacagaaggcttgcagctcatgtttgatatcctcaagaccagcaaaaacgactccgtcctccagcagctggccaccatcttcacacactgctatggcaccagccccatccccagcatcccggagatccggaagaccctgccagccaggctagatcctcactttctgaacaacaaggagatgtctgatgtaaccttcctagtggaaggaaagctgttttatgcacacaaagtccttttggtgacagcatctaacaggttcaagaccttaatgaccaacaaatcagaacaagatggggacagcagcaaaaccattgagatcagcgacatcaagtaccacatctttcagatgctgatgcagtacctgtactacggaggaaccgagtccatggaaatccccactgctgacatcctgcagctgctgtcagctgccaacctgttccagctagatgccctgcagagacactgtgagatcctgtgctcccagacccttagtgtggaaagtgctgtcaacacctacaaatatgccaagatccacaacgccccggagctggccctcttctgtgaaggcttcttcctcaagcacatgaaggccctgctagagcaggatgccttccggcagctcatctatggccgaagcagcaaagtccagggcctggacccactgcaggatctgcagagcaccctagcagagcgagtgcattctgtctacgtcacctcccgggtgtgaggcaggatggagggggactgttatctgagggcgtgcaaaggtctgttaaggccagaaaccaccagtgacacccccagtggagggaggcttgtaggctttaggggtacttcctgctcttcccctagataaccaatcatctgtggtgttgaccgacccttgggtgaacagagtccacttcactgttgctcaaccagtaactggcaagggggtgtaacatagttgcaccttgagggccaccctgtgccctctcccctccagtggctcagcagcaagctcacctcagctccagctctcgccatcctggctggactgttaggggcatgggcattcttatgaatgtagaaaatggatcctgagccccaggccactggatgcagtagctggtatgctttgttttcctaaacagagaagaaagggtttccaaatcctgtcctccaagctgtgcctttgaaagggctggtgaggtggcccctgtctgtgaagactggacctctagtcgcctgccccacgagactactatgttaggagtctgagctcagagcttccgagctgatgatgggctacagtacaggaactcaaggacttccgctcttgctgctacaactggcagccaaagtgaagaggttggttctagatcgggcctagctctaatgtgtctgcaggctgaggcagcagagtgccttccagttaggacaggggtgcaagagcacacttgtcacctgggatctgtgactctggggcatgaaggacaaggcctcggtggaagagaagctatgtcccctcccatcctgtcctcagtcttggctccccatcctctggcctgtttgtggacagatgctgggacagcatcaagaacagctaccttagaaactatttattcatcagaagcccccagggcttgcaatcctggaaagatattttcaacttgctgcttgtgcgggatgtacaaaggaatgaatggtattttattgctgtaatattgtataatactgtaactataccttaatgttgttacttactgtaaatgtgctatggttttatcaacaataaacactcattaacattgg

SEQ ID NO: 313 - protein, 694 aa, Mus musculus
GVLSLPAYFSPYNGGSLGHDERADAYAQLELRTLEQSLLATCVGSISELSDLVSRAMHHMQGRHPLCPGTSPARQARQPPQPITWSPDALHTLYYFLRCPQMESMENPNLDPPRMTLNNERPFMLLPPLMEWMRVAITYAEHRRSPTVDSGDIRQAARLLLPGLDCEPRQLKPECCFSSFRRLDARAATERFNQDLGFRMLNCGRTDLISQAIEALGPDGVNTMDDQGMTPLMYACAAGDEAMVQMLIDAGANLDIQLLLDAGAHVEGSAVNSGEDSYAETPLQLASAAGNYELVSLLLSRGADPLLSMLEANGMASSLHEEMNCFSHSAAHGHRNVLRKLLTQPQQAKADVLSLEEILAEGVEESDTSSQGSSEGPVRLSRTRTKALQEAMYYSAEHGYLDITMELRALGVPWKLHIWIESLRTSFSQSRYSVVQSLLKDFSSIKEEEYNEELVTEGLQLMFDILKTSKNDSVLQQLATIFTHCYGTSPIPSIPEIRKTLPARLDPHFLNNKEMSDVTFLVEGKLFYAHKVLLVTNRFKTLMTNKSEQDGDSSKTIEISDIKYHIFQMLMQYLYYGGTESMEIPTADILQLLSAANLFQLDALQRHCEILCSQTLSVESAVNTYKYAKIHNAPELALFCEGFFLKHMKALLEQDAFRQLIYGRSSKVQGLDPLQDLQSTLAERVHSVYVTSRV

SEQ ID NO: 314 - DNA, 227246 bp, Homo sapiens
  misc_feature (1)...(227246): n = A,T,C or G
agttagctagtattttgttaaggatttttgcatctatcttcatcagggatattggtctgtagttttctttttttgttatgtcctttcctgatttgggtattagggtgatactggcttgtatgatttagggaggattccctctttctctatttgtagaacagtgtcagtaggaatttgatccagcaatcccactactggctatctacccagaaaaaaaggagtcattatatgaaaaagatacttgcacacacatgtttatagcagcacaattcacaattgcaaaaatatgcaaccagccctaatgcccatcaatcaacacatggataaagaaattgtatagatacaccatgaaatactactcagccataaaaaggaacaaaataatggtatttgcagcaacctggatggaattggagaccattattctaagtgaagtaactcaggaatgggaaaccaaacattgtatgttctcactcataagtgggagctaagctatgaggacgcaaaggcataagaatgatataatggactctggggatttgggggaaaggaatggggggggtgagggatacaagacaacaaactgggcaccttgtatacttctcaggtgatgggtacaccaaaatctcagcaatcaccactaaagaagttactcatataagcaaacatcgcctgttccccaaaaacctatggaaataattcttttttttttttttttttttttttttttgagacagagtctcactctgttgcccaggctggagtgcagtggtgtgatctcggctcactgcaacctccacctcccaggttcaagtgattctgctgcctcagcctcctgaatagctgaaattacaggtacacgccaccatgcccagcaaatttttgtatttttagtagagacaggatttcaccatgttggccaggctggtctcgaactcctgacatcaggtaatccaccgaccttggcctcccaaagtgctgagattacaggcgtgagccacctcgcccggctggaaataatttttttaaaggctactatctgaactctgaagaccacttcctccagtcccatctgcaattcagccatccatccctgtgctgcagctgtctacaatcattcctaatattaagcacccttgcttaagggcagacagagacattttcagattttttaaagaatttatcattaggaatagttatgtggttccagatctatcctcttgggagattcaaaagttgtttgtttgtttgtttgtttgtttttactttaaatcctgctcatgagttttaaaaaatggcttcttaggtgcaagttcatagctaaatgattgagagtgccacctgccgggaacacctgaaattcctggacttgcatattgaattgcaagtttcctggacccaaagcatttgaatcaaactgagaccctctggttacaaatgaggactcagtctctacggctacagaatttgcattttaaaacagttttggggtgccttgaggtttaagaaacaaatgtcttagttcccaaacttgcctgataagaatcacccgggaatttttgtttgtttgagacagcgtctcattctgtcccaccccagagtgtagagacacaatcgtagctcactgcagccttcaattcctgggctcaagcgatcctcccacctgagcctcccaagtagctaggactaaaagcacccaacaccacgccctcctgatttttgtatttttcttttgtagagatggagtcttgctatattgacaagctggttttgaactcctgggctcaagtgatcctctggccttggcctcccaaagtgctgggattacagacatgagccactgtgcccagccagaatgcttgtttaaaatatttttactccggatcacattacagacttactgaattcgtatttccaagaaaggtgcctgggacttgagatttgtataaaaccatcagatgaatattaaaagctgaaatagattctctataccagggtagaagagcacaattgttgattttgttttttttttaagcagataattgataactagaatatgaaacatctaggtctgggaatatggcaacactaccacaatcaagttgtccctggattctctgtcccataattcagctctgtggtcttaagtgccagccccttccctaaaattcttgccattaaaccccaggctcccaggctgggcagggtggctcaagcctataatctcagcactttggaaaaccgggggggggtggggggggcgtggatcacctgaggtcaggagttcgagaccagcctggccaacatggtgaagccaggtcactattaaaatacaaagattagctgggcgtggtggcgggcgcttgtagtcgcagctaatcgggaggctgaagcaggagacttgcttgaacctgggaggtggaggttgcagtgagccaagatcacaccactgcactccaacctgagcgacagcaggagactccatcaaaacacacacacacacacacacacacacacacacacacacacaatcaaaaaaactcccaggctcccagtggcttcctctgataccagctaacacatttgtgatgccaactgcctgacaggcagagctcctgttggaaagccctcctacaacctatcttgtttgctttgtgaacggttttattaggttggtgcaaaagtaattgcggtttagccattactttcaatggcaaaagccacaattacttctgcacttaccccaattttttttttttttttttttttgagccggattctcctgctgttgcccagtctggagtgcagtggcgcgatctcggctcactgcaagctccgcctcccgggttcacgccattctcctgcctcagcctcccgagtagctgggactacaggcccccaccaccacgcctggctaattttttgtatttttagtagagacggagtttcacagtgttagcacttaccccgattttctcctgtgaagcaatgtcctaggtttggaactacctttgggatcgcattgtgtccaaaagaaccaaattccagctttgggcaatggtcagatactgaaactgaccagtcctaatatctatctggatttggtccaaggtcctgccctatcacaactacttgagcgaacacataagatgtgtcattgtcttcataagacacagaagatagtcattgtcttctcttcttcaagttaaataaaaagtcccagttactttaaaatagcctgtggtatttgaaaaaaaaaaaaaaaaaactctctgcacagttaagcccaggaccaggatagcatgggttacaagaaatacaaacagagccttaaatattgtaggtcatgagtatagtagagggagaaacagaatgcaaaatttcccaaagttaaccacaaaattcaattcttttttttcttttcttttttctttttttttttttttgtaggccatctcatgagactagccatcctgcggaacataccttggggaagtatttttttcttcttctttataaccattttggggctttgttttgaattgtctgtgtttttctttagtcgtgagattcagaacaaatacctgtgtcaggaatgggctaatctaggttgcacaggatggaggagactttacagtttccacaccattggtttctttttcaacaactgagtgttctgtttgatcaacttcaaagcagctctgctaaccataacactcctgtttaccacgtttctcagctttccttgcattccacagtatttccttccttatgtttgacccatttctcccccagatgtaccaacccgcatagtgagtcaaagaactgacaatggcttttggtcagtggttttccagtagctctgcaaagttttgggcttccactgagtttctcagaagctgcctgaaaattcatgaattggctctagacccttccacccacaaccccaaatcaagctttctgcttctttgtatttcatatcaaggcctgtgtaagactggaaaaagggatttctcaactcggcaatttgaaaacgactcatttaagttatcacctgttctcaggcatattatgttaagtgtccaaagaacaacccagatggttttcataataccgcgatgtagcaagcaatgcttttgaaatcatctctgtgctccctgcttagtgactctctaacccttgcaggaggagctatggaagccccacttcatcccagattctgagacaagcctggcacctgtcagcaaatagttaaggagttcccaaaccagtaagttaaggagtcccaaaccagtaagtgcctcagagattcaggacgtgattacgctgcctgctactcctgacctggctctgaaaaccttgtgtccaaacccccgcctggaaacccacagtcccaataactgagtccctgtcttgactctctgcaccatccttcagttcctacaggctcagcctttccttgccccctcccccaaggttttggaaattagagtcttctaccagccactctggtaggggcctgtttgctgaatgctatttaccacccgtgttcttatcagttgccagggctaggcactgtttgatgtctggttctgagccatttctggtttgatctgctctccaccctgaccttcccactcatctaagcagcttattgtctctgccaagcccagacttagattgtctttaaaaatccaaatttatggccaggtgcagtggcttacacctgtaatcccagccttttgggaggccgaggagggtggatcacctgaggtcgggagtttgagaccagcctgaccaacatggagaaaccctgtctctactaaaaatacaaaattagctgggcatggtggcgcatgcctgtaatcctagctactcgggaggcggaggcaggagaatcgcttgaacccgggaggcggaggttgcagtgagctgacatcatgccattgcactccagcttggacaacaagagtgaaactccatctcaaaaaaaaaaaaaaaagaaaaaaaaaacaaatttatatgtatctatgtaaatagaggggcctcctcttccctgagccttgaacagacagcagaccctggaccttgcatacataggagctggttctatgtccccaggacttgtctgcctttagctacccttagggacaaacctacctcctcaccatgtactctcccaccaattcaacatggactgtgatgtcttgacaatggaaggatgtcttactccttacacatgggctgagttcacatcccatttaagactttgtatatgccttttccaaatggttttctttgtccaaggccctaacatttatctcctttcctaacattgcgctgtggcgctgtgacctaacaatgggccactgtgttctgccatcattttggaaaaacttctctaacaaccatcattcttatttctcacctcttaggatcattggcctcattgagatcttcacgaaggctatagacccgtgctgtccactatggtagcactaactacttatagctattcaagtttaaaattaaattaaaggctgaggcaggaggatcacttgagctcaggagttcgagaccagcctgggcaacatggcaaaatcctgtcactatcaaaaatacaaggaattagctgggcgtggtggcgtgcacctgtggtcccagctactcaggaggctgaggtgggaggaccacttgagttaaggaggcagaggttgcagtaagccaagatcataccactgcactacagcctgagtgacagtgagaccccatctcaaaaataattaattaattaaaatttaagactcagttcttcagtcacaatagctagatttcaagttgcagccacaagtggttagtggcttctgtatttgatagcacagatatggaacctttttctttatctcagaaagttctatcagacagtcctgcctagaggcattgaccctctctccagaatatgcaaatatgtactcatattaaaaatgttgtaggcaattttaggtgattcaaagacactccccacttcctaagcccacctccccaaggtgttaggaacccctttctgatgtgggtgggggctgggcatagtggctcatgcctgtaattcccacactttgggaggctgaggcgggcagatcacttaaggtcagaagtttgagaccagcctggccagtatggtgaacccgtctctactaaaaacacaaaaattagccagaagtggtggcacatgcctgtagtccccactacttggtaggctgaggcaggagaatctcttgaacctgggaggtggaggtttcagtgagccgagatagcaccactgcacttcagcctgaatgacagagtgggactctgtctcaaaaataataataatatggatggggagcacatgactctcctaaagtctatggaggaggcaggtatcaggaaaatctcagttcagatgtcagtaatccttttcccttaacacacagtcttaagcacctgctggttccttgagagtttaaaaagaaacctagctgttcattacattgccccattcatcctgttagtttcattcattcacttattcaatatttattgagctcctactttacgctcatactgacctaggcaatgggatacaaaagtgaactcaatggagaagatcccttccctcatggagcttatattcttgtaggacagaaagacaaccaacaaacaagcaggtaatgctctctgctctataaacttagttttctccaattaatttcaaatctatttctgtaagcctgaacatgttaattctctgcttaaagacattccctcctgactaggagagttgattaaaaccacctgtgggagttaaagatctacatctgccaaatgcactgaaggtgatccacaaactaaattaaaatttggccactctccaaagtcaaggccataatctacctttctcatgagacagttctgtctgtaaatagttgggattataacaccctcactttcaaggtaaattccagggtattttatctcctaatttccagattgtttttgattgtgtaagcacatagaagacctcacaccaggtaaagtttctaaagtttacttcaagctacctctgttacatgatttttgcgtgggtaatccgagatctgcttcttaattgtcaactccacttggaattgttccaatgtttgccagtgttctgttatgttcttttctccttgtccagcttaatgacagctgtttttcttcaaaaacaatgtttcttcaaaaataatgtttgggtaaggcccgagttgggatgacattttctcttaatataatttgcattcttaaaatcaaacacattaccagcagattggcttaactgaacacatgcacgtatatataagaaaccatgtcctttctttccttgacccaaagttttgtatttcaccacactggccaactcccaaaagttgaactgaaatcaaagaattggttcattctaagatggctggatatatatatatatatatatatatatatatatatatatatatatattcatctctatctatcttcctcctattctttttcccatatcacacaaaacacaaacacagacacattctgggtttacttggtactgccagtcctcaggctgactagaagactgaggaaaatttgaaagacaagagatctatctacagtctttcctaacttcctagtccctttaccagatttttccatgaggatttgtcttccttttttccttgaggaagccaactcttgagggctacaaaacacttatttcagcatgtgtctctaaaagataagaacatttgataaatataaccacactaccattaccacatcaaaaaaaaaaaacagttattctttaagagcaaacatcgaggcagtgttcctaatggtttcataatgtcaaatgtttactggctttttaaaacaaattcaaaatacacataagttccacaccttgtaattggttattatgtctttcaagtctctttaaatgtgtaggtcttctctccatctctttctttccttgaaacttatttattaaagaaactcagttgtttgttcagaagcatttcccatggctgaattttgcataatatatcttcatgttgcaggtcaacattcacaggattctcagattcagttggaggcatgtttgattatctacactttaagtcatcaagtaatttgaatatattaatataaatcccataggctctttttcccactccagatgattcctccaataacctttcattcagtaagttccccgttgtaaatttccagttaagtaattctctttaggtttgatgggtgcgcacaacgaagaaaaggggggacagggaaacctttctgaaattcatttcctttgaatatatccattagagggcgacattgcctttaatattatatttccccaataaagttttaaattgcataaaatttacttttgtatttttgacaagttggacctcattgcctactttaatttctaatctcacgtctgtaaagtgtgactgcgttctcctttgttagtttgatctctgctgacttgcgtctttggtattacagtacttccatctttgactctgttcccaattctaaccatcgggcggcgatgttgcataaataaagacccgcggaaaggcaaaattaagcgaaactgccaaataaaaagcagtttcaccgggggtaaaggccattaatttaagaaggaaagagacaaaccagacatttctagttcatatccaactcacggcccaaggtcagaactgtgtaaaatgcaacacaaaggagccattcaggagtgggggaggctgacttggggagagcgaatgcacaatccccgccttgagcctgcggttccactggagggggcacaggtccgttcgcgcacgtgcgtgtgagtagccacagggcagcggcgggacatgcctgcaccgggcatgggactgctgaaccaacagcgctctggcggaccgtttgggacacccgcccggaggcaggttggcactggcgctgcctggaggtcagccactcattgtaccccggaggaactgggtcccgcgggggcatacggctcgcccaccggcacgcgttaggaggcgaacacctgcatccagctaggtgttccgagctcagcccagggcgagggactgctctgccaccttcttctcattcttcctgtaagaacactgtctatctcggacaaaaaggacccacctgacagcaagtggtatcgtcacacagaggtaacagggaagtcacggatcctcttgagaatctgacaaaagttggtgccccttccccatagtggcactcagaaaactgcaggtgaaactacaaatgggcggaggcactcacaggcttcctggggcccgtccattgatcagataccaggttaagaaattctgtccttattggagcctagacggcagcgcaaaggaaccagacggacttggaaagagaggcagggactccctcctccctccaaacacagccagcgtttcatctcggattgcgggaggggcctggcggaaggtggaggagaggtggagcgcctggatggggccctccccattctcctggccccaaccccaggacgcctggctgcggagggctcgaaagcgagcagcgaacgcccaaagcctgggtggcgggaaggtggcagcgccctgtagcttttcctttgcatttttctttaaatcgtgagctccggagctatcgtttcgaccgctgctttccggtctccacctccacctcccagttggctggctcgcccttcccccacccccccatcccccccatccccccccatccccacccccatcccagccgcgtgcccgaccctcggcctccagccccgcctccttcgccgcggggtttaacccgaggcagagtgaaatctgcatagtgaccgccccctcggagatcattggtgcagccccgcccatcgcggccggtgattggtaagccgcccggggttatttgcatgtcggacgcagccgggtacccagctgtgctgccggccggcgcagcgcagaagtttgcagagcgctttctcgccggctggtcccggactcgcgctgcgccctgcgccctgcgccgccgcctcctccttctgccgccgccgccctgttctcccgggattccttctctgtggaggactgactctctgcttgtgggaattagaggtggacaagggggagtgccggggggtagcgacggggttctttccagtggcagctgcgagtcgggacgccgggagcgtggggctcctgctggccacggatctcggccaccttcccgcggcctccgggcaggcaatgcggccgccgagccccgcgacgcagagaggaaggagggtggcccggagggcctagagcttgtttctgcccacttgggaaagagggcatggagttgtgagtgcccctcgctcggcgacgccgccctcggcaggctccccatggccgggacgtacagctcgactctgaagacgctggaggacttgaccttggactccgggtatggggccggggactcgtgccgctcgctcagcctctcgtcctccaagtccaactcgcaggcgctcaactcttcggcgcagcagcaccgcggggcggcctggtggtgctactccggctccatgaacagccgccacaacagctgggacacggtgaacacggtgctgcccgaggaccccgaagtggccgacctcttctcgcgctgtccgcggctccccgagctggaggagttcccctggaccgaaggagacgtggcccgggtgctccgcaaaggcgctggcggccggcggctgccccagttctccgccgaggcggtgaggcgcctggccgggctgctccgcagggcactgatccgcgtggcccgcgaggcgcagcgcctgagcgtgctgcacgccaagtgcacccgctttgaggtgcagagcgccgtgcgcctggtgcacagctgggcgctggccgagagctgcgcgctggcagccgtcaaggcgctgtccctgtacagcatgagcgccggcgacgggctgcgccggggcaagtccgcgcgctgcggcctcaccttctcagtgggtcgctttttccgctggatggtggacacccgaatctccgtgcgcatccacgagtacgcagccatctccctcaccgcctgcatggagaacctggtggaggagatccgggccagggtgatggccagccacagccctgatggcggaggggccggaggcggggaggtgtctgctgaggccctggagatggtcatcaacaacgacgccgagctctggggcgtcttgcagccctatgagcatctcatctgcggcaagaacgccaatggtaagcgcgcgggcctcggactggcagactgggtaggcaagaaatcccgccctgggctactgggggagtgaatttcctgagacaaagctggtggctgtgccagttctttgggagaaaacgtttggtctgaggatagggttcattacatggcacttgccagagattgttctaagggtgtctgacttttggagggtaaacttgtgaatgatctccatcctgttctgcgtggcattgttactatctgcgggctgttcattgattgggtgagattgaatctcttgaccaagccattcctgaacctctcttgaaatgaaacttactgccccgtggctctttaccgtgattgactaggtctctagctgctgtctttccccaacagctggttagattgactgattctgccccctagttttccccagctcaatagcagcaaccaaagggtcccaacttaaagacctgaaccttggataagtaagatgggcggagggaagtgggaagcccaagatctggtgctgcgccttgtgctttgctgggctgaaggatgctgtcaggcgctctcttgggggatggaggggtagtggttcgctcttacctatatgtgcccaggaatgatgaaacctggggaccccgactccccttcccagaaaagtaaccacagattgtctcctgagacctgatttttccaagctgtcaccaaccaagtgagccattggttaaaaccttgcattgtattaaatgttctttcctgaaaagagtggtggcccatcaaggggaagagataggtaaccgcatggggtcaagtctgggaaaggaaccattgggtggttgcacttccctgaagatagcatggatttggtgcaaaggatggaaacaaagcacatgaccttttccctgacaatgttagggggtgtgacattgcattcaactgcaaactacctacaagacttcagtttgagaagtcagcaccataaactgttcagaatggtattatggttaaacagccttacgatctgattggaaggccatttggggggcagctttcagtggcaaataagcaggcagtggaagaggtcaggtggggactggaaagggataaaagaagtcaaaacatggtttaacataatcataatagctgaaatgcaaaataacccttaatgtgtcgtcattattctcagcactttgtatttaactcaagtactcctagcaagcctattaggtaggtacttactgcatagtatgatgcccattttacagataaggaaaccaaggtacccagcagttaaataatctgcccaacattacatagatgttaaatggcaaaactggaatttgaatccagtttgaatccaggtaggcccctttaaggttctagatgctggtggagaagaaacagctttgtttttctggtttgttgttgttgtttgtttgtttgtttttcttactggactatagctctcagatcttatgctttgttttttgattagcccagttttcgagaacagttgacatgttaggcccattttgaagacactctgtaccaagcatggcttactttgacattattggttttgtttttaaattctggcactgccaaaggagatgctgggaattgaagagcatctgctgcttaattttcttcctcttaggtcagagctaaggtcagtcctgaatctcagttgatgatgtcacagctgcttgttgtgcctcaccctccaggtttgtggcatcaacactgggaacagcagctccagggcaggaagtggagggccaggggatttccatctccagtggtcataattgagggaaagagttctgtacttttggctgagaggaggcccaaactgaactcaaagaagtaaaggcaggctcctaggagaaaagactgaagacctaaccctataagccaaacaagaataagggtggaactgtaaatgcaaaacaaaacaaaaacatatattcatgcagaacaggtgcccagcacattgagaagcttctcccagcttttctaactgcaaattgaaataaggaagaccaactccctgcccaggacaccctgaagatgcgaagtggccagaagctgctagaaaacagatgtcttctgctaaagggcttccaaccaaagaactatttcttatctagggtcagcattccttgggatttcctttataagttggtcttttggcaccacctacccccccacccccaccccccagctccaccaccaccttttgtttttttaaatagagacagggttttgctatgttgcccaggctggtttcaaactcctgggctccagcagtcctcctgcctcggcctctcaaaatgttgggattacaggcgacaggcgtgagccaccacactcagccacgaccccatgttttaacctcctccttgccccccctttccaaacaatcctccttaatcctgggtagtcaagagagcaggattctctgtggcagacaacaaagctccccggatgctcagagtcaaagtgtctccctctgtaccttctcgggtctccagggaactctcttgcaggcgaggtgaccattcacttccacttagcaactggatgctcattttttatacatgaaaaccagggggtggccacattaaacaataaccaggctgatttattaagtccctttagacaaagtgaaatgaatgtttagtagaggggcaatgaattacttatgtctgaaagctggcttcagagggaagcatacactgcttaggaacaaaatggagtggtccaaacctttgttatattaaaattaccccaaggccagcaaggtaacggtttacacagctgaagaccaactggggaatgactgcgtatgggaaggagagtgctggttagaattcttgtcctgctggtcttccctttaaattataaatttattgttgatatgcctgctaattatacagcatgggcacatgcatttgactcagctatatagggcttttaaacttaatgtcttccaaccaagaatttaagggccgtaatccatctattcctgtccattactcagaatgcaggacaaatatggttttgctcagcacaagatggataataaaagttctgcagtgtttacaaaacatgatcccagctccgtagagcagcaggagttatatattgttgctcatttggtattgatgtccccaatcccatggcaaggccattaaatgatgatatcttcatgacttccttacgggaggtagagaaaccaatttaatagagcagtatttataaacaggtagtttgcacaaaatagaaacttttcgcatccactcatatccctccctactctcctctctcctctctctccctcctctcccccatcacttcccataggtgagtttgatgctgagcatcactactaggtttcttcttggtcattcttcttactaagcttttgtgagtgtctgtggcattttagaaaatcttcctcaatttctagattcttgattaagtgataggatattggtgagaatattcttgctccaaagaagtatccagggtgtacaaaaggattgctctatcctagtggtaacatgcacaagactttggattcaccatgagagtttgaagcctacctttgccatttattttgttttattttgttatttgtttattttgagacagagtcttgctgtatcacccaggctggagtgcagtggtaaaatcgtagttcactgcaaccttgaactcctgggttctaagggttcctcctgcctcagcctcccaagtggctgggactgcaggcatatgccaccacacccagctaatttttaaaattttatttttgtagagacagggtcttgctatgttgcccaggctggccttaaactcctgggctcaagggattctcccgcttcagcctcccagagtgctgggattacaggcatgacccatcatgcctggccatacacaactttgccatttacatgagtggcctggtgcaattttcttaaccattctaaccttcaattttgtcatctgcaaaatgggacatagtaagagcacctagcttatatgggtggtatgagaattaaatgagactatagattgaaagatcttagcacatagtaaatgctcaataaatagtaaattcattcaacaattattgagcactgaccctgtacccaccactgttaaaagtgctgtggactaagtgatgaacaaggggaaaagccctcctctcatgaagtttataatccagtggaggaaatgagaaaaagtaaataagcaaggattttctcttggtaatgagtgttgtttaaaatattttttttaaagggcagggtaatgggatggtgtgacggggctaatttaaatgacagtcaaggaatgcttctctgaaggtttattagtaatagccagtaatatcaatactactaaggacctttaggccaaaaatagtgactgaggacttttctgaatgattcagttattcaccagctgagagaagtctcaacatctcacttagagctgagaaagaaaagggctgcatgtagagcagggacgaaacctcttctggttgtgggatttatttagtgatgagattgtaggatgaatttctactgagagaagcaactgaagcagcaagggttgattgagcttgtcaggtggtgtttaatcagtttccacacctgggtagtctgaaggatgagggctgcttcctatctctttaaccattttattaaagccaagagagttggtaaaactgaaacagagcaagctttggaaatgaaaaatttttttttctcgcacgcctgagaaaggcaaccctagccttaagtagtaagaggaacaaggtagagttgttccacttcctcctactgaaagctctacctgactcccccagctggaagagccacccctttgtgatgtttcctcagcacccaggacatattcttaaatcatttcctgcttgtgtgtgtctctcccataaaactgtgcacttcataggcattgctgtcttccctgtacctctcatggtgtctacaatatgtgctctataaatgatgggcaaatgatagatcccgccatacaggtttaaaatttgtatttgaattcctttgatatatcagaaccgtccccatttctaccaaggcagaaaatttccaagttgttctcaatgaatagagtcagcattttggggctacatccaacctttgggtaccctgctttctagcagggttcccaagtctggctttgatgtgcaagatgtgagttgggggaattttcagtttaggagaatgtcttcagtgtacaatacccaagaggaagggcttcacaacagacgtctggtacagcaggccacagaaaagtcaacaggaggattgagttgaaggtttccttaagaatggaaataccaaccgcccccttgccaacagagctgccccagaggacaatttatgttgatgactattgctcagaagagtttacatctgtgtcccactccatctgcctccagtctgaggactgaaccaaggtaatcaattgccaagacattcctgggttggcatcccaagaatgggaagttctgaaacaaaccagagacacttggttgcacatcctcagctttgtccttatcccacctcaccatcagtattcatcctttgtccgacaggtcagtgggtagatgcttcgcctctatttctactcttatgcagctgtagtaataggtctgacttttccacaacacctcaagcttattctcatctgtgagctttctaggtccccatgagaatcctgtgaatgtgtgtcctttcactgagaggtctccatgagtccagaattcacagctcaataataactaagctcaataatgactaagtcccattttgctcaagccccaggcctgtgcttttcctataaagaattacagaatccaaggtagcaaatacaggtcagtacttggccccattcagatggcagctagggtcaaactcatagcaagaacaacacttgttataggtcttgtttgttaatggcctatggtgtccagacactttacatttgttaggccagtgagtgttcacgaccacagtgaaagagcaggcactgacacccaggggtgtatcttcctccaaaggttgctgttactctgtttaaatgctgcttgctggctctccccaccctagaggtgccactgattttaaagagccattattgctgctcctggggatggaagaagagggcacagagagctctgctgcccagggagggcctttataagtgtcacctgctggtgaccaataagctcagctgaatagagaagccgcagagtacactgcgatgctcttctaaaggatgggcgggtcagctcagcaaaggctaatacatgaaggagagaaggcaccaagagggatttgagtctaggtcactggtcttggggagcttggtgcacctgtcctggagttggcagaagagcctgtatgaagggggctttgatttcctccgagtcccccatggtgtccggctgctgactccatctcggtgtttagagcacagggagagaatgagtcagcgatgtagcaaagcagtgaagggcccagactttggagtctgaattgagtcccagattgatttgcctcttactgacctaggccttcaagcaagtcacactatgtttctatttcctctactgtaaaatgagaggcttgtacacatgcggttgtgccttatgcatactcagtgccctgggatgtgagagatgcagccaggcttactggtgagagcacagcacggggtggggctgcctggctgtaattcctcataacttcacttgggagctgtgtgaccctgggcaagttgtttcacttccgtgccttagtttcttccttgatcacagggcaccattgacattttggactggttaatgttttgtcatgaggttgtcttgggcattgtaggatgcttcatagccaccaccagttgagaccatcaaaaatgtctccagacttttccagatgttccctggggagcaaattcacccttggctgtgaaacacagctctataagataggactgaaaatagtacccaactcataggatggttgtgagaatttcataagagtccctgtgagggactttgtgttatgcctgacacataagatattctaattgtttttaacaaacttgtgttggatccactgattgtgttcatttttgccaaagtctctggtgcaaggagggtcacgacccaaatctcagggagatgggtattactcgcaaggctttccttggtggctaacagtttgtttgtggaggtaggaggaagttatggaatctggaaaagcacccttgcaccttgctcagttatggctcgattacccccaacaacaagtggtctggcagtgggcagagagattagatctcaccctctgagctcaagcccacctctgccaggatgacagcaagagtgcacattcaaagctccaggcccccagagagcaattctcctgtggatattggaccctgcttgtggcagccgccaaatcctcagccacagatcatagcaggtgttttgtgttttgctggcctgtcatgtaaacacactttgtggtcttcctgcttgttttaaaaaaggcctaagtgcttttgcagctttggttgtgtgcttggagctgcatgcaggattgggaggagatacataaggaacacagcccaagtactcctgaggaatgccatgccggcatcattaatcaactgctcactgagtgccagctacatccaaggcaatggagacagattagcaagggacaagaatcttgactgttttgagtttagaagtgtttagaatctagtagggaaagcaaagcatatatacagatagttacaaagaagtttatagtgaccaccttcaaacaaagaggggagcaatggcgatagactccactgtctagtcttcattgctggttccccattgcgggtgcttttcaggagctgtttcatttaatcctcccagctcctctggaaggtagatataacttccatcccatagttggggaccttaaagcttctggtgattagaaagcttaaagggaagagatgactcctggctgtctgggtggaaggaagtcagggtttctttgtggaggatgtggcaggtgtgccagtgatttgggcaggtagagctgcgactgcggagatgggaggggatgcagagcccccagaggcttccaggcagagggaacagtgtgagcaaagacctggaagccaacgcatatgtgttggagaacagcaagttctcctgtttgggtggaaggttcagatacatgacaagcaggaacagtggagataacacaggaaaaaggaaagctttcccacatcttttatccagatgttaagaagcctgccagagtacaggatgagagttttccaaaacttattttcataattcagaaattgagtgtgtcttctccctagctcatcttaaccatggccccagacctccaattactcctcttggtgattgaaagcttgacctcaaaaatgcacccgtctgctgtcctagcagtaaaagcattaaaagaagaccttaactgagcaaacttgggttgtgaggggttgaagaacaaggcttctatcaacccttcttttcttgttgaatttggctctgactttgcatttcttccgtggccctgaatgtagcattacaggccaaagcaatcccagtacagaatgaaggtcaagactggcaaatgtgttaaacgaggccattggatcgactcttgccaaagcaggattcttaatcgtggagcataaaacagggtgagagaagatggtcccagaacttttttttttcggtgttaagtccgactgatgtatacgatattcgacttccagtttagggtttattattttggacaataaaagctcaattctcagagatgctgacattttaattcttagttaatgtgtttccagagcattgataataaagatttcaagcatattaaatgcttaatattgtggaaccaccttatagctaattgtcttctgaattggagtccctaaggtgcagctgaattctgctgataataataaaatgtgataggtcatcaatggcttagctaataactcaggtgtcggtctttttccggactccagtgttatgaagggaaggaattttcttgtcacttgacaaagataaacttcatgaacatattgcaaaaatacatacacagtcatttgtagttagtgacttgaggcccacagtttcctttctttctttatttttattattatttttttgacacaaagtctcactctgtcacccaggttggagtgcagtgccgcgatctcagctcactgcagcctcctccttccaggttcaagcaattcttctgcctcagcctctcagttagctgagattataggcaggcaccaccacacctggctaattttcatatttttagtagagacagggtttcaccatgttggccaggctggtctcgaactcctgacctcaagcgatctgcccgccgtggcctcccaaagtgctgggattacaggcatgagccaccatgcccggcccatggtttgctttctaaaagtaagctgaggagagtcaggcccatgatggaaaaattaaacaagaaaactaaacttggaagcctggacatacaaggttagagttgaggagacattaaactggacctcaaagaggttgaaatgggcctctcagtgcacgaaaaccctccctacagttgaggccaagcttttattgaaacctttacaactttttttagtctgtacattttaaaatatgaaaattagtatttgctgtgaggagagctattaataaacacaagcctgaggctcacacaccaagtgggtgtacgtgcacaagcatccggaacaatccagtacagagctatgaggatttggatccagaaaattctggggtggagcttgccccgtctgtgacctggcatgaatcattccatctcttggatctctgtttccttatctgtggtgtggagaggtcagactagattccccaagggcttttctgtctctgatagtgtttctagaccccacatggacactgtgcagtcattttcctaaggtcgagcgctgtaattagtatccttgggaaagaaacacccaggatggtgctggacgagctctttgaagacctggcttggtaatagggctggacactgtctttttaatattaagattaattgtgattactgtactcagggttttcctgtgcccctttccccagaaagatgagtgctacatgcttttggccgacctcatgcttcagtgcttgacagctgcatccaggtcctggcaggccggcactgtggtgagatccagctccgaggtgacttcatatagcatgtgcttgaagcccgcctacccagacttggatatttatagcaggggagcagctagaaaaaaaaaattaaatatgctacacccttctttatacgatgtgggacagagacaggcattgtgaggaatttcaaaggcagagctgtataatccagcaggatatttttaaatgctgtttgttgccattggcagggccggtgtttcaaagaggagggaaaatgagagtaactgaggatgacaggctgccaggaatgctgaaggccgagacatggagctccatgctccgaggtatacaggctctgaaccctgatgtacttcacagtcacatagcttgaatagggcttgggcaggtcagtatgagaggctggggaaatggggtggcttgcctgtttctcttccccaaccggcccatctacccgtcaaatcccaagttgaaaattgatgaaatcttctggagaggcagaacatatggcaaaaaaagagttgcttttgtgaaagccagggacctggttgtttcttcttcagcccatctcagcagccgggtaattaaagttgtacatggggacacaatttggaagcaagttgcttgcagctgttcttctggacttaatccacttgagtaccagctgggcaggccaggactatgctgggacccaattcagtagcaggtgagaaggcctcaggggtagggctgcctctgagaaggcatcgcaatgtcccccacctgtccagtgggtgcttgtaaagtattctaagtagtgttttctaccacactggtctttgaggagacaaatgatgatggcgggggtggggagtctgaggactgtgtaggggagaggccaggagttctgtttgggttacatccgtttgttcacccaacaaatatttattgaggactgtgtgctgggcactgttccaggagctggtgatgcaacaaatgaataaaaggggcctgaaggagggcagggtgcaggccctgtggataatgaggcagagtgaggggaatcacctgaggccagcctggctggagaagacagctctaggcagagggaatagcaagcattcctggtgggttcaaggagccaccaaggagaagctccttccgtgtggctggggcgagtgtagcaggagatgtggttggagaggaaatggtggggtggttagtggggtaggccattgggtaataattcattggcttttagttctgagtaagctgaaaagcattggagggactcaagcacagagtgacttgatctgatttgtatttccacaaggtcactctctctattgtgttggaaattgactttagtatcaagtgtggacgcagcgggaccagccactggcacttgccaacagcttggatgtgtgaggtatgagagaggaatcaaggatgacaccaagttgctatggtctgagccctggaaggagggagtggccattgactgaagtggggaaagctatgtatggaagaagcaggactgcaccaaagatcctagtgcggttttagttgtctgtctcaaatcacatacagatatcaaataggttgggccgggcacagtgactcacacctgtaatcctagcaccttaggaggctgaggcaggtggatggcttgagtccaggagttcgagatcagaccgggcaacacggtgaaaccccgtttctacaaaaaaatacaaaaactagccaggtataatggtgcacatctgtggccccagctacttgggaggctgaggtgagaggattgcttgagcccaggaggcagaggttgcagtaagccggtatcacaccactgcatgcactccagcctgggcaacagagtgagaccctgtctccgaaaaacaaataggaagttggctgggagacaggccaccttgaacttcattagtcatatgatggattgaaatattgcccttctttgcccttccagagggtgggctcagtatagcagggctgcatagagactcagacaatagagatttaattttcagtcttacgatctttggctgatggccataaaagcccctgaattttgctttccagcttctttgtaggcagccagcagcctttaataaagatcatcaactctgttgtttcctgtcattaaaatgggggctgtttaattagtccaattgttctgtggatcattgtgactttgcgtctgtgtccttcaattctgggaaagcaagactccatttttcaggcagctttggattcctggaggtcaagtgtgggtctgaaatttggccggaaaaagaacgctcttaggtggcttgagaaggcatggggcctggagtggtgtccgaatggtttgggagtatccaaccgcctgttggatgctttgacctcggctgctcaggaggggcagggtgcaaagcctggctaagagatggggtctgaaggagttgtcactgtctgattgccagctagatagctgaggtctctgccctcagttttcctcttctgttaaatggggttgccatagttcctagctgatagggttgttgtttcagtggttttcaatcctagattcacgttagtattatctggatagcttaaaaataaaagtgtcagccaggcatggtggctcaagcctgtaatcccaacgctttgggaggccaaggcaggcagatcacctgaggccaggagttcgagaccagcctggccaacttggtgaaaccctgtctctactaaaaatacagaaatgaggcggtgtggtggcaggcgcctgtaatcccagctactcgggagactgagacaggagaactacctgaccctgggaggcagaggttgcagtgagcgcagatcacaccaccacactccagcctgagcaacagagcgagactctgtctcaaaagaaaaaaagtgtgtgtatgtgtgtgtgtgtctgtctgtctgtcttaaggccctacctccagatattctgaaataaatggtctggcatggggcccagaccatgtgggtagcattcctgggagagcctggtatgtagtgaggatgcagacattaactattattagtggtaaaagcatccttgttctggagtatgtcttttcgccccacctaggatggtgactttccttcatttcacagccacagcagctttggctaactcatctagagggatcaccaaagaacactcaagagaagcttgaactgttaggtttacatggaaagggcatggctagatctaaaatgggagcaacatattagcccagagtgctggcgcacacctgtaatcccagctactcgggaggctgaggcagcaggatcgcttgaactcaggatgcggaggttgcagtgagccaagatcgcaccactgccctccagcctgggtgacagagtgagactccatctcaaaaaatgaatgaatgaatgaacgaataaataaataaataaataaataaataaataaataaataaatgaaatgggagtgacaccataagatgttatttgccccactggtaaatgaagtgaatactgtgattcccatctttaagatgaagaaacaaagtcacagagaggtttggtagcttgctcacggtcatgcaggtaataagtggtggtccaggcagtcttacccctgattctctactcttcaaccatgtgtgttccctccccagccagagaagccaagagactgaattctcaactctgatacccagcacagacctaccgtgggtcaaacttttacgaagcaccagaccccggcccatgtgcttcacatgtattatatcatgtgattcttaccatcatatatactcttactcccattttgctgctgaaaaacaagctcagagaagttcaggtgacatagctagtcaatgacacagccgggctctttgagctctgaagtcctcatttgccctgtggcctcctgtcctcaggagtggcctgggtggggacgaagcacatgcagtgatttcctgagcaaagaaatgaatgggttggcccaagaggacaagaggaactgaagcaaggccaaagcatccctcactgcatctcaacaactgagccactgggggcctgaaaatagtaacattgcccagtagggtggccagccagctgcgcctgagaactgtggggtaggtatttgtttctctgcgtgtttaaagataataccgtatgaagcacattgtttctcttctgttagtgtgaatgaaattgcctctgaaaggttgtgtgtattggttgcttaaaatagctcaagaggaagaatgtttggaagctgttagctccttgagtctatttccttgatttatgataccttggagagtgtgggacctcttcttgtttacccttctggctttttctttctaccgtgtttgagtccttgtgtcatcataagccaaaggcatttgtcaccagaaaatgtggcaacctttcctaagtaatttaatgggggaccctttacacgtttaatctttttccttaaagggaggaaaatggggagaggtcatttgttttggaaatggccatttctctcttccagctgaaaacgttccaagatcagagcaatggcatttgcttgggagtaagaaaaatttgttttatttttccgttcacactgaggcctggcctgggaactcatgagtttttgtagaacttccatcttgtggtgcccaggagacctgacaagctgtgagtgagaggagccacagagctgctctgttcaatacggcagccacttgccacaggtgtatatttaaatgtattcaaattcgataaggttaaaaaaaaccatttcctcagtcatgcaagtcacatttcttgtgctccctcgtcatatgtggctagtggctaccatattggacaatgcagatatagaacatttccatcatcgcagacagttctgtgcaacaatacagccattagagtgggtcagtggtgggtcgcttggggccagctttctgggttttcacaggtctaaaaatttcaaccattccccagcttctcagaagccctctgtttgcagaaacaagaagattcatggaaatggagattaaggccattggttcttgtggctctaacctctggacccttgacacaaggtcgggttttatcatttccaagctgcgtggcctcaggcaagtcacttagcccctctcaagttgtttcctcgtcagcaaaatggtgttttaaaaaatacctcccagggatgatgtgactatttaaacaaaataacaaaatgtatataaaacagttagcataaggcttggcacacagtaagaacttagatgtgttacaatgttttacctgcattttcttctttgagccacacagtatcccgcagaggtagatactgttgctgatttcaagatgatggaaggggctttagggagtgctattgctaccatcactgccactgttcctactgttgatattcctaggcttgggttctgctttttcctctaaggctcatctttcctactgagcttgttgactggcttcttgtcataaatcagaggatgtttgtttgtttgaactaggaggtcttctgagctttcattcagggactgtttcttccaccatgggaggtgagctctttcagaggtgtttgcctaaagctggcctattggtatctacctggagagccgccacctggacagctactgccaggatctggggctccttggaacttgaggttaaagtttttagtgcttcacatgacctgtggtcctttggctgagtctaacagaggcttcactgagatcttagctgagggtggctttgggaggagtatctctgagaagagtaggaccaaaagagtcctctcttgagctgtagaaaggatccttctgaaaagatatttggtcacacctgggtcctgggttggttcgcaccttgactcccccagtcacttggctagatcatatagctaattatttaactttgcaatacctcaatcttctcatctgcgaaatggcgattatactaaaactacctggcaggctggttgtgcgaattaaatgggatgatgctaagtaaagcatttagcccagcacatggcaggtagcagccaccaggtatgagctactgttgccatcttcattattgttgcttcccagcaatggcatttggtgcactattttttcacgtattgttcgcattttctccttgagaatgtcttatctgtctagtcagaaaaagcgacccagaaggggtttagtgtgtaaagtgagtgtctaagttaaacttgcatattatggactctgtgtggtcttttattcttccttcttcccttcccttccttcctgtccttttttctttttttgtttttgtttgtttgtttgtttgtttggaggatggtggggctaagaagcatactgtgcagttatcataaagcatgactgtgcagttgtcattctggtaccccacatggtgaccagcctgcctccttcctgctggttccagctgtataacaagctaacaagcaccacccagtcaaacagtgtaatcagagctggattatttctataggattaatttgtggtgtgaagtgctcatgtatttatgcaattgccactcgtttgccaacatccagaatgtgctaaatctgccactagtgatgaaatccaaataacttggaatcatatgtagggaatccagtaattttcatcaccattgttacaagagaggagtttaaactgggggaatccaaatggcaccgagaaatgatgatatccctgctttccagggatgattctactcagggaagcaccaatctcaaagagaaaacaggaaggacacaaggccaggatattgcatgattgtgttgccattggtgtaactgggtcctcactgagggccctcccaggcgaccacaccatcgtcttttgtgaggcttctctggcactgacagatcactcatagttaatgggtaactcagactcttcttgccaaatagttgctttgtttgttatctgtgctgtggtcgccttcattgtccccacagcccctcaggcctcagaaggatgtggtgtggagtggggtgtggtgacctctagcatgagcccacacacttcttcccctttcccttaagtcactcattgccggagctggctggttgcagaaacatcttgaagcactttaaaaattgatgttctagactgggtgcaggttctcacacctgtaatcctagcactttgggaggcctaggtgggaggatcacttgtggccaggcgttggagaccagcctggtcaagatgacgagaaatggtgttttaaaaaatacctcccagggatgatgtgactaaacaaaatagcaaaatgtatataaaacagttaacataaggcttggcacacagtaagaacttagatgtgttacaatgttttacctgcattttctcctttgagccacacagtatcctgcagaggtagatactgttgctgatttcaagacgatggaaggggctttagggagtgctcttgctaccatcactgccactgttgctactgttgatattcctaggcttaggttctgcttttttcctccaaggctgatgagaccctgtctctatataaaagtaatagtaataaataagttttgaaaataacattagtattctggaacccaccctgaatctattaagtgaaaacctgtaaaagtggggctaagacatctgtttttttgttttgttttgagaggaagtctccctctgtcatccaggctggagtatagtggtgtgatctcagctcactgcaagccttgccccggttcaagtgattctgccacctcagcctcccaagtagctgggactgcaggtgcaccccaccacgcccggctaattttttttttttttgtacttttagtagagatggggtttcaccatgttggccaggctggtctcaaactcttaacctcaagtgatctacccacctcgacctcccaaagtgccaggattacaggtgtgagccgccattcccgaccagaacatctgtattttttttttcttttcttttttgagaagtggtctcactctgtcacccagactggagtgcagtggtgcagtctcagctcattgcaacctccatctcctgagttcaagcaattctcctccctcagcctcctaagtagctgggattacaggcatgcgccaccacacccagctaatttctgtacttttcatggagacagggtttcaccatgttggccaggctggtcttgaactcctgatctcaggtgatccaccctccttggcctcccaaagtgctggaattacaggtgtgagccactgtgcctggccgacatctgtatttttaaagcaactcttgcggcgattctagataaacgggcaggtttgtgaattccatctacatcactgggggtggattttattctgcgctcctctcacagtatgtatggggcaaaggaccctcttgaggatgtacagtttgggaaaggccagtctttgagggtcttctctgtgggtggtaagatggagatcatggttagggtgatttgagtagggggaggtggggagaggtgttagaaagataaccaatgtttattggatgctatctcgtttaatttttccaaccaaatgtgatgagtcggtggtgataaaaatataggttgttatttgccgaatgcctactatgaggtgagcaggacactagtgatttgcatgcagtatcttgtggaatcctcactacagcctgtgagctgtaggtcacattatttatcctcattttacaaatgaggaaactgaggccttgagatagttgaaatgacttgctcgaggtcacccatacacacaagtagcagagccagcgtttgagattagtactgtcagacttcaaagcccacgttttccatgctgaaagttttaatcaaaagcattaggctattgggtcaaataagaatcctgcattataagtacagtgtcagaattttttgagaaagctgcttgtgccatctttcctcaaggtacggccctttggcctttccagtcctggctttgagaaccttgttatttccctaggctgagaccagcagccagtcagctgtgcccgtcctaaggctgtctgtgttgtggtctgctgttcctcctcctcaacccctgcctccttccctacacagcccctgcatgcaactcttctccccagacaggcgcagaatcggggccttcctcaacaaataagccaggttccggaagtgctgcagtttccacccaggtgcaagcccagcacaggcctcctcttagccagcactcatccgaatccactcacttgcactcaggtggttgtcctcctcagtaaactgagaagcagtagggccttgtgattgacggtgtgggtatgaagctggactgcctgcattcaaatcttggctccacttcttcttggacaaattacttcatatctcggtgcctcagtttacttgtctgtaagatagggataatcctgtttccctcatatgatagttgtggacaagattaaatgaactacacctcgtaaaatgcttggaacaggacctggtgtgtgagtctcccgtatgttagtcatgatgatggtgatgatgattaccagtttgggggttatctttggccacccttcctttggcatggggagggagcccacccatatgcaagcattaaccctgagtcttacagtagggaaataagggctttggaaacaaacccgggtctaactgcaggtaagctgcttttttttgtttgtttgtttgttttgtttttttttgagacagggcctccctctgtcacctaggctggagtgtagtggtacgatcatggctcatgacaacctcaaactcctgggctcaagtgatctttccacctgatccttccaaacagctgggactacaggcacaagtcaccacacccagataattttttaaaattttttatagagataagatctcactatgttggccaggctagtctcaaacttgtggcctcaagcaatcctcctgcctcagcctcccagaatgctgtgcctggcctggctgcttttttaatgtggtgctaggcaagtacctcaacctatttgttttttaatctataaacttggaatgatagtagtacctgccttatggtgttgtaaatgtgaaatgcaaaagtgtaaacaatgcttctcagaaggtgcatgggctcagctgacattgaatgaataggaggaaaaattagttgaataagctttagtagtaagtgaaaaaaataagctcaaaagattatattacagcacaatacaatgtagagaaattaaaaacaaatattggatggcaggaacgtcaggttctgggacagctggagacagtggtggtgactggaataactttaccaaaggaaagctatttagtgaactgtcccctccagtagagttggccaatgtgctttgtaacagagccagactgttttcctatctcccaggattttactctttagttaaaacgttggcaatcccaaagccttttcaaccgcaggattgtcaggtttaggtgtctcatgtggccgctctacctccagatatatgctctcaaaaggtgtggcctgatgaaactatgggaccgtttggacctcaagatcagaggttcaagcttcctgggatcataggttttgattgtcacctcaatgggactgcttcacagaagaaaagcctgctttataaaactttgcctgatgttctagcagaaactttatcaagtgaaagacacaagtttgtgatgacacaatatgtgaatgaatttcagggtaatgatgcacctgttgaacaagaaattaacagtgcagaaacttaactttgaaagtgccagagtggagtgtgcaatacaaacgtgtccagaattgtggcgaaaagattttgaatcactgtttccagaagtagctaatagcaaattaatcattctgactgtaacacagaaaactaagaataatatgactgtttagagtgaagaagtagaaactgaaagagaagtgctcttagaaaagttcatcaatgttgctaaggaaatttgctgtactctttgtgctgagggatattgggctgactttactgacccatcatctggtttggcatttttttggaccatatacaaacaacactctttttgaaactgatgaatgctaccgacatttaggattctctgttgatgaccttcgatgcttaaagtgattcgtcatagtctctggggtacccgtgtagttgtaggaagcatcttcactaatgcaacaccagacagccatattatgaagaaattaagtggaaattagcggaaatgtccattcatttgctgtattatttgtatgtaatatttgggttgatctataaacactgtcagactaaagtttttaaaatatacttatttctatttatttcagcatttatgaatttacaacattggtaagtgatatgggattttaaaattgcaaatgttcattattcatatcattgaatacatgttgagcacacccacattgtataggttgtggtaattagcttgtaactagggtattatctgttattgttatttctcccctttattggaaaaaggcctcagttttaattactttcttccaaaaataaatcacacatttggttacgaaaaaaaaaaaaaacccaaatattaagatgtgctgaaggagtacattacaggcacagtaaataccatgtaagagagaaagtgaggggatgggaaacacggttgatggttatgcctcatgggaagagggaaagggaaggattaggggagggagggtcatatggtttagatgcatgtagatggttgccaaggctctagcttttgtttgggagttgagttcacattatagctaattaaaaatggtcatgaaccaaggattatgataaatccaatttgtgcacctgaggttaaaaaattagtgggttctcaataggtggtagctatttattatcccatgaaccacctgaaccatgccacaggccaccattcataccctttctgattgcctctcatctgtgcaaaatgctctgagaagtgagttttctcttccagccacagtggctttcacatggagaacacagaacagtagggatatttaagttgcctggattcttaggttggggcaggtcttaggcatgagctcccgtatgtgtctaaaacagttgaacaaagacagggttgtttttgtccttgctgtgccagatgtaaaggctttcattagagtcaccttaggagcattcatgttagccaggagattttccttccaagagaaggaaacgtttgggttggatctgatagtgtttgccttggtgtgattttagacctttctgtttccatcgtcaccactcagcatcatgacttttgcctgtggcttttttttttttttttcacctgtggctcccttcccttagtggaaaggggaagcaccaagatgtttgagacacgtcagtcatgtgcttgcagatcccagcatctgggtataacgtatcctcatgtcctgcctctgaatcttgaatttgacagagtaaaggagacaagaacataggttttggaattagggagacctgggttcaattttgggatcttcactgtgtgatttgagctggaggcattacctgtttttcctttattttattatattttattttttgagacagtctcactcttgtcatccaggctggagtgcagtgacacaatctcagctcactgcaacctctgcctcccgggttcaagcaattttcctgcctcagcctcccgagtagctgggattacaggtgagcaccacgatgcccagctaatttgtttattttaagtagagacagggttttgccatgttggccaggctggtcttgaactcttaacctcaagtgatctgcccaccttggcctcccaaagtgctggaattacaggcttgagccaccatacccagcctgtttttcctttatttttagtttttgggaattttgtttgtttgtttgtttttcttatttatttgttttgttttgtttctcctttagtatagattgggatgcataaagaccagagtcttaaatgcacagcttgatgaatttttacccagacatgccgctatgtaacttacccaggtcaagatcaagatttaaaacactcctgcctaggagacaccctcatggccattccttgttagtgtctaccccacataactattattctgactcctgccaccttcaattacttttacctgttcttgaacttctgggggtaggtaaattattaaacctttctgagcctcagtttattttttaaagtgatagtacttgtgctatagggttggattaggagaatcaactgagacaacacatgtaaaatcattcgagaaatatttgtaaaacccttgatgcttaataagttaaagctgtttgtttatgaatggccattgttgacctcaaagtctttgcctgtttctcacccagacgaagcaggcatttccccagtgctcaccataattcatgttcctgtgccctccatttccttccatgtcctgtgactccctgaacgcacttcagagactgttccatcagtggctttcaggatttttttttttttttaactgaaaccagttcttcttgcttaataaggcagaggaaatgggcaggaaagcagagttctcctgcctttgcctctttttcaaagagggtctgtttgctctattagcaaaatcaacagaggcattgctggacagcgggctaggctggaccaactcccctgggctcggggggtggtccctggatgctgggtttgctgagggccaggagtgggtcactgtgtgctttcaaaagcagctggaggagccagtttttctagctcctcctcaaaaaacccaaccaaaatatctacccctgtgattggctaaaattatccaattataatttaattcccttaggtcaagggtggatgggtgcataataccctgagtgtgagtgtgggggttacattttcggagggaataattttgcgtgtaggattccatttgaccttagtctgaatgattactagcgtagcctttccttaaggtaggtcttcatggaggagaagggagaactgtgcagtgggtaggtggcagtgaagatgcaggaggctgggacaggttagagggtgaatgctccaaatttgtgatgtgatctagagctaggtctgcctacagccacatcacatgcatttacagatgcctcctttacgttaagtgctgcatcagaatagaggcgaaaagttacagtcctgcccttcaggagctctgggtccgaaagcaagaatcaaacaggcagttgtaatacaggctattgcatactatactgggaagaccatggctacaaaatcagattgggggcatggagttgtcatagtcccagaggtggtcatttgtgttgagatctgaaagataaatagaagttagccctcaggcttgtaaaacctgtgactcatgtcaccatatccttgggactctcaccaggaaatacatttccaaggataacttctgctcactccataaatgaggtttggcttttactgaactacttaacacttttgctagcagcaaagctggggtttttaatttttctttttcccgcagtcttgcaacccttctaccccgtgcaatgtaaacttgaatacatagatcttctggctctgcaaaagattatcacttcttctgggtgagtgaaagaggctggatgggaagattcatttatcaactgaagactttattagtaagagtttatgagtaagagagtaacctcattacagagccagaagagagagatgtttgttatggaagagatacccacttggcatccctcacgtggccagtcatggtgtttggggccagcatgccaaattgctccagttaccatgggacccagacttagacaggaaatcatggtaggatgggaaggagtccaaaatacacatggctggtatataggctacagttagaaaagagagtaagagaacagtgtatctattttcctgaaggagtattgcaacctcagatggggttgtttttccacaactccttactccttgcgttttatggtcctgatttttcaagctttaattttttccgcgttaagcaatacttacatgagttgaagtgaccctttatatgcttgtggtaagcacttcttaggcttgtcatgtatgctttttaaaatgcctccaaactaaaaagaagccaaagtcccttcaatcaggaggactttattcttcaacacgtggaaggaatatctttttggttttaccacagctgtctctttcctgcaagcagcccatttgaaacccagaactccctcgttttatgggatgtgctggtggaacataggagggggtccactggaaggctggatttcttggaaatctctgctgccaagctcagcaactgaaatttctcattcataaagaggcagatttgcatcctgcccatgaagttgttaaaagaagttggagaatcaggaaggggatcttacctgtacttttgcagatgtagctctggaaaagttccaaagggatctgactgcatgcacatagcttgggaacagttccaggcctccagaggaacatttaacaggtcactattgatagcattttccatgaaccaccctaacatatttcttgggagtgtgctaaactgttgatgaaatgacagttatagcatggggtttgcacccctatgcctcattgacaactatctctctgctggattgggtataatttatcaattgaatttatttcataagtttattgcctttaccccacactatgatgttataaccatggccattttaggaatgagaggtgatgacaataatccctaatacaggtacagtttctcatggtttttacaaagcactttcacattctttctcatttgatctcacagctattatagctaccatttattgtgtctttctatatatcagacaccttactaaacactttataaactttaccttatttaattcttaaaataactctgtgcaacaatactctgatttgttcccattttacaaagaaggaaactgagggtcagagagattgggcctcttgacccaaatcctaatcttggatctagggtagactagggatttgaacctagatctacccaactcaaagcccaaaataccaggcagtactggctcctattctccctgtgttagaggcagagggctttgttttcctttagaagaaaatgaagtgcagaagggtttacttgaggtcccatggccaaggagtgacccagcagggaccagaagtcaggagtcctgagatcagtgctttgtcgttacccaagacctgtttatctaagcagtattccccaagtgaagtccctggcacttcccagccagcaaccacttggtcagaaatagccagtcctggactcatacttgggcacagagatgggacggagttctgggaatccagtgcatcattctcatttcctaagtaatttaaagctaagaaaccataaagtagcttctaagtacacttctgtttaccatttcagtgtcaggactctgcaggctacagacacagttgaatttactggcttgtttaaaagtcccaaagtaggattggcttcaggtacactttgactcagaggttcactggtacctttgggaccctgtttcttttgcttactcttgcttctggattctgctcctgggttggctccattatctggcagcctttctcctgtggttgcaaactagctgcagcagcctcagctttgaagctgagtaggaaaggggaccagttggcttcttgtgatagctcaaagattctggacttgagtctcgttggctctgatgggcctggcctaggtcatgtgccccatcattgaaccagtcattgtagtccataaccacatgctccaccccatgctgagagggaaggttgggagccctcatggcctgagaactgtaggtcagctgtggatagaagaggaagattggatgctgtggagagaagatgctgggtgatctgggcaggggggtggagtgggaagtgggatggaagatggatctggaaggaagtggagtggaaaaaccagtcttctagagaaacacatcaccacattaagtagggcaagggtaactttatttgaagagtttcaacagaccattaatgagagtatcttttggttgctgctgttagagcaattatttgttatattcactgacttcagtgtttatttgttctaatgaaacctttcctctctgaaagagaagcacttctttagagggtgtcttaaatattcagattacaggtttgaaggagtgagccatttaggtgctgaatagcttgcaggctgggtttatttctgtcttaatgggatcttaaattgtgccagatgaatttaaatgttacttctcttctagtctatctctgacccagtgctaccttgacatacttgaagttttagttcaactgtttggtctaaactgagtgttgacaattattattgaaaagttcatctcgtagatttttgcttttaatcagctgtagatgcaaatagaaggtgtgaccatatgagaggccacgtgttttcaggattctggatggctgagtggccaatttgctttccatttcagaactaaaccagacaaggaggggtgttataaaatgttccttttgaagtacctacaactaactagatccagatagtgtgaatgttgagagccaataagggttccttgaatgcctgcccggtggccggcatctctagaggcatcatggagaacaaaaaggtggtttctgctctggaggaatgaatgatcctgttgcagtaataacagaaactgtttattcagcagttactagctcaggtacagtgctaagaattttgcatacgttgtctcatttaatcctcatcacaccagtagaagggcagatactgttctcctcaattttcagaggaagcagcagaggcttggggaggttaagcagcctgccccaagtcaccaagcaagtgagcatcaaagccagcctcacaccaggctccctccagctgcaaagcctgcgtccctcactccgatgctgtggatagagactgtcattgcaggatttctcacagtcaaaaaagcaagtactcccttgataacagatttcatcactcttgaaactggaagcctgggaagaaggaagattgcctgaatgctgaagccagtgtctttccagaaggggggatactgagtgggcctccttccaacctgtctgacccacgtgatctctccatctgtctgactttgactgccaatccagcctggacagcaggaccagtccaagcacaaaccaaatctttattctggagttggacagagtcagagttgcttagggctgatgaggccaccttaatctcaatattttcacacactgtgctagatgacacatttcagagtacaggcagaatgagggttggaaatgttaaacagccagcgaggagttgggtctgggagtgagacagcagacaaagtgcattctaaccatgtacgcgcagctgccgggggattgtttaaaccagattctgccaaggtcatagcagcagaaaacataatccagaactctttctcccaggcaggatcatttggtttctaaagtttttttctctgtaagtttctcttgggagaaacgtatctgggagagggggaagagtggaaatacgggaattttattttaaatccttaacaacatgcatatagagtcccacttataggatgatgctatagagttgacattttacccccaaggaaggagtatgtaatcctgggctgaggatgactttttccaacaaggtccctgactcctgtcacttttggggttgctttccttcaaaagctaattgagagtggaaaggaactggggtgagtgaagataaccaaatgtgcctgaggcctgagagtgagagccaggccacgtttcccctgctactgggccctcaagtggctaggggggtggattcctagggtgggacacagaggatcttcctgaattgctcccactcctttcccctagaaatatcatcttctttgatgctttatataaaaactaggattgcaatgtccctctttatccttagtaatcttctttgctgtgaagtctactttatctgatattagagccactccagctttcttttgatacgtttgcgtaatgtttttccatacatttaattttaactagcctatatcgtattccaagtgagtttcttgtatacagcaaatagtcatgttttgttgtttatctgttctcataatccattatctcctaactggtatgtttttttcttattttatttttgagacggagtctcgctctgttgcccaggctatagtgtagtggcgcaatcttggctcactgcaacctccacctcccgggtttaagcgattctcctgtcagcctcctgggtagctgggattacaggaacccaccaccacgcccaaatacaaaataatttttgcatttttagtagagacaggctttcaccatgttgcctaggctgatcttgaactcctgacctcaaatgatctgcctgcctcagcctcccaaagtgctgggattataggcatgagacaacgcacccagccctaactgatatgtttagaacatttacatttaatctaattgtttatgtatttggatctagtttctgttattttattatttgtttctgtttgttctgtttttggctactccctttctcctttcctgcctttagattatttaaacttttttttttttttttgagacagggtctccctctgacacccaggctggaatgcagtagcatgatctcggctcactgcaacctctgcctcccagattcaagtgattttcatacatcagcctcccaggtagctgggactacaggcatgtgccaccacacctaactaatttttgtattaatatttttagtagagatgggggtctcaccacgttgggcaggctggtcttgaactcttggcctcaagtgatccaactgccttggccccccaaagtgttgggattacaaatgtgagccactgtacctggctagaacatttttcagtattctgttttaatgtatctattatgtgttttgactatatctctgtggtttttttggtgggtggtctaaggattaaaaactacatacttaattttccattgtcaacttagaatcggtattttcctagatgtttaagtggaatgtatagaaagctcaccactatccctttaccctttgtataaaatctaacattgtaggagactgctagcctattagagtacagagagagaagaaagacctggaaggaattaagagttggttttacctcactcattcattcatttagtaaacatttatccagctttttctttattttattttattttattttattttattttattttattttattttattttttgagactgtctcactctgtcgcccaggctggagtgcagtgttgcaatctcagcttactgcaacctccacctcccgagttcaagtgactctcctgcctcagccttccaagtagctgggattacgggcatgtgccaccacacctggctaatttttgtatttgcagtagagatgaggttttgctgttttggccaggctggtctcgaactcctggcctcaagtgatctgcctgcctcaatctcccaaagtgctgggattgcaggcgtgagtcactgcacccggcctatccagcatttgaccaggcagcagaatcccctctcctgggctggataatctatagatcaatacagtagtaagagtagtaatagtaatagctaacttcattaagcacttactatgtgccatgcacttttctaggttcttacaggtagtatattgctatttcaataatgctatgatgttggtgctatgattatctgcaccttataagtgaggaaactagggaacggagagcttaacttgcctaaggtcacgtcggcagcagatagcagaactttgggcccactgatttttaatcctgcattatcacagaacctccatggggaaagaacacatactggaaggtatagcactggttctgtcttggagagcatttattctccaccacattcagaccttcctctgatagtggccactgatggaccactaaagaggctcttttttcccaaactagttatttttcctatcctcctgtaaatattcataggatatcttctttgtgtcagggattatgcacataatatcagagctctgagaactttgactttgaatctgaagttaaaactgggaagtgtccaggtatggtggctcatacctgtaatcccagcactttgagggggccaaggcaagaggattacttgaagccaggagtttgagaccagcccaggcaacctcaacaacaaaaaagaacaaaccaaaaaaagaactggaaagcactctaactgtgaccgaatcagtgcacttttcagatgtggactctgaggtggagggaggtgatacagtctgccacgggcactccagtagaggctgagcctgccgggacataggcctctgactcctgctttggtgtctttgtgcgtctttgtgctttcttggcagaaaggtaggggaagctaaaaagtagcagagctggaaattctgatctgtaactgaacagggacagccagcggtccccaaaggggagcctctacttgcatgccaagcctcagaaggctttggcagctgggctgtgctatttaataacctcctggaggctgatccagtggtctggcagcattactgaccaatgctgaggtttatttgtaggcttgggttttgcatttcctgaagaggcaggagtggaccctaggaagaagtgttggaggggtagctcagtctaactggcacctgtttttttaacagcatgacttactgtgggaatgacaagtagatatcacctcatggaccaagcctgatcaatcatcactgtctggagcactgtggtgaattcaggctcagaagaaagaattcagaaatccattgatgatgcctatcatgggcccaggaataggggctggaaacttgtctggcagatatttaccactagtgtgagggttaaagtaagcctgggattttaattatagcacaataatatctgtcctcataggactgttgtgaggactaactaagaatttatgtaaagtagctgggcatggtggctcatgcctgtaatcccagcactttgggaggctgaggcaggcagatcacttgaggtcaggagttcaagaccagcctggccaacatggtgaaaccccgtctctactaaaaatacaaaaactaactgggtatggtggcaggcacctgtaatcccagctacttaggaggctgatgcagcattgtttgaaaccaggaggcagagattgcagtgaaccaagatcataccatggcactccagcctgggcaacagagtgacactccatctcaaaaaaaaaaaaaaaaaaaaaaaaagagggaatttacgttgatgtaaagtgctcattagcttagtcatttgttttgctttgtgttggtaagggcttttcaaaagaaagaaagttcagtttattcattcaaatatttgagtgccctccatacacctggtgctaatttggccctggagaaagattgtgcaagctatactaggtcactcttctcatggagattgttctacatggaagaaatagacaataattagtaaataaacaagtaggatgacttcacatagtgataactgtattgaagaacaacaaaaattaggctaatacgagacagaaggactatgaagggggaggaaacccctgtgacagggtgacatttgaacagagaacgagccgatagtgcaaagatcttggagagagaagaaaaaatgtgaaagactcaaggagaaacagccttaaggcatagtgaacttacagaaggcaggccagagacaccatgccctagttgctaaatgctttcattataaaaatttaaaaacattaaaaaagtatacaggcttacgtaataacctctgtatatccatcacatagattgaactgttagctctgttttgactcttgctatctgcacctcccttttttggctgtacttggttaaagcaaatcccagacatcatgacattttatccctaaatacttcagtatgtatcccttaaaaaataagcatttgcggccaggcgcagtgactcacgcctgtaattccagcactttgggaggctgaggcaggcggatcacttgaggtcaggagttcgagaccagcctggccaacatggtgaaaccccgtctctactaaaaatacaaaaattagccgggcatggtggcaggtgcctgtaatcccagctactcgagctaaggtacaagaattgcttgaacccaggaggcagaggttgcagtgagccgagatcgtgccactgcactccagcctgggcgatagagcgagactcaatctcataaataaataaataagcaagcaagcatttgttcccacctaggcaacatggtaaaaccccatctctacaaaaaaatacaaaaattagctgggtgggtggtacgcacctctggtcccagctactgggagggtggggggctgaagttggaggatcacttgagcccaggaagcagaggatgctgtgagccaagattgcaccactgcattagagcctgggtgacagagagaaaaaagcgtttccttacatcctaatgtagtttcttgcatttaattctcacaatgccattgtcatgattaataatttattctttttctcttattattttatttatatatttatttatttatttatttgagatggagtctcactgtgtcacctaggctggagtgcagtggtgcaatctcagttcactgcaacttccaccacccaggttcaagtgattgtcctgcctcagccttcctagtagctgggattacaggtgcatgccaccatgcccagctaatttttgtattttattagacatggggtttcaccatcttggccagactggtctcgaactcctgacctcaagtgatccaccctcctcaacctcccaaagtgcgattaacaatctcttaatacaacctagtacttagtctatacccaaattttcctgcttgcctcaaaaatataaattagtttgaatcagattctaaacaaggtctgtgtattgcatctagttattaaccagatcatgtgtttcatgatgaaaaggtatttgacgtcagacctaccttatctggatgggttttgcgtgcctttctggccagatatgtagcttagatcgttagaagccctgaagggctgtgaacccctgccaatactgtcaggttatttcccagagggatattcagaaatcctctgcccttccttcattgttgctaacaaaactgtggctctttcggtgtcagaagcaatgggggtatgagtttgggctttctctgctgacccagaggtgagtcccgactgtcctgaaggctgtcacgattctagtcccattgagagtgattggtttcagaacaggcatgtgacccagttcaagccatcaaggcctgagggaaggatgctaggtggagcttctctggaagggtttcttttcccttggtttggggtcttgagacttgaatggtatatgcgaacatcatgtctagagctgcggcagctgccatctcatgactgcagggaaaatcaggcaaaacccaacatcttgatgcaggccaaggtgggagaaaggacataacttgggtccttgatgacactgttgagtcacagaaccaaccaaccctgaaactaccctacccagctcttcttacaggagacaataacgccctggctgtttaagccacttttagttgttggctttgcatccgggtgcatcccaatgatacatcacaggcatctttctggataaagcaatattgtctctaataggtttttatttactttgagacagaaaagaagtaacctttaaagtctatccttattctcttgcttaaaccactgtttttattttttccaattggttggtgaatatttctcctttttcctgttgaacttcaattgaatatggcacactctcatgagttgtctataaacatttaagaagctttggcttctgtggaataagaaatacgcagctgttcattctcccttgcaatgacttgacccaaagtaaaacatctttttttgtttgtttgtttgtttttgagatggagttttgctcttgttgcccaggctggagtgcaatggtgagatctcagctcactgcaacctccgcctcctgggttcaagcgattctcccacctcagcctcccgagtagctgggattacaggcatgcgccaccatgcccagctaattttgtatttttagtagagacagggtttctccatgttggtcaggctggtcttgaactcccgacctcaggtgatccacccacctcagcctcccaaagtgctgggattacaggcgtgagccaccgcacttggccagtaaaacatctttaaatggcgcaaagtaaaactttgtggaagattttggtgcacattggctgaaagacagatacaaatggtattggggaagattggcaagcttgaatgtgctgcttgctaaccagaagtaaggcattctcagtagtgagctgggattgcccaggggagataaagttagtctggtatgttctagagagttccacggacgtctaatgtggacacacgacacccatatgcctgcctgtggggtaagtccttcgtgaaggttaggtgagagaattcaagaggcagccagcccacccaatggcaccttgagctttcaagttctactttgctttggagaagaaattctactgtggtgaggtatatccatccaagtgacttttatcataaatctctgtacacctgtggaggcattgaaatggtctacagctgaaatggccttttcagctcagatcatccagggataaggttttaatcatcaaccagactgcttcggccactgagtacatttttaggaccctgccttctgacttcaattcccccaggaaatacaaagcattcaaatgttagcccaagggtaacatccttaagaaataaaatctgctcttttctcaaaacctgagtgccttccaaagccagaattaaatttctatttgggtcatctgtgcacatattttggggagacataaatcatatgcagctctgttagagatctcagggagtgagctgtgtgttaagaataaaaataaaattaagtaacgtgtgctaatagattagtatgtttcaagtactgaactaaatgctttatactcactagctcattttaatacacctgctctctaaaaagtggccaggcacggtggtcacgcctgtaatcccaggactttggaaggccaaggtgggtggatcacctgaggtcaggagttcgaggccaggcacagtgtctcacacctgtaatcctagccctttgggaggccgaggtgggtggatcacctaaggtcaggagttcgagaccagcctggccaacatggtgaaacccatctctattaaaaatacaaaaattagctgggcgtggtggtgcatgcctgtagtccaacctacttgggaggctgaggcaggagaatcacttgaacctgggaggcagaggttgcagtgagcagagatcacgccactgaactctagcctgggtgccaaagtgagacttcatataaaataaaataaatataaaataaaatagtcctggtgtctcattttccagctgataaaacagaggctgggaggggttaaataacttaccacacagtgtgaagagtgacagtgggaagctcacgctcaggtctggctgactccacagcccgccttggtaatgacttcagaggtgacagacagcactgcatatacttggtgtatgttggctgttccctttttgtcccaaacctgtccttggcttggagctatcccacacctaggtttctcctcccctgctgcctagatactggccagtgcaggcatcagctggtcctggtgggacctgcccctttatgataaagccaaaagagatcccagtaagctttggggtctcttctgactttatcacaaagggggaggtctctgtgaccttcttcacctggctgtataatgaccatctgaagtcggtggggttgtggggaagaaggcctgagccaaggcttcttgtgtgtcagatccaggaagcattttatttcatttcattgcctttccctgggtcatctgttgtagagtctgaggtggtgtctactccagcgctgttcctattactctgtggggctgacaagatgttatcccccagctccaggggccttggccatcatccttgctaagacagtgccagtctctggctccaggatttcagtctggaaagaggtgcctttgacattacagctgactcaggctaataactgggcagttcctttgaaaggcatgcaagcttccttccttagccctgagatgacacttcttggtatttctccatcaaaacatcttgtttctccaaacaggggggtttatagattacttagactagtggttaagctgcccaaggatgacctgagagcaacatgctggatccttatcacattatgggtcacctcccaactcagaacattgagttctgactccccagctggcattaaatggaaaataatcctctggactcttggactctgtacttactggctgattcacagtctagtaaaaccaccttctttcaactgcctagaaatctaagttggaatttttattatgacgtcattgtgtatttagtagctgagactcaggtccatcctggccctgccacgagccaactgagtgtccttagaccagtcccttggtccctcagaccccaagcttcctccttgggaaagtgttgagaatgacttttctagatggtctctgggttgcctttaaaataagtcattccttggaatcatgtcttttgcagtaacatgggtggagctggaggccattatcctaactgaactcagaagcagaaaatcaaatatcacatgttctcataaatgggagctaaacaatgggtatgcatggacataaagatggaaaaaatagacactgggaaccaaaaaacgtggagccaggcacagtgactcatgcctataaatcccagcactttgggagtctgaggcagatggatcacctgaggtcaggagtttgagactggcctggccaacgtggcgaaagcttgtctctactaaaaatgcaaaaaaattagctgggcatggtggcacatgcgtgtagtcccagctacttgggaggctgaggcaggagaattacttgaacccaggagctggaggttgcagtgagccaagattgtgccactgtacttcatccagcctgggtgacagagcgaggctatgtctcaaaaaagaggtaggggagggggacgtggggaggggaggagtgggggtgagggttgaaaaattacatattaggtaaagtgttcaatatttgaatgataggtatgctagaagcccaatccccaccattatgtgtgtaatacccatgcaacaaacatgcacatgtatccccaaatctgaaatttttttaaaaagccgttattaattttttttttttttttttgagacaggattttgctctgttgcctgggctggaatgtggtgacaacatcttggtgcactgcaacctccgcctcccaggctcaagtgatcctcccacctcatcctctcaagtagctgggactacaggcacctgactaatttttgtatttttttgtggagatggagtcttgtcatgttacctaggctggtcttgaactcctatactgaagcgatcctcctgcttcagcctcccagactgctgggattataggtgtaagacaccatgcctggcccattcttaatttcgttgaccaagtgtttctcttactgttttcgcactctcattgccagtgcccccttattgagcagtctgtgggcagagcgcaatcaagggaaaaatacaagatgcgggagaggagacaaacccccaactcccttgcccaggaagattatagtctccagggtagaaagcctgtaaacactgtactaatgattgtgatggagatctgaacagagggcagtggaatcagagggcaagattgcctaagccaggctcatcaggcacatctagaatataaacagatggcacaggtgacatgtttaacttacacaagagaggtcatgtctttgttaaacatccaaaaacctatggcatgaagtaccaagggttcttgcatgtgtctctggttggaattgttctagttctgttggttttgtagtcagttgcctatgagcagagcagaatcaaacaggctttgtgcctctaccgccctgagtacctcaggcacagtagttttgaagcagacactgatggggctggagtgtttcgtccagatctttctgttctttcccatgtgcctcccgggcttccccagtgaggtcattagtgtgtccagggtaagaactgtatcacaagcttcccacatatcttctgtgctaccactgtcttggtcacacacaggtcctttgtatacccttaatgtagtcaattaggacaggctcagccaagctttatttattcttggaaactctgtgtgtgcagttgttattggtgcggtttttatcacattcaagtacacactgtatttttttttaaaaacatattctggggctcatggattatcttaaagctgggcttcagcagcaccagtggcaacagcaacttggccttggtattttcactgctcagccttgtagttgatgatgaaatatttgcgacaaacacgtttgccactcggtcactgacaagcctgtgggttttggggtagcaaaagagcagagtgcaggaaatgatccagtgagtatcttttacctcccagaggagcagaaggctcagcccatccactgtgattatagtcagagctgggctggatctgaagttgagtttaaaatgaaatcattgctgaaaggcgagtgctaacctactgtgaggagttcttgtctatccagagagccccagtttgctgatggttgaaagaaaggatgaaagggagccatttgcgacttttgcagtgtccgtatgatccgtgccactgtgatggccagaatctgggactgaccacaaaacacagcctcacgttgggtgctgtcagtgagggctgtctcccctcctccttgcccagggacggggtgtctggaatgttagtttccttgctgcagtgtgagtgaagcagaggaacatcggcatttttagccttgttctagcaaccctggccacttgatcccaaagttagttcttgtcaagtgttggataaaacaaagcaacatattttttcttttgttcttaacattttaactgcaaacatttaatcagcagtttgacgatgactggttagaaattgccgcataagctcgccttgaagaagttatgctaagccacctcaggtttctccactgtgaggggtagatgcctggcacctggctggcacaggtgttgggaattctgtgtgtcagaagcactgagagcctgccatgaaaggcagctggaaacctggggggtggctgctcgtgtcatttctgataggaaaagggaaattgaatttaaggagacctgcgcatttcagaactatacttaccacagtaaagcctccgggctacggccagccagaatgtgcccttctctccctgcccatgtctgctcagcgccgagggtgagctatgattggggcaggggaggagggatggaggagacaggcactggatgccaggagaggagaatgggaacccagaacacatccctggaatcaatctaattgtttccattcctcctcatgaatgattggggcctgtattccccagagctttttagctgcccaatacagctttcctttgtctcaaaaacctcccaaagatgggcttctaaacctcggaaagccaagccccagaccctcagagccccatgtcaggatggccccggacacaggttatttcaaatagactcatttctccccatcagctgaaaccagtcagcctgaactgggcgtgtttattcagtgaaacccaggaacctcagtgccctggttttaatcaggagacttgctctgtggtaatttggggctcctcgaccaagggtctggtcccagttagtttccaaatgccaggcgtgcttgtttccacagacagtgtctgcgctcacgtggcctcatgcaaatgcactgtccagaaggcaggctcgcgcgagtgcaggcctctttttaatatggaattttgagcccttctggcgaggacttttccagtctttgttttttgaaaagagggtaagataatctgcagcggcctttctggggaagtcatttggagtgttgggttggagcttggcaacatggaaaccattagggccatcacaggggctgactgtaccttgtaagtgcggcatcaccctcagcctctcagaacagggttagcctcatggactctcagcctgtgctgtcacacagggccccccactcagaagggctccacacttggcttaatgatcagctatcactgccttgaaattcttaatttttgaacaaggagcctcccattttcattttgatctggaccctgaaaattatctagccagtccttctaagaggatccaggcaccagcatcggataccagggggaggttgagctctgccactcaccagtcatgagcccttggtctgaggggacactgacctcctagcctcagtgtcctcctctcaaaagagagccatcagcacctctcccttgcagctgtgtgcagagaagaaaagatcatgcccctgtggcacctagcacaggtgtgtcacatggtaggtccttaaaacacacacatctatttgacttttctagtcattcctttcttcatgcaacaaatactattgaacatggactatgtgccaagcgctggctcagccttggagtacagataccctagtaagaaaaacagacctggtcccgccctcatcgaggttagagtctaatctctgacccacttagtgaacaggttgcagaagcctcttctctgtttcagcatatccgagaagaacagcctcaagtctggtgagaccagctgctctggaagatctcttgggcatgcgacatggccatctatccagccttccacatgaccctcgagggttttggggtgctggatatcagggaattaaagccacctgcatgggagtatctcaggtagtagtttccctcatcactctgtgaccagcattagcccctctcctttgctgttgtaaatttggggacctccagccccctcggtttccagagcatgtttatccattcaccacataacaggcagcacccacaccctaggaccgtgtgggagccaggttgtgccctccaacctgccccaccttgaaggagaactcggccttaacgtcagcagtgctggggcaagtcccttgctgaggacggtggggagggcttttacacagagaatctatgattataagggtggtaagaaatactagtaataatagttggacatagtgagtgtgtgttcatcatcaggcactgagtgctttacacagatccacttgtttctccgtagagttgcaaagtcctatcataacctctattttacagatgaagaaactgaggcaggtgcgccctcccagtggcatctctcccactttcgtggcatggctgatatcaccgtctacatgaaatgtgtattgtaacaactccatctctcagggcgtttgagatattctccgcacatcctccttgtccaatggtctgggttacaatgactgggctgtgtatgaggccaaaagagcttctgcttctccggggagcctgggccccaaggggcaggaggtggcactctctggggggcctgatggtggtgcaggttgctgctggggttgctggcttgccttctcagccaggtggcttgtaaggagctaccatacacttcaaagaatgtggtcagaccacgtcctacccaggagacagctgaggtgctcgggagccggcccaatgggacactccgtctgtccgggagccagcctttcagagccagcaccagaagcggttggggtgtctggtcattctgttactcctctttccactgctagctgctctccagctgctgacctaattccagggaaggttccagaaacccttgagcaagaaaatgcacatgggctcctgtataaattgttccactgacagtgagctattgttaactctttcagttcctggaccatttctaaatcatgaatatagatttaattttagtgcaggtagtttcacttgctaagaaattgggtcttttctattctttcttttttctttttttcttctaagaacatggattttagaatcatttaggcctgtgtttcaggccccagctctgccacttgctagctttgtaacctaacacaagttaccccttctgaggcgatttctcctataaaatgagaatagtagcccagcatagtggcacacgcctgtaatcccagcacttcggaaggctgaggtgagaggcttgcctgagcccaggaggtcaaggctgcagtgagccatgattgcacccctgccctccaaactgggtgacagagtgggaccctgtctccaaaaagagaatagtagaacccaatacacagcattgttcagaggagtgggcttattttctcttagaccagctgagagatgaaagaacaaatgggaactctgaggattgcaaaccaatctgaccctggatacagtttagagaataaactttttgattcagaaataataaagcgctgaatgctctcctgggcacaaaagccagaaactgggttccgaagctgcgtatccctgtcaagccctgcggaatggccagcaatgtgctttcatcttgtttatcccttataatcctcaaggtgaccccctacagcagtcaccacccccggtttatagtgcagaaaactcgcccaatttgagcctgaatcttctggccctaagtccaacatcacttgcctcgtagagaccctctgaaatgaatgaacaaggtgtgttttcctgggattccggtgtttaattaaaaagggaccatttaggggtatctggagatgctgtgtcaggttgaagatgcctttccaggcagaaccacctgcttgttccattggctttctctttttctttttctttttctttttttttttttttgagatggagtcttgctctgtcgcccaggctggagtgcaatggcacaaactcagcccactgcaacctccacctcctgggttcaagcaattctcctgccttagcctcctgagtagcttggattacaggcgtgcgccaccatgacctgcaaatttttgtatttttagtagacacggggtttcaccatgttggccaggctggtctccaactcctgacctcaggtgctccgcccaccttggcctcccaaagtgctgggattacaggtgtgagccaccatgcccggcccccattggctttctctgaatgaacgggtcattagaagtcctgctccagcagagtagtagttgattgctcacttgtagcacctgttccatcctttactgtagggtttatctcaaaagagaaaagtgtaataattaccctaggaaagaatactagtaactggggctgggcttaaataagtgcctcccagtataaatggacaccttcttttcaaaaaagattttatactcggcctggagaacaacctcagcttatctctgaaagtattatgtgttctctctctccctctctctcaaaatattagcagcggcttcagaatttctatttacgtgaggcgctctgccttaatctggttccgagagtggccgagggacttgtttgaagcaccctttgcactgcaagatgagatgtttttagagtgagcttatttggattggtttggagctgagggtaatgatgaggacagctgaggcctatcccagccactctggtgttctcaggactaaatatcaccttcagtatttttagatttcttgccagcagataaatttagaagcacttgcaatgtgcttttctgggtctgcagcatggaagtgttaagttcctgtccagcttcacctcacaggtggcagctcttaggaggtcagacagcccttccggggcctgacaagccagggtgtgcatgaggtctgtcagggtcccctggaacgagatgcagcatcctggagccagtgaaagctagagctctgaggagccgcctcttctcccaaggccaagaaggtcagaaactgaaggcagtggaaggggtcaggctgtgcatacagcccctttgacatggagaaacggcatctctctgtggtttcctcaggaccagcacaagtctgactggtatcctccatcaggaccttggctgaagagagggaccaccggggaaattgcttcccttccaaaaacagcacaaatgcacacatttgctctcacagctgtttttgagtgtgtcgtgtggggagctgtgcaagggactaaggatatgagatgcaggtgaccatcagtggattaatgaaggagacgcacattaaagagcataacctccatgcagtccacccacggaggagagccatgttccttcttaaacaggggtccgtgacccagttgggtaggaggacttgactagcagagggagggtgctggggggtgagggaggtgcaaggaaagggaacagcatgtgtgaggggccctgaggctgaaaagaacaggaacttaaaggctggagggatgcagcggaggttgatgtggtcagaactgtgctctgaaaggagggcttgctctggctggagggataggtgtgtgaggaggaaacccacaagggcaccatggagtacttcaggggagaggcaaggcaagcttggggacgtgagggtggcggtagagagaagcagcagtgacagatttggaagttgattcgaaactcagagggttgcagggaggggtaggtgaatcgggactcacatttctggcactcacagcagggtagatgctggagctttaattgagagagggagagacacaggacaggggccaagtttagggtatctgtggaataataaagtggtaaagtgaaaatgggataatggatctgaagataaggatttgaaagtcatctgcatatggatgagggattacttctcgagcccttcctgggctctcagtgctttcctccctgagctcctgtcattgatgagcaggagacatacatactgtgctcctcccccttttagatgcagggcgattgctcaatgtaatagaagttactatcactgttactcaatgtcaaggtcaagcccaagtgatcgctaggccgctgtcaggagtgatccgggtttcctgacacctgaagttaatacagttaaggaaaagaatccaaaattacaaatgcacaatgagatataaaagtgaatatttatttaaaatgagaaaaatttgttaaagctgacacacatatcacaaatcaataactttaactgcctgacacaccttgacaatactgtttttccccatctttttttttttgactctgatcacctcttcctatgacaatgattctgtactgttttctaaaggaacaattgagacttccctttaaaatagttaaccaaaagtttgtttttcttttctccaatggttttgaaaatttttttttttaacttcataactcattattggtgatgtcaagtattaggattgttgtcaaatttggggaaatcgtggccacgtttctttcatttctgagcagtgagatttggaagaactttccacaagcctagcttctgactctgtccgtcatgagtttcgtttctcctctgctcccagcactgcctctggtgttgagcacggtaatgcccgttcatatcttgatataacctctgacctgcacccttgtgtcataacacattttgcaataggagtccttctggaagtcattggcataagggattgttagtgatgtattaactctaagtggatgtgactgctaaccactgaacccagctgactgtatccccaactcaatttccttcaacaaggtccccaaaatgcccacccaatgcatgggaacatgtggtcagttgcagtggaaagagacaatggtatcaactgacagtggctaatcttactttggcaaaaaaacacacgtccatgtgaacacattgccaggccccctccagaagttttggaagcaacctgtataagtagaggctgcctgaagtttacgcttctttggcttcgtagtaaatctgcctctgctgaaatctcagcctatcagaccatagaggcattcaggattgcagcacattcatgccttgtaagtgccaaaacattgtcattgcaataaaattttaattcttcgagaccaaagcatttgaaaagcatttcacacagtttcctgttttctttgcttttctttctttctcttttttttttttttttttttttttgagacagtttcctctcattgcccaagctggagtgcaatggcatgatctcagctcactgcaacttccacctcttgggttcaagcaattctcctgccttaacctcctgagtagctgggaatacaggcgcctgccacccacgcccagctaatttttgtatttttagtgcagacagggtttcaccatgttggccaggctggtcttgaactcctgacctcaggtgatccacccgcctcggcttctcaaagtactgggattacaggtgtgagccattgcacctggccagtttcctgttttcttaaacagtgagtgagctgcatagatgtgactatgttcttgatgactcaagatccatgagtattcttacagtgcttgtgccctcagggagtgaccccaagatgtgatcgaatgttggtcccaatattaaatggccccacactgcagtcttaagtttttatgcctgctttttgtgttgtaaatgtttaagcccttctaatgctgttagctgtcatttcttgctgctttaaacaagctgtggcctgagaaataaaatcagccatcttctttcagtcagtaggctgttttgaggacttgttatgtgtcaggtgatgggctggaaatttacatatagtagcaatgactaataatcacaaacatccattgcatgcttgccctgtatcctgtattccaagctcatcacatgtgtccacacatgtaatcctcacagtaacctaggaggtcggagctactgttgttatccccgttttgcagatgaggaggcccagacacagagaagtgaagtaacttgcccaaagggtcctgattccaaaaaatccaccttttgattccatcatgctgtgacttagagagtcatctagctgggtgcagtggctcacgcctgtaatcccagcactttgggaggccaaggcaggcagtcacgaggtcaggagttcgagaccagcctgaccaacatggtgaaaccctgtctctactaaaaatacaaaaattagctgggcatggtggcgcgtgcctgtgatcccagctatgtgggaggctgaggcaggagaatcgcttaaacccgggagacggaggttgcggtgagccgagatcgcaccactgcactccagcctgggcgacagagcgagactccgtctcaaaaaaaaaaaaaaacagagagtcacctaactatgaggccagactcaaaccattaacataagaatcagaccaagagagcacaatctgtgtccccagggaaattacactttggaaaatgtgtgaaaggaaagaatttgtagtgccctctctcggagagccatgaacagggtctatggcgtttctgttgactgctcaaactctttccttcatttcctgctcattggctgcattctggatggtggagactgctgaagagctcagtgctgggggtgtgagctgttctccaagcattttaggatgtagtggtaatacaggttatgcatatgaggaggcgggggaagatgtagggataaacatgtgatctcgttgagagaatgtggctggtcacttctcagttctgatctcacaggtgttttagagaagtgacctaattgtgctggactcctcctttttgtgacctagcaacctgttaccttcagggagcactaggagcattggttgctgttgaacagttctcacaataccaggatggagggctctcacccacagaagcacaggcctgcaggagcctaggtgacttgggttgtccttatgacttaggataccaggatctaacagacgaattcattcagggagacatgcagggaagtgtaccctacacgcagtggccctttactgagtcttcttaaagttcgtctgctttttttctttcttttttttttttttttttttttaagtttcctgacatggtgctagctgtcattgcttgctatggctggaaaactagtaagcaagcttcacttcagtccagaggcgtctttaagtacctgctatgtgctgaactcatcagaactttcacacagcagaatttcccaaataacttctttgaagaattctataaagtaatatttgtctataaaaaggaaaagataactaaagaaagtggtgtaccttccaatctttcttttctcggttttacttattttttttttagagacagggtctcactgtgtcacccaggctggagtgcagtggtgcagtcatggctcactgcagcctcacactcctgggctcaagccatcctcccacctcagcctcctcagtagctgggactacaggcacacaccaccacatccagcttggaatgtctttttaaaaaacagctttccagtctgggcgcagtggctcacgcctgtaatcatagcactttgggagcttgaggcaggcagatcagctgaggtcaggagttcgagaccatcctggccaacatggtgaaaccccacctctactaaaaatacaaaaattaaccaggtgtggtggtgcacgcctgtaatcccagttactcaggaggctgaggcaggagaatccctggaacctgggaagcagaggttgcagtgagccgagattgtgccactgcactccagcctagatgacagagaagactccgtctcaaaaaaaaaaaaaaaaaaaaaaaaaaaaatcaaactttccaggcagctagtgggagccatttgcttcaagctttgtcctcccctgttgggtctacaatgttgtataaggagaaaattagtttagagtcatggtgctgagacctgtaaatacctaactgtattcttagagaatgtgactgttaacttcctgttcttagagaatagactttggtatgttttagaattatttttttatacgaacaaatgaatccaaattgtatcattttatttagttgaggttttgctgactcttaatattaagagtgaatataatgatgtggattgatattagataacattactgtgtcagtattaactttcttgagaatggcaatgtgatatagaagaatgtcttttgtcttaggtgatacatgttgaaatagtgatagaggaagccatgtgtttgcaactttcaaattgttcagaaaataaaagatgttaacaattggtgagtctaggtaaagggtatatgagtatttattgcactatcctttctatttctctaagtttgaacatgttcagaatgaaggtttagagggaggaaaaagtaaaattctactcccttgtcctctcctgtctctctgaaggtggaaatcatcatgaatgaaatatattaagatatcagatcttttgcctctggttcccttactccacacatttcctgtcaagctccaaagccaccagtggaatgtttatacaacgtgcaagatgattttctgctaggaaggcgaaacctcaataatcgccccgttgactggctatttcagtttgttgggaggcccatgtggtgttactgcccctctggtgatgcttcatgcatagtgaatgtttcaaactgcaagattttcctctttgaggagagaagtgtgccaggtatcagagcgaatgtgtgcatgcgggagcaagcctgtcctgtaaaaccatcgctgtttacacacttaggaaactaacactgccaagaatgagcatatggcatgcacaaggtctctcaggcatgtgttggtggtttagtgtggagacctagcttaatgttttgatttaaacctggggatgcaagagcctcttctagatcaagtgtacttatgtggggtcttcattcagagcccatgttttctttagcctgagatgtgtgccctgatgtggaagctgcttgtccacatagaagcagacactgctctgaggagtattaccttgcttaggtattaggcttggatgtcagcacaaattgcatgtggccaaaataactcctgaaaacactttgagtggtccatgaattacactgacaggcacctgggaactgagactggcagaggaaacacacattcactctgggtctatgcccttggaagagagtggcagccaaaactcctacaccatgtcagccagggcctctgtggcttttgggtggtgaagagccctctgcagtggactgcccgagtttgaatcctggccccaccactcttacctatatgtccatggacaaactatttgactcctcttagtctctttccctcccctcccttcccctccatttccctcctctccttctcctagtcttctctttcttttctcatgtggtttgtctccccatattgcccaggctggtctcaaactcctgggctcaagtgatccacctatcttggcttcctgaagtgttggattacaggcgtgagcccctatgcctagcctctgtgtctgttttcatctgtgaaatgtgaatgatacttacctcatgggttattaggaagattaaatccattcatttgtaggaagcacttgtgacagtattggcacataattactttaatacaataactgccaggtgcaatggcttacacctgtaatcccagcccttagggaggcagaggccggagaatagcttgagctcaggagttcaaggcctgcctgggcaatatagtgagatcctgttctccataaaaagaaaaaataaagacaaaaagaatacaataatcttttatccacagagcatatgttggacctctgatggatgcctgaaactgcgataggactgagctctagatataccatgttttttcctatacaccaatgggcagatagcatatacagcatggaccagctggacaaagggatgattccgtcctcagcaccacagagccggactgggcaatatttcatcatgctactcagagcggcactcgatttaaaacttaggaattgtttatttctgtatatttcccatttaatatttccagaccatagttgacctcaggtaactgaaaccagagaaagtacccatagctgaggccaggcgtggtggcttacacctgtaatcccagcatttttggaggccgagacgggtggattacctgaggtcagaagttcgagaccagcctggccaacatggtgaaatcccgtctctactaaaaatacaaaaattagctgggcgaggaggcacacatctgtaatcccaactactcgggaagctgaggcaggaaaattgcttgatcccaggagacagaggctgcagtgagctgagatcacgccactgcactccagcctggcctacagagcgagactctgtctcaaaaaaaaaaaaaaaaaaaaaaaagcacccatagttctttgtagatagggggacagctgtataagcatttattactatttttttttcatttaagttaaatgcattcaaagtgtggctaacctataaagggtaaaaagtgtgcattagaattggcagttaaagaaagaaaaattggatttcttcctcctgtgggtggaaacctctacgtgatgctgctcttgtattccttgcaattgattaagagtgccttagatgtgggaaagctgtttctgatcctcttatcagagtgtaaagtaaaacatgcttgactggttaataaaaacggaagacagttagaaaacatttgtaggctgtgcgatggagtggtccagaattgcagccagtagttggtgggctggcctgtggctgctctaggaagtgctcagcacaggaagtgacctttatatttcttcctagccttactgtggctctgtctcttgaccaatgaagtgagctgactactgccatcttcctaagtaccataaatccaacagcaccgtggcaagtgggagatgctaattgtgtggtctatttggttcctacctgagaaagtgttctgtggcctctgcctaaaatcaaaggcctgaagacaggaatgttgagaaggaaagccatcaggaatcaatctgccagagccaggaaattgggctggaggtgtcttatcaggtccttatcttaacgctgccctcccagtgaagcaccaactaccctagatagaggttcccatttataactggggactttgcagccccagactcctgagtagctcccaatcccctggtgaatctgggtaatgaactaaactgctaggaatgccccagcttcccttctgactgggcctttgattatgtcacctaagcctactacccctcgcaagcgctaaagaggttgtggtctggagggagtgaggctccttagccttagctgatcacaggaacatctttttttgcttgctgcccttgaggtattttttaaagccacaaacactgactcattcaagggccacagcctcaatgaccaacaaactgttgagagaaatagcaggcccaggtcaacccttgatttcaggtcttggcagtgtttctggctgcagcctgagcccctctgtggtctggggaatgagcaggccttctcataccagaggctcagggcaagaattcctgctctcaagtttcccaagtagagtattccttgatgaatttgaatctgaccagtcatggatttcagataggaagaggtaagagtttaattttagtagcaatgctagggaaagattaaaatcctgtctacatatcatctgagaatggttaaataaatcatagcacttggatatggtgaaatgtatgcagccctcattaaacattacatctttgaaggaaatgtaatagcataggaaaatactcatgaaatatccagttgtggtggggaagagggtggagacaagaaactgtagctgtactgtggtccagttctgtaaaagcatacacatacgtgaggtgtagaaatacaccaaagtgttacctagtgattatcttgggggtgtacacacacgtgatttttatcttctatgtattttctaatatttgccaaatgtcataccctgacatgtattatgtttgtgatgtttattttttttgacacagggtctcactctgttgcccaggctagagtgcagtggcaccatcttggcctcactgcagcctaaacctctgggcacaagcgatccttttgctttaggctggaaagtagctaggaccacaggcatacaccaccacacccagctaatttttgtattttctgtagagatgtagtttcatccaataattgcccaggctggtctcaaactcttgggctcaagccatcctcccgccttggcatcctaaggtgttgggattacaggcatgagctgctgcgtctggcctatattatgtttaaatgttttattatgttaagcctcccgtagcaagaggaaactgaagttttgaatactcaaaggtggatccatctctgggtcacaggcagagggaaatgctaaaatgtgttattcagagaacaaaattcaacagcatttatctattctcttctttcagtgttgaggctaggccttcatgctttgttggtggatctgattgccccaatttatgtaagctcattgtttatgctagctttttgtttggcaggaaaattacatattcatcgatttagatttttttaaaatcttgtttatagtcaagtgatcattcgaaatatctagttcaagtacacagggccttatctgctatcccaggacctgaaaacacaatttttttttaaattcatttaatggcaagatgatgttctttgaaaaacactaactacgggaaagaaggaagcactgtttagaagcatgtgggcagctcccttctctgacttccttcctaactgcaagtgacccaggtggaccaagatgctgtcagaggccttcaaggctgaaattccattttctctaacagctttggggctggaaggctaaccagccacagaaatatctggcaatcggacagagagacatgagaccacaaagatgttgataaagcttcttatcctctgcttcccccagcctcctcattaatggcaaagattaaagacaattatatctacccacgggaactagatggatcctcctctgccctccacaccagccccccagtaaattgggtggatggatgtataagtaaggttaacccaactggaaagtagtttatgattcactttcatttcatgaaaaacaaatccaaaatgcagagcaaaggaaggaaaacaaaaggggaagcatttacagtccttagtgggttgctccaacctaaaaccccttctcattggttatctttattgcgtaccaagacttcgagcacctcccccaccccccagttttctttttttaaaagaacagaagatgaaaacgctatgagatgtatgagctctgattatgcccaattacatttggcaagcctaagacaaaaattaatgggaccagattattcttctgtgtgagatgtagtattgcccagcctaactattttagctcttgccatgctgtagatcgtcaaacaaattaataacatgctaatgggtgcctttcaggcttctcgtttatattaatgagttccactccatccgataaccagtgatttatagcactggaacttgcagcctggctctatagattgtcttttgtcactctttctggggtggagcagccagcctaacaagctaaatggtagggttttgtaattgaattctaaaatgtgaaacgcctgatgcaagaacatttcattctgatcatggctttggaaattgaaaggccttcagtacgtctcccactacccaacgctgaatgcagtctgatttgggtttccacaacttgtgaagcaagggtgtgacaagattcttaatggagggtattcatgctgagctagcatggcagttagattcagcgggctgtaaaatagctcctctaaagaaaacaatatattcttaagagccataaaagagaacccttcctcaccttgaaggtattcccacccctcatcttccccccaccaagcgtaggaggcagagagctctgactctgtgccaggcactgtgctaactactttattcttgactcattcagtcctctgtgtgcctttatgaaggaggcagcagtgttattcccattttacggagatgaaactggagcacaaagaggtgaagtagctgacccattctgagagctgctaagtggtggagcaaggctgccagcccaggcaacactctgctcctttccggctcacccgctgcttctggctttgtagccctcttatttctaatgtaagaggagtgcagattgggagccccagatgagcaaactccaaatgccttggctatgagggccccgagagtagttgctgtcagttgagcctgggaaaagaaaagccagttagcaaatgaaaaaatccgtcctcctgaaggtttcagtgagggttcatgtgctggtttaaaatgtcccatcaggagtggtgggctggcaggctcctaatggagcaggatgggccgagctgccacctccagcagcctgcagcctccttgggctttgcaaacaactgccttcattgttttctgggaggagtatactaccgtggctttccaaacacgcagctcctccaaataagggaacctgatacccttggagatcttggcttaaacatcagaggaacgtcttgcttaaatgattatttttttaaaaaaaaccatcaatttggatttcattttctttggtccatgaccattgtgtatagccgtgtcctagaaatgatccgaagacagcttatttttcataagcaacagtctggaaatttaattgatatgccattcctgccccccagtccaaacccctgcccagtctatcctttttacctactttgactttgattcttttagttcttcctattttacaatcaccagccattccagaaaaacatctgctaaaaagatccgttccctgtagtgggaattaagtacatattttaacttcagacaattttacttaatgttttctacattgcatggagcagaggattaatgcagacgtccctgaaaagctcctatgcaaccttaagctgtgtcttcaatcattcaaactgttcaagggctggaatttgaaagagggtgaggaagtaccaagaatgaaattagataagggatctttattaatttaaacatctatgcaggcccagttgttcataggaaacactgaactcttttgcttttgtgtccccaagcccaccagttttttatgagaagatcacaaataaaatgacttttaaaagtaatgggtttaggctgggtgctgttgctcacacctataatcctagcactttgggaggccgaggcaggcagatcactcgaggccgggagtttgagaccagcctggccaacatggcaaaaccccatctctaccaaaatacaaaaattagccgggcatggtgttctgcgcctgtagttccagctactgggaaggctgaggcacaagaatcgtttgaacccaagaggtggagcttgtagtgagccgagatcatgccactgcacaccagcctgggcaacagagcgagactctgtcccaaaataattttttttttaatttttttaaatttaaaagaaaaaaagtaattggtttaaaaaaaaaaaaagaaacaagatcattcctcacccctaccccaggtttctttctataacttttttgcattttgaaattagaaattaaggccttagttttatgctaaggctatgccatgaatgattgagtctggttggtaattggcaatgaaatgtggatatgtattctgtggtgtgtattggagtagttgatagccaagagtcctgggtctggttccatttcatactcaccaagtgagatcttgggcaagtcagtttggtttctctgagtgtcttagtctgtttatgctgttataacaaaacacctgagactgggtaatttatttaaaaaaaaaaaaaaacagacatttatttctcacatttcaggaggctaggaagtccaggatcaaggtgccagcttgttcagttgtcaagtgaggtctgcaccctccagaagggaattacagtgtttgtatatggtagaaggcagaaagtcaggatagcccaatgtccctgggaagcctcttttataagggccttaatccccttcacaagagaggagctttcatggcgtaatcacctcttaaaaggccccaccttttaataccatcacgtcggcaacacctgaattttgtttttttctttttctttcctttatttttattttttttttttttttttgagatggagtttcactcttgttgcccaggctggagtgcaatggcgtgatctcagctcactgcaacctccacctcccaggttcaagcaattcttctgcctcagcctcctgagtagctgggattacaggcatgcgccactacgcccagctaattttgtatttttagtagagacagggtcaaactcctaacctcaggtgatccacccacctcagcctcccaaagtgctgggattacaggtgtgagtcaccacgcccagccaacacctgaattttggaggggatacattaaaaccatagcactgagtctgagcaagatgataaaaattgggtagattgtctggttatatccagcttggaaattctccagtaggggtatgtttttgtttccggatattctatgcgaaagcaccttagaaacagttcaccagaatttggctggcattctttaagttaacctcttaaaaaatatgtagttgagaagactggagagagagagagcaagctctaggtacaaagactaaagagaagcaggggacctttaaggaaaagcaaatcattcataaatccgtggaacacctactgtgtgccgggtaccaggctaggaagtggggatataaaatgaatacgtacagaaagtgccaagactaaatctagatttccttgtgaaatacttttaaaatgtgttttctttgcatggtaagtccttttctggctacactgtatgtataaataaaagcctcacttgttgaaagtcatcttaaaactcatgaataggataggtggtaaatttctctaggtctttgagcaagtcacaggtcagagctgtgcagaagttgggcctttttaaaccaaaacattttcttcttcatcctgccataactgaagcctggaggacatcactgtccctacagccttctccaactgtggcgatttatttctgcaatgtctagatatgagtcaggatcctccttattgccatttccagaccatttctctgtttactcctttaaaagaaatagtttttttgaagcgtacagcatttcagattatgccacctgctgtctctccttatttcagtggtgtgcagttctgagattcctgtctctgccccttcctggaagatgctggcctctgcctcactgccttgctttgcacaactcccacctcattcttggcaatgtcaacatccacagggcacactggccttgtgattccttgacctactcacttccaatggtcctgtcctttatctgacttcagctacctgccctcagggttataccttgggccttatgaccagtaactgcatcatctctgaaattatcttattaaacttccttttctctgactaccattcccatctttccagcttaattttcttggtcctaacactctagtaggatcttccactgtccatgaactctcccaccctcctccttgtctccctcccctccttagattttatgccccatcacactgccttgcctttcatcctctttcaccctttctggaaaatcctaaccctggttaaacccaactctgccctctccctgctggcatcaagggagctcaatgtggttgaagaatacgcacacaccatgctgattggattcactttatttttatttacttctttagagacaaggtattgctctgtcacccaggctggagtacagtggcatgatcatagcttcctgctgccttgatcttctgggttccagcaatactcccgccttagcctcctaagtagctgggactacaggtgcacatcaccatgcccaactatgaattcactttcagtttttagcctgttatggactgaatgcttatatcacccccaatgtgatggtgtttggagataggacctttggaagtgattaggtcatgagggtggagctcttatgaatgggattagtgcccttataaaagggaccccaggtagctctttagctctctttctgccatgtgaggacacagtgagatgttggcagtctgcaacccagaagagggccctcaccagaacccagccatgctggcaccctgatctcagactttcagcctccagagtggtgagaaataaacttctgttgtttataaactctccagtctgggacactggttatagcagcctgggctgactaaggcatggtcatggtcacagtcacataagagagctttctgcttagcctgaccatcccattcattccctagccagctcactctattttcccacacctctcctctctgaaaccttaaaagcctgccatcccttcacattcaactactgactttgttttacatatcactgaaaatatattacagaagcaatcagaagaatttccttatattacctttcccaaacagagcactcttcctgcatctgtctccatataccctgtcagccctccagcagggactcgttcctcctcctgcctgtggccaacccccaacttgtacgttagggtcccacgacctctagcctgtgtaagatcattgctcctgtacttctcccctctctgctggatcattctcatcagcaacaaatatgctatcttatataacaatatttttatttttaatttttaaggataggatcttgctctgttgcccagacgaaagtgcagtgatgcaatcataattcactacagcctcaaactcctgggctcaagtgattctcccatctcagcctcccaagtagctgggactacaggcttgcacctccatgcctggctaatgtttaaattgtttttgtagaggcccggcgtggtggctcatgcctgtaatcccaacactttgggagggtgaggtgggtggatcacgaggtcaggagtttgagaccagcctggccaacatggtgaaaccctgtctctactaaaaattaaaaaaaaatagccgggcatggtttgggcacctgtaatcccagctgctcaggaggctgaggcaggagaatcacttgaacccgggaggtggaggttacatgagctgagatcgcaccactgcattccagcctgggtgatagaatgagactcggtctcaaaaaaaaaaaaaaattgtttttgtagagacacgagggctcactatgttgcccaggctggtctcaaactggcctcaagggatcgtcctgctttagcctcccaaagtgctgaggttacaggcatgaaccaccacacctggcaagaaccatcttcaaaagtcttttcacctggcctcatgcacattgtctttcaatttccgtcttctaactcatagcgatactcctgggaagcattggccgtagtcagcaccatcattttcccactgattctctcccatcagcaacaatcaaggtctcatctccactgctcctttgaaatcactcttcatatggtatcaacaagttgtgtattgtcagactcaaaggcccattgtcacttctttcttgatctctctcttttctttttgacagcgtctcgctctgttgcccaagctggagtgcagtggcacaatcactgttcactgcagcctcaatgaccccaggctcaagccaccatcccacctcagcctcctgagtgggtgggactatggccctccaccactcctggctaactttttaaattttttgtagagatgaggttttgccatattacccaggctgatctctaactcctgggctcaagggatctgcctgcctttgcctcacttaaagccttgagccactgtaccctaccattttgttcttttaacatttattttgacataattttcagatgtatagaatgttgcaagactagaacaaagaattttcatacttcatttacccagattcccaagtgttaacattttaccgaccagcctggccaacatagtgaaaccctgtctctattaaaaatacaaaaaattagccaggcatggtggcatgcacctgtagtcccagctacttgggaggctgaggcaggagaatcgcttgaacccaggaggcagaggttgcagtgagctgagattgtgccattgcactccagcctgggcgacagaggaagactccatcttgaggaaaaaaaaaaaatttaccttgttttccttacccttacccttaccccagtctctctcacaggtgcgtgtgggtccacatgtgcaaatttttttctgcaccttggaagggtatctcagcagcatttgacacagctgggcacttattccttcccggaacagttcctgcacttggcgcctggggcatgacacccttgattctcatctttcctcaatggcttctccttctcagccccttttgagaattattccttctcctgagggttgagagagctctctaggcccacccttgggcctctccaccctggggcctcttcttcatctgctccagttccctaggtgaccccatctggctctgagagtcacttcgcaagtactaccagccaggacgctgccctcagccaggacgctgccctcagccccaactctcctccagcctcctcgtgtcccatcaggtgtcccctgcccagaactgcagtcctagtctcacctcccctgcttctctccctgggccccccctcgacatcagtaaatggcatgatttatagttactctgctgaaaacctagcagctatcctcgattcttctttctcacacaccatacccagtctgtgagccagcctgtcaactctgccctcaaaaaacactgtttccactgctgttgctctagtctgaggcacagccctcactcttccactgcatccatgacctcctaacctgtctccttgaccccactcttgctcctcaaaaccagagccaggttttaaaagttcaactcttaccatgccactggtttgttaaacttagaataaaatccaaggcccttccacagtggaccaagtcatttgtgatttggcccctaccttcctcagtgactcctttattaccaccctctgggggtttgtacctgctgttaccttcacccagtggccccatcacaggctccctgacttagtgcaagtctctgcttcattgccacctcctccaggcagccctccctgacctccctatgagggagctccactcccctgtccctctccgttcgctttcctggcttgacttttcttcctatcaacaactgctatctgccatacctgtattttcttattgtccatcttccacccactagaatataaggtccttaaggcaggactttggtctgtttcatatcaactaagtaccttgccacataagaagtatttcataagtatttgttacatggacaaaccagtaggcaaaggtaagatgactgactggattcggaccacagtagagaccagtggtcctggccagccttcacatggtctgtgaaggctgccatcttcacagaccatgactaaaagaacccgaggaaaactagctgttttcaggccaaggccaacatcttaacactttgcaaagtaggaaagatcatctttgtgccataaggcatgtagcttctgcagctgttttagaagtttccaagtgagtctttgctaaatcactcccagtcctctcagagaacactgcggcttttccttccctcattactggggagggagcagggtataggatgaacagaaggaatttagccttggatccaggggacttaggccagtgtctcaagcagaatgaaatacactatatgcttgacttaaggtctatttagatttgctcctcccttccctaatttggtagatttcaaaaatatatgggctagggtcgcaacttggcaaattagtatatatggcttatgttttaaatgtgtaaatcagttgcattcaggttcctagtgccttcgtttaaatgatacctttgtattattggtgtaagtcactctaaaagccaaaaaaaaaaacctcttattagctacaagcaaggatgtttctttacagaccactttgcccaaccaaaagcagcccatatatgttaaataattttttaaaaattaaaaaaataaacatatcaggccgggcgtggtggctcacgcctgtaatcccaacactttgggaggctgaggtgggtggatcacttgaggtcaggagtttgagaccagcctggccaacatggtgaaaccccgactctactaaaactacaaaaattagcagggcatggtggcagacgcctgtaatccaagttactcgggaggctgaggcaggagaattgcttgaacccgggaggcagaagttgcagtgagccaagactgcaccattgcactccagcctgggcaacaagagcaaaactccatctaaaaaataaaaataaaaataaacttatcagttagaaggatagttttcagtcctgtgccccacgccgaagaacactgtgccatctctgttctactctgtgatcttggaaactagaattgccagttttacagcccatgtgttctgctgatggaggggtcttcagctttccctcctccacattgggaatgtgcttacagaccccttcatcccagtgggagaggctggctgggaagcaaaaactggtccacttgggatgaagacatcaaagctgattctgatccaattagaaaaagagactattgtcctcttaattcccaaagttatcaggctgttatgaatacttagccagtttccttggggattgctgtggcattgacttagatctgaagctcattgatattcacacataatgacaaaccccattcccccatatgtgcagggagcctgggaaggctgggagccacttgctctgtttccactggcagatgaaggctttcagatttgcacagtggctgtaaaatgctgtttttcgtcagttggtcttaaatgaatgttagtctcttgtgtctcagaaagaagaatgtgaacactttattgggaaaaaaatttataactgtttccatttatagcacttcagagaatgaacatgagaaatagtttaagctggtaattttagctattaggcctgtctgtggaattcctggagacacttatccatccgtgttcaagacaaaatgattctctcctctgcagcacacactcttcttttgttccatggtgtttctgcctctggtttttctttctttctttctttgtttttcttttttcattttttatagagacgaggatcttgctatattgcccaggctggtcttgaactcctggcctcaggcaatcctcccacctcagcttcctgaagtgctgggatttacaggtgtgagccacagcacttggcactctggtttttcttgaaggcatcctgcccttgatgtctagatgattttcatatctgccatatgtggttaatgagcttcttaaacaatctgctatcttcgattactatcacctattacagagaagaaccacacatttaaagtttaccaagtattttcctggggttactgggattggcatggactgctgaggtcagggaggaattagatacaatcttggcaaaagaaacttttggccttctctgctccatggccacaatgtaaaccttaagtccaggtacagtcttgaaaatgcaaattattcatgggatcgtgcaagggaagatagctactttgatacaaatgtaatctagaaagacacttgctgtagttctgtttcttctgtacttcaccatttgattatttcggtttcatctcatgatttttttccacatccaaaatccatcctaaggccaatagaactgatttgctgcaatttaggaatccctttcaaatgtcttcagggactaggtcatttatctatgttaatttgttttaaagaagctgttggaggtgaaataattggaaattgtagaagacaactggggagagtgaggactatagttagttacaggccttgcctaaaagttactcaaatataaaccttaaaaaggctgtgtgggtcaaccaacacacatctgattagtcccaggagctggttgtttctgggatactggttgcctagagggtgtgtttttatcatctctcaggatttggttacctgtccccaggcctcctttgttctggtctgagggtcttgtgctgagggcaagacccactctgtccagcctgcctcggagggtgtctcatgcattgcctctgaactccagaagaagccatttggatgggaaggaagacttggggtcagggtagcttcaagttatggcctgagcagagtgggtttgtgggctcatgagaaatgccattagtttcctccttacggtcctggagtcaggcatgggtaaattccaactctgctgcttacaagtagtatagctttaggaggcaaattgcttggcctctctaagcctcattttctacctttgagaatgggataatgataattgagttttcatgagataaaataaaacaatgtaggtcaagcacttagcacagtgcccagtgcatagtaagcacgacattagcattaaccatggctgttgggacttagagactttctagatgtgccatggcgaactcctgaaattaattgcaaaatgctgtgttgatgtgtactttgttttttcctgctctattacccttcatcagattctaaatatggaccaagatagaataggaactttgatgttaagggaagctgagtaagttgttacagaactcagatgtttgagaattgacaatcaagtcctcctggacctagaagcataagagttctgttagattagctcttgccacccctgtcagaacttaactgttcatagatttatgttattgacccactttcttcaagagcagaggcagtttttcaggcagtgctgacgccagaattggaaaagcagattctcatttaacaaacatgacctcagtaaaaacagccatgttgttggtctccatttgaaggcagaggtagggattgggagtatgtgattaataaacccagagggactatgaaggtcactgctgatgttatgaccagatgcaggaacgtccagaggaaggctatgcttcgtgtcagggccatagagcagagcgtttccatgtatcttctgtcacagcccctataccttccttgtgcacccaggagtgatttctgcaacaacacagaggcctagcctgcaggagagtgaccttggaaacgtggctgagggtcatccttcactgtcatctcccggtgggcccgtgagctccctaactaccccctcccgcccctaccctcctcctgggccgaaaacaaccaagagactaatgaggcaatggaagaatcacactctgtctgttctgggctctgtctgttctgttacaatttttttcagacctgatttaaagtgctcagaaaacttgcaaggggcacatggcttctaggggacccagctattggaaatctttgattgttcttgcacttaggataactctgaagagtgaccttatcttttgtttgttttctttgtttatgcaatggggtgtttttaggtgattgaatagaaattcgtgaagaaaaagtaagatggataaaaggatggatagaagaacagatctagctaagtaggtgataagacaagtatagcaaaatgtaaatgataggctgtagtctaaatagtggttataaaggtgttcactgtaaaaaagctttcaacttactggcttttttctggagtatgtgaaaagaaatgctttcaactttcctatatgtctgaaatttttaataataaaatattgggggaaatgagttgaaatatctggaaaaataaaatttagataatggctagagaaaattttcatggatttgggattcaacataccacccccagcctcattattatccccattgtgttcaagctctctcttcctcgtggcttattcattcagtcttgatcatctctggccatcatgttctaagtgatgtggatacgatggtgggacaaggtggctctctgactgtggaacatgcatcctttcacttttctgggggagtggagacagacaagcaatagtgagatgttctataaaaaagaaaaaaaataccacggaaacagagtgaggagagggttcagctgccttacggagagggctcaggaaaggcctctccaaggtaaaatagaaggggaccctcgaagtcaagtaatacctggggaagccctagcttgtgcggagagcctctgtatgttgtgcagaaaactgtcttcaaaaattggaagatttctgaagaagtaggtctatttggtgactggaaccaactgctcattcatagttgcagaattgccccagccatataaagaggagatctgtttatttatttatttggcagagtcttgctctgtcacccaggctggtgtgctcttagctcactacagcctccacctcccagattcaagcgattcttccacctcagagtcctgagtagctgggactacaggcgcacatcattaatttttgtatttttagtagagacagggttttgccatgttggccgggctggtctcaggctggtctcaaactcctggcctctcaaagtgctaggattacaggcatgagccaccacacccagccaagagatctcttcttttgctgtgtatattttttaaattatcatacagtaaatttgacttttaagggtgtgtgtacagtcctatgagtctttttttttttttttttcaataaagacaaggtcttactatgttgcccaggctggtcttgaactcctgggctcaagcagtcttcccacctcagcctcccgaagtgctgggattacaggcatgagccatgacagcacccagcccaagtcctatgagttaacacatgtattcatttgtgcaaccaccaccatgatgaggaggcagaacagttccatccctccagagctccctcctgctatgcctgatagtcacacccttccctcccccagccccggcaaccaccaatctgttctccatggtggtagttctgtcttgtgtgaatatcatataaatggagtcatgcagtatataagcttttgaggctggtttcttttactcagcataatgtccgtgaatatgtttctaagcctccaaggggagacatgttgagagtcctagctaaaaggcttttgttttgctgggaatgatgagaagagcagaaacagcatgaaaatggtgatggatggtgagaaccaaaaacaggaatgggagatctagaggtggatgctggaagaagggtgctggcgaaggaacctaggaatggaaagggggatcttttttaaaatattttgaggccgggcatggtggctcatgcctgtaatcccagcactttgggaggccaaggcaggtggatcacttgaggtcaggagttcaagaccagcctggacaacatggtgaaaccccatctctactaaaaatacaaacattagctgggtgtggtggcgggtgcctgtaatcccagctactcaggaggctgaggcgggagaatcgcttgaactggggaggcagaggtcgcagtgagccgagatcgtgccactgaactccagcctgggtaacagagcaagactccgtctcaaataataataaaaataataaagtagggtctcaccgtgatgcccaggctcgtcttgaactcctggctccaaacgatcctcctgcctctgcctcccaaagtgctgggattacaggtgtgagccaccacatccagcctaaaatttttatttactaatttttttttttttgagacagggtctttctatgttgcccaggctggcctcaaactcctgggctcaggcagtcatcctgcctctgcctcccaagtagctgagactacaggcgattataatgttttcttctataaatgtgcaatgtaaatctcttttgttttccccaactatagtattgggtcattgagttgaatttatttgggcaatgtaccaagagactcctttcccaaggtgcaagtaggcccaggacagaggctgcccatcaagtttagaccatcccagttacagacacaagatgcaggaggggaacttttagcttagtaaaagaagaaacaacggagtaaaagaagtgcttgcctctcagtaacctgggcatctcttcccaaaaagcagtcagaagcacccagccaattgagatgtcatagaggcccatgctgggagagtggttggagagcgctacccagctcttaaaaatactgaaatccctgagtgaatctagcattttgtgcacgtgtgacggctccagggtagagcagcaggcccctgtgttcccagccatgctatcttaaggatgaaccctcgcctggcctccctaagattgcacgtatagaatggccttgtaaactacaaaccttttgaggtgtttttgttattactgtccatttctgcacctttgtggttaagaaggcctgcaagataattaaaagaggggaaaaaagggccaccctgttttccgttggcaaggatgcattgccatgttcctctggttaccgccagagcaaagcacgcactaggtcctgctatataatgatgaatccccagggacccccgatagtgatcgatagcacccgcctaactctggggcttgcataatgagctgcgtagccctgccagagtcatcatccagcctcggggaaacctcccctcccccactgtccacttgtacagcaaatgtccccctccccaccggtcccctcggttgggtttccttttgattggcagagaccctgtgatttccgcctggattgcctgacagcccccctccgcctggtctaattatgccagggctgttcttgggccacagcgaccccaggaaggctttatcagattgtccaactgaccgtgaccagatctccagcacctgcctcttttgctgactgaggatggaaggtgtttacacacagcggagctggcagctgattgactggccagggtcctgggctgaggacggccagtctgagtgtcagtgatgaaaaatggggtctgcctctccacccagcctcattaacacccctctggctccaggcggtatcaggtggggtgtgtgcaggcacacagcctgctgccagtgttcagggcctcctgacagatttctggctgcagtgctggacttgggtccatctcttatcattttaatttatttacaaatatttatttattttataaatgttcctatgtgtgtttaagccctccgctttctccacctctctggttacagttacccatcccctgcttcttgttcatccgtcaacaactcaccctaagtatgacctcctcacctctgtcttccactctcacaccttttcttccagcgtcagctttcatggaagccagtcaataattcctgtttgcaggccgatttattagtgtgattaaagttctgtttctgaatagaagctttggtgctgcctgccttttccaggtacccaagggtgattctggttatacaaagaggttctgtaaggcagctcagacattggggccaatccttctggtcactctggcaaatggcccattttgataagaacattaaatcatccaaatcctttagggttacacgggggtcatttgctcattaatcaccagtggcctgagaagctaaaggtttcccaaagctgagccatctctgccctacaggatgatgtgacgtggcccattgtctcagttcagctgagcatccctgggctgagcccagttcttctatctgagacatggattgggccttactgcccagagtgaggtctctgcaccagcagcatcggcattacctgggggctcgttagaaatgcagactctcaaaagccccaccatagacctcctgtatcagagccctgtttggacaagatcccagggattcatgtgcatggcacagtttgagatgctctgcattatcaatccaggtagggaagccctcctttagatttaccaagaagctggagaactcagcaacttacttccataaaactggctagtgaagcattctctcttccttctggctttagaaaggatcttattaggagataagaaagccagttggaagcctggttgctgagagtaaggaaccaaatgtggcccctgggactaagtttcctggcagctgtgtctccttattcttggggaaatattttgcagttgaaagaccacctacaaaaaatagtatcctcaacggtcaccttgtgatgctaccctctatgctggctggcatttagttataatattctgtcctgacccatgctctaatttgcctttgattaaatttggaactttgaagcttagatttatgagatggtattttttctcaatatatactttgatacttgctaaatggatatatgctacttctttaatcaagacttttttacaggctgggtgtggtggctcacacctataatcccagaattctaggaggccaaggtaggcggatcacttgaggtcaggagttcgagatcagcctggccaacatggtgaaaccccatctctactaaaagtacaaaaattagctgagcatggtggcacgtgcctgtaatcccagctactccagaggctgagacatgagaatcacttgaacccaggaggtggaggttgtagtgagctgaggtcgtgccactgcactccagcctgggttacagagcgagattccatctcaaaaaaagaaaaagatggccgggcacggtggcttacgcctgtaatcccagcactttgggaggccgaggcaggcggatcacgaggtcaggagatcgagaatgtcctggctaacactgtgaaaccccatctctactaaaaatacaaaaaaaaaaaaaaaattagctgggcatggtggcgggcgcctgtagtaccagctacttaggaggctgaggctggggaatggcgtgaacccgggatgcggagcttgcagtgagccgagatcgtgccactgcactccagcctgggcgacaaagcgagactccatctcaaaaaaaaaaagaaaaagactttttaaaattttataactaatgcattcaacatagacaaacttaaaaaatatggatcatgaaaagcacattacaaggccaggcacggtggctcatgcttgtagtcccagcattttgggaggccgaggtgggcgaatcacctgagttcaggagtttgagaccagcctggccaacatggtgaaaccccgtctctactaaaaaaaagaaaaaaaaattagccaggtgtggtggtgcatgcctgtaatcccagctacttggaaggctgaggcaggctaattacctgaacctgggaggtggagggtgcagtgagccaagattgcgccactgcactccagcctgggcaacagagtgagactctgtctccaaaaaaaaagaaaagaaaagaaaaaagaaaagtacgttacatcaatctatctcactgcttggagtttgtgtcaagatgttgatgtgcatatagatattttctttacaaaagtgtgatctcacttttaatactattttaaaacctgcttttcactcaatgtattataaatatctttccaaatcaataaatacagctcttctacatgttcattttcaatgccctacaaggtatttcattatatgaaatgttctatattacaatggtcttaatgtttgtgtcccctccccaccccagattcatatgttgatacctaatcaccaatgggattatattaggaagtgagacctttgggaagaggccccagagagctgcttcggctcttccaccgtgtgaggatgcagggagaaagtgccatctatgaaccagaaagcaggccctcattggacacttatctcccttgatcttgtacttcccagtctccagaaccataagagatgaatttctgttgtttctaagtcacctacctacattatggtattttgctagaacagctcaaacgaactaagacatatataatggacttatgtaatccatcgcctattactaggtattttgatttatagtttatttgtcctctgttatatcagcactgctgtgaacttcatctgtaccaaaatatttccatacagtctcaacgacttgtttgggataattttttgaataatatcaaagtgtgacatttgaataagagaagaggcacagtgttccaagagctagaaggtgaaggtaagccttgcttccatcctgcgatgtagcttcgtgtctgtgaatagcaagcaacttcagatgaataagctatcaacatactggaactcggtggtgcagcttccttgtggggatgactcttaggaatcatctggattttctgaagaaaacaaatcatttgggttctggccttcattgccctgcccagcgggagtccccgaagggctgtgctagaatttcagagcatggttggcacagcgttggtgaaggttacaggattgtctagacaaaagggcccaggggaggcacagaggctctgttagtgggtggaagggatgatgctgtgtgtatgtattgagccacaccctggatttcagtaggagccagaataattctgaggcttgggtgtgggcagctgtgctaaacagggaactcagggtggtttcaagccagtacagagctaggacctgggatctaagattggagcagacacacatggagaagcagatagcggaatcaggatcagctgtctgagtgggaaggtcttagagaacccttgctaggtgttcaccaggaagatgcccacacctgtacactggatgggggtgcatgttcctgggccaggagggaccacgctgggtgttctgcttgctgagacagtggtttgggtggaggttcccattcctggaatgcctagaactttgctgcttggcccagtatgttctgggctcccccatttaaggcaactatgaccactttcattgccaccacctcctcctagcttgaaacaacctcccctgctttgctctatctgtgccacaattaaggagcttcccattttcttcattatattgcgggtagttatatgtgtatcttaggaaaagtagtatggtgtgaggaaagcacccaaggactttgagtccactgcctcttcacttaatgttctggctcctccaattgctgcatcacccttgggtaagctaattaacttctctgagcctgagcatccgcatttattaaacagggattagatacttacctcgcagggtggttgtaaggattagaagtaatgacatataaagcacccctcccacaatttagtgtctggccagatggtgggtgttgagattgtccgttattactgaggacttaatgtggtctagtctgtaagggttgacagatcattgtggcagatcccagacatgcttattatgttagcagtaggggccctgaggtcaaaaggcttaggacagctatcctgcctcccagacctgggaggaaaagagagagaaagaggggctccagggcagttgtcagagttaggaaggtgctgagtcgccacaggcatcagaggaggattttctgaatgggtacagtgaggacccagtggtgctctctcctcaaacctacctgttgggaaccagatcagcccagcaggctggtagcagagccatggcctgggaacctgggtcagcctcactgtcttagctccagactcacccactccctttgcaatgctgtgctgtgtagtggtaaagcctgcacacgctaggtcccattcctgcgccattcttcctgcttgtgtgacctcaggcaagccccaaacagccttgtgactcaatgttctcatctgtacaatagggattatggcacctatcgcatagggtccttgtgaggatcaaatgtttatttatgaaaagcatttagagactgggcacggtggctcacgcctgtaatcccagcactttcggaggctgagtcaggtggatcacttgaggttaggagtttaagaccagcctgaccaacattgtgaaaccctgtctctggccaggtgtggtggcacgcacctgtagtcccagctatttgggaggctgagtcaggagaatcacttgaacccgggaggccaaggttgcagtgagccgagatcgcaccattgcactccagcctgggtgacgaaagcaaaactccatctcaaaaaaaaaaaaaaaaaagaagaagaaagaaaagaaaagcatttagaatagtcactggctgtaaaagttattttctctgtgagtgttagcaccttctagagtttagatctttatgtgtcgggccttttgtcttaacatctgatttcttcttgagagtagaatccctgtctggtccatttaacccccactgtacatagtataaagttaaggattcataaataagtgtcagacagataggttggggaagctcaggctatgacgccaaatagatctgagttcagattctggctttgcccctaactctgtctggatctttgacttctctggtctcatttcctcatctgtataatggaataaaatagtaggctctttataggattataatgaggattaaagtaaagaacagaccgggcatggcagctcactcctataatcccaggactttgggaggctgaggcagaaggatgacttgagccaggggttcaagaccagccttggcaacatagcaagaccccatctctatttaaaaagataaatataaatatataaagaacacattgcaaagcatgtggcagtagtgagctttcaggaactggtggtgctaatgaataaatagcaccttagtaatgctcattctatctcactcacaaactggacagttcatgcatttgctggggtttcattttgaagtaagaggatggtttgtttctgcttagttttccccagtgactgagaaccctagcaagaaaacgaaacacctgtgcagacacattatacccatggagctgcatttctgtatgtactttttgcaggccattatcagacattacactgccccagaggttaattgtaatctccagagtccattgcacttccacagtggctgggatctttggccactttcccagcctgtttatggggagcctgacctgaagcacatctcctaagtgttttccaagttggcactgagtctctccgacttggaaatgccagcacacagctttgtgtgtgcaatgatttagctcttatgaaggcgccagtgaaatgcccactcctacccgggtgttggacattttggagacctggaaagaagtaagcagtgttattgacaagcacaggccctgcaggggactgtgggaagttaggcatgattctgtcccttgtgccttaacaaggactggtgaggacactcagccattccctcagtgcatcaaaatggaggccagcacattgtatagccttagtttctctatcagggattagggtgataatgattaaccagaggacttagggtcaactaatccccaaagtggttctcagaatactatgaaaatgtagcacaggaaaaggttccatggccaaatatatttagaaaatgcaatgcactgtctttccttctttgcattttataatatgcaatttgcatattcaaggccctgagaagtcctgcagtaaggaaacaaacttaaccttgttcagtccagcagcacccaaatcaaatttccatgagcatctttttccctttaacatccccagcagctaggaaaaacactgaagaaattctagattatctaattatccccaaagtttatttttatttttttaacttttttttttagtttttttgtattatatcctgctccttctgtagattgcaaaagtttataacaagtgatatgtgaatattaagaaaggagaatctgagccaggcgcagtggctcacgcctgtaatcccagcactttggcagggcgaggcgggcagatcacaaggtcaggagtttgagaccagcctggccaacacagcgaaaccctgtctctactaaaaatacaaaaattagccaggtgtgatggcaggcacctgtaatcccagctacttgggaggctgaggcaggacaatcgcttgaacccgggaagtggaggttgcagtgagctgaggctgtgccattgtactccaggctgggcaacaagagcacgactccatctcaaaaaaaaaaaaaaaaaaaaaagagaatctgttgttttgtttcattttgtttttgagacagagtcttgctctgtcacccaggctggagtgcagtgctcattataagctctgcctcctgggttcaagcgattctcctgcctcagcctcctgagtagctgggattacaggtgtgaccaccacacctggctaatttttgatttttgtagagatggggttcaccatattggccaggctggtctggaactcctgacctcaagtgatccacccaccttggcctcccaaagtgctaggattacaggcatgagccaccgtacccagccaaatctgtttgtttttttttttaaataagacatttaggaaatgaaatgaaaagtatttgataacttcttttgtagccactcactcctagattttatcatgaagaattgcatgacttaccaatccaccaccctcttgaaataccagggtcatgacatgccaaaagctacctccacgggctaagacctgaacttgagtaacaaaggtaaaatttgaaatttcaaagatgttctttatgagaccctagattaactggggttgcatccaaatggtttcatttgaacttttaaatacatacttctggctgggcacggtggcttacgcctgtaatcccagcactttgagaggctgagtcgggtaggtcacctgaggtcaggagttcgagaccagcctggccaacatggtgaaaccctgtttctacaaaaaatacaaaaattagctgtgtggggtggcaggtccctgtaatcccagctactcagaaggctgaggcaggagaatcacttgaacctgggaggtggagattgcagtaagccgggatcacaccattgcactccaacctgggtgagagagcaagactccatctcaaatacgtacatacacacgtacttctcagccaagtgggcacctactgttctgctaagggatggagacatggacctgcaggttcgcattctcctggatctgagaggttattaggtcacgtctgaagcctccatgccagctaaacaaggaacagtggatcagcagcgcaccttgtttattgttgtagtgctccagtcgtccatccctctctccccttgtcttctgtgactggtcaagctaatttgatttgacgtcctggcatttgagatttgtcaagtattgtaaccctaagcagtactaatattgaaacccatacttgaaatttatgtaatccagatgtgcatgccaataaagcagagatgaaatggcaggcccggatgggggagagccaggctgggtggggactgtgtgtggggaagaattctgtggccctatattttttccacatggtatatacagccaagtaggattttaggaattaatattttcccttaagagtagtaactggattatgaagtatagcttcaagtaagtaccagtattggttttatttgtagccaagaataactgattaagttttgaggagaaggaaggcaatctattttgagtgctttttaaaacttttaaattggttaggacccttcaacagtgtggtcttgggacttattagtcacatcgaatcagaacttttttttttttttttaaccaaacaagcagcactggtgaaccaggatttgtgacatggctctctgatgttgaattttttctatttgagcatatcattagaagtcccccctaagaaacaaagactgtgacccctgagttgtcaattcaaagccctcccacactggtaatacccaaatgccatttctattttctgagagctcaatgagtaggtggattaaatgtgaaaaggtttctgttcaggtatttgacagtggccttgattggagcctctctaccgtctagcaatggccctgttgtgtgacttccaggacgacagctgtcttctcgggccatgacctcttccacctgtgggatcacaggactgtgtccagctgacccaatgagaatggtataagtgctttatctcatagggagttctgagtcaaaaattttggtgttcttgacatgaaagattggcagagtgtattattattccttagtgttctgtgcataattaacaaccacccttaactagacctggtagcccagggaaactggtcagaccagctagtgaaagcaggtggaaaatgacctcgagggaagcacggagtcgggatccacattgagtggaggtgacttgtagtggattagggtgctcataaaaaccgtggttgcagttggtaccagtgtcatctgtggatatttctaggcaggatatcaagggtcagcttgctactttagccccctcttaaggcaggatacaaaaaaaaaagagagccctgtattcaggggaggcatgtgacatgccatggtcccccatttcccctgccctaaacatctctggagaaagtcaagtgtgtgtggcttctacagcagggctggatgtttttccctggggtaggaggggcatttacctgcttttcttcagccattattaatagggctcattccaggaggggaggagaatggtgcctgtaactcagactccccagcacagcctcggcctgcaggcttcagccctgttggagtcagggcttgcgtaaggaatgctgtcatggatccaagccagatagattacaaatgatggaatctgatgtttcctgttgggtttggggaagggattcaatgtggtgtgggcttaggtccccacagtttacctcagaaatagtcaagatgcagggagctgaatgaggactctcgaggcagctttgccagcctggagcccaggtgagtcactaccacctcagaaacatccttcagaggccaggattcaggccccaggcgggagtcggagcatccaggctgctggtccggttctctccactgacgtcatcacccccgcttagtctggaatggctggcaacctctgcctgaggatgagagctggctggaagtggaaaagcaggaaatgtttccagattggaaactcaaggcacgtttgcgcaatactgcactcggccaagactgtgtggctgacctgcatgcctaatgggatcccaggtctgaaacagggttctgcagaaccattggtctgacctcatacctcccacctagacacaatgatatcttcttggccaagaaaaaatgacctgtatttttcttttcttttttaatgttatccagctgaggtgtgcctttaaaaaaaagaaaaaaatatatacatacacacacacgcgtgtgtgtgtgtgtgtgtgtgtatattccaatccactacttaacgcagggatgcaaagatcatattaaaacggctataaccagaaataagacaactgaaagaatcatagtattaataaagggcaaactgagagtccaggtgagaggaactgcagtctctggtgatggagtgcagcctggtggtttagagctccaaaatggaggcccgtcagcctgggtttgaatcctggctctgtggcttactagctgtgaccttggcttctgtcatcttctgttcttttacttattgtaagaaagggtgatagtgccacatcatgaattagtctaagactcgagtgcacttccacgcaaagtaagtccttagtaactggtagctgttatcatagttaaatatcttttttttttttttttttttttttttttttgagacggagtctcgctctgtcgcccaggccggactgcggactgcagtggcgcaatctcggctcactgcaagctccgcttcccgggttcacgccattctcctgcctcagcctcccgagtagctgggactacaggcgcccgccaccgtgcccggctaattttttgtatttttagtagagacggggtttcaccttgttagccaggatggtctcgatctcctgacctcatgatccacccgcctcggcctcccaaagtgctgggattacaggcgtgagccaccgcgcccggccaaatatcattatttttgaggcagggtctcacttgttataattattgttattccttccctccagcctgctttagagtgatgcccatgatgcagtcaaaggtgtctgagttcctttcacttttctagatcgttgccccagtactagtgcataaagggatgcaaggttttaggaactttgaccttgaagccagactgtgtagccaccgtcacttctctctgggaggctgttgtcagatcaggccctgttccatccctctcctcggaggtctgccagtgttactcagccatgaagcccatcaaggggccacagttcagatggaggaggagtctttaagcagaagacagaatgcctggggatgctgttgtctggggtcaaatgctggcttcgtccagtggagaagtgagtagaaccagcccactgtatcccttctgcatcccctgccagcttactctctgaagcagcaaacctggagtcggtcgaggttccccaacagagagaccccgggccttgcaagagcaggcctggacagcctggagttttctctcaaaattgtaacatgggtttattccaaaacaaagcaacaaaagtagacccctggtgtatccttggctcacttccataaagcatcacaaccattaaccaaaggaaaagaaggcctgagccctgtggcggaagtcaggccaagattttcctcactcccctccctttctgggacccaggaatagtaaaaatagtaaacataattataacaaaaaatttaaaaaaatttttttaatttaaaaaaagctaaaaatcatggaatgtttgctaaatgtcaggacggtttaagtactttatatatattaagttatttaatcttcctagcctttaagaaacgctattattgttgtttcccttttacagattaggggactagggcacagagcagttatgtaatttgcttaaggtcacacagctagtagtggccatgccaactttagaactcagacagtctggaattagaggctgtacacttaaccacagctctgaactgcgtctcatgatagttatcaagttgttatagaaataaaccatatatacgataaaatgatatcaaactatacatacacaacattattccagtgtgtatggtttgtttgtttttttttttttttttttttttttgagacggagtcttactctgtcgcccaggctggagtgcagtggtgtggtcttggctcactgcaagctccgcctcccaggttcacgccattctcctgcctcagcctcccgagtagctgggactacaggtgcccgccaccacatctggctagttttttgtatttttagtagagacggggtttcactgtgttagccaggatggtctcaatctcctgacctcgtgatccacctgccttggcctcccaaagtgctgggatcacaggcgtgagccaccacgcttggcctgccaatgtgtatggttttttagttttgctattatactctaattgtgtgagatttaaccatctggggaaagtgagcaaagaatacacaggacctttctgtattctttttttttttttttttttgcagcttcctgtgactctataattatttccaaataagaggtcagaacaaaagcaaaccacaatcaacagtgtattgaattcttattgtatgccaagcactgtgataaacatttaacatttattattttatttactcctaacagcaacccaataagatgtgggtactatcattatctttagttacagatgaggaaactgagggttggcaaggttaataagttggataccatcaataagaagtagtatgaccactgggtagtacccacctagatttattataaacatcaaatcagaaaaagcacctggtatatggatgttctgtaaatgttgatttccatgtgtttgcttggcaagcacagagccctgctaggtgccatacacagtctagcattagccagtccaagcctctgctggtttggctcacaggatgctagggatataaggacaagtacaacatgtttccaccatcaaggagcatatagttggggaacagtgacttccatggttccaaaggcaagttgtatgtatgtatgtatgtatgtatgtatgtatgtatgtatgtatgtatttgagatagggtctcactctgtcgcctaagctggagtgcagtggcacaatcacagctcattcagcctcaaccttctgggcccaagcaatcctcctacctcagcctcccaagaagctgggaccacaggtgtgtgccaccatacccagctaattattttttgtagaggtggagtctccctgtgttgcccagggtagtctcaaactcctgagctcaagcaatcctcccatcttggccttccaaagtgctgggattacaggcatgagccaccactcctggcctagttgtatgtatttagcatatgaacccagaggaagtaccctcctacctcagagctccctcccctggagccagagtctggatggttggacccaagccaggcaccttcctgggactcaaggacacagtgagggtttgaaagagggagcattatcaatcaccatgttggatggcatcagtgattattatcttcatttccatcaaaggtgtcttgtgaaagggtgtcatcaagttcaatttagtctgaatcaggacatggcaaggacttattttctatttctgccctgggctggacctgtcttgaataattcagtgttcatcatctacttctaaaagccgagcttcctgcacttccccgccatcacccgtccctatacagctttatccagggtcatgtggctgcttgttactccctgtctcatctccatcaaaaacccacccatccccacctctggctgctagtaaatgagtgttttcaggaaagagaatcaactttaggtatgtagtacaaggtatcagctgcctaaagtcaagaggcagccctcagggcaaaaggcgtcacacagtagcctagggacatctttcaacctagcactctttaaaaaaacgaagaaaacccaaaacttgacgatatgctatcatctaaaacttgggagagtccctgatctggcaacagctggctagagctgaatagcatctgccccctctagataggcaaatgctgttcccaccccccaaactccacttgtttaccttgcatgcctggtccccaagagcatctggttgtcaacctctgaggtggaggaaggaaagccctcaggctgggcacggtggctcacgcctgtaatcccagcactttgggaggctgaggcgggcggatcacctgaggtcaggagttccagaacagcctggccaacatggtgaaaccccatctttactaaaaatacaaaaattggctaggtgtggtggtaggtgcctataatcccagctactcgggaggctgaagcaggagaatagtttgaacccagcaggcggaggttgcagcgagccgagatcgtgacactgcactccagcctgggcaacagaatgagactccatctcaaaaaaaaaaaaaaaaaggaaaaccgtctacagtggtgaacagattagatgttttcaaagatacgtgggctatgtttgatcctgaaaccatgcaggaagctgcccacccacccttctgaggccagtgttacatctagtcctcttggtcggggagctaggattctagaggagaattctcagccctgcatcaacaccctgactgcggcaggatttctgaaagagccattgggggaactacatgctgacttggatcgttgtgcatccgtgcatgaagcatccatgagaaaagggctggtctggagtgtttctggctgatgggtcaccagataaggagccagaagacgtaagtttcagtctggctgtaccacttgctaagtggacatttgacttgtttgattttcttatctgtaaaatggggataatgtccactgtgcctaccaacagggtggatgagaggatcgagtcacgtgattgtatgaaaatgttatgaactgtggagttgtattgaaaaattaggtggtgtgacagctatggtaggctgtggaagcacacacaacctctctgagtgtggaaatcaggagttgacaagctagggccagtgggccaaatcccatccactgcaaatggtttttatattttgaaatggttgaaagataatcaaaagacaaatgatgttccatggcacatggcatttgtgtgaagttcaaatttctctgtccacacatgaaggctcgttgggacacagccttaccatttggttgcaagttgtctgtggctgctcttgctctacaacagacgaggtggggagttgtgagagagaccacatggtccacaaagcataaagtatttgctacctgacccttagagaaagcttaccaagctgtggcctaggtcatggaggggcagaggctgaatcccctcccttcttttcctttgtttcttctgccacccagaagtaggtgctactgcaaatgggtggcccaagcaaggaatatcttcagatctcacagaagcaaatctgctgtgaccacagcaaatctgccctaaacaacagagccaggaatttctcccagtttaattcctatcgagtgcttccatcctctgagctccagcttagaggcacttcccgatgaaaaccacagcattcgtttgtaaaaccaatcccccttttagcaacaaccacaaaaagagaaggggctgttcctgtcacagtgggcatttctccatcgtgttcactaccccaggggcctggtcagtggtgcttcctctccttggccacaaactggcaagaaacacaaagggcaactgctgttctgataaggctgtggggggcatcagcgctgaatcatgtcccccagaagatatgttgaagtcttaacccctaggacctcggaatgtcactttatttggaaataagtaggtgtggatgtagttagctaagatgaggccccactgggtagggtgggtcccccatccaacatgcctggtgtccttagagtaagaggggcatctgaatacagggtgaggcacacgtggaggatgcatgggatgtggagggctgtgtctagcagacgaggaagctgggaggaggcaacggaaaacttaccagggtcccagaggaaacagggccctgccgacaccttgatttcagacttcttgcctccaggagtgtagcagaataaagttctgctgtttaaagcctcccagttcatggtactttgttacagaagccccaggaaactcacgcagtggctggcccaccctgccggtgcagcattccaatacccttccagtacctgtcattatccctgttctacaaataaggcagtaaaggcacggcaagttccaatgactgcctgaggttttggctagtggcagagcaggaatcaaacccaggccctctgattccacgctgctgcagtggatgatctgggaaatgtcagccgtcctgtccccatccctagcatccactaagaggagagagtgggttctcagactgatggcatcttctgcttcgtgttcctcattccaggagctctgaggtagttatttttctactgtgagcatctgaacttatttacttgacttcttaaatatgtacaagaaaaacatcaggccagacacagtggctcaagcctgtaatcccaacactttgataatccaagagaacccaagacaggtggatcactttgagcccaagagttcaagaccagcctgggcaacatggagaaaacctgtttctccaaaaaaaattaaaaagttagccgagcatggtggctggcgcctatagtcccagctactcaggaggctgaggctggagaatcacttcagcccgggaagcagaggttgtagtgagccgagatcaagccactgcactccagcctgggcaacagagccagaccctgtctaaaaaagaaatcttaaaatagggagcatgttttacatacatttgtgcattatttataataaaaattgaagaggagtgaactctcattttcttagcatttacagtgtatctgaagaatgtgcttaagagatccttggggaggtaccccaaaaaacccccgtgtgcaaggcaatttaataagggaagtctccaatgtcctcctggaaagcataagaacactgatacttccttctcagatagcacctggttggccaagtccttgtgtaacaaacataaacgaaatccacaccaaaaactggagatgatgcactttcccccactagggtgattccttttcaaaccttcaactcacccactggagaagaaactcaggttgcaagtgaaatcttaccattcaaagtctaggattttttttgtttcaaatattgccttttctctgtgttacaagtattttcaaacatgcagacatgtattcagggcccaggtttagggtttctcaactacggggatggaaatgtgggatgggggcagggagtgatgccgtcaggatggggaagaggccagggttggggtccaggaaagagaatgccagggaccttcagaaagtcagcaagactgagccccagtggggtgttcctggccagttgagtctgtccctgtctgccgtggtgacccaggtttctccatggaattccaccagcattggcttgctcttctgagggctgccgcctctcgagcacccagaatttgaatgcctggcctcagctacagagtacttggccgtcgtgacacatggctggcagcatccgacgtgcacgtctgctgctgccaataaagagaattgtttctttctctgaacagagtccatttacattgagagaattttcctctcctacctccaccagcacttcctccccgccccgcccctccctcccctaccaccccacaaaaaggaaaaagcttttggggaatttgtttttagtgggctcactcaaaaggagctttatgtttattttctgagtggcctctggactgttgtgtccatttatcatacctcccccgcctctccctcccctcccacccactggcccccatctctcctctactctgaaaacctaaacttcatcaaactgttcctaacgactaccacatgtctacagagggcacagggggtgggggagggggatctgggaaatgaagaaaccctccaaggagcacagtagcgtattaaaattcaatggcttagtcatcagagttttcagcccaagcaccgaagaaaaataaatgaatgttctgtaacagtcttgtggatctcggaggaagggggtggcaggggagggagaggagaggagatgttgtggtttttagatagaggagttcatgctgtagagaacaattaaggcctttgctcagaaataacaagacacactactgttttcctgcttgctggaggagtgcatagtgtcagggctggcagggattggtctgatcggccagctctgctcacggatgaggaaactaaggcccaggccagggatgtgacttctttagagtcatataagtagaggccaggtgcagtggcttatgcctgtaatcccagcacttcgggaggctgaggcaggaagattgcttgagcccaggagttcaaggccagactgggcaatatagtgagaccccatacttccgaaaaaaatgtaacaatttgctaggcatggtggcatgtgcctggagtcccagctacttgagaggctgaggtggaaggattgcttgagtgcaggagtttgaggttacgatgagctatgatcgcaccactgcactccagcctgggtgacagagtgagaccctgtctctaaataagtagataaataaataacaaaaatgaattcgtggtagagatggaactggatcccctcaatcattctttcctcccaactcaggcagatctgcttggagtttctgatggtgttttattctgttttttgagatggagttttgctcttttctcccaggctggaatgcagtggcgtgatcttggctcactgcaacctctgcctccagggttcaagcgattctcctgcctcagcctcccgagtagctggggttacaggcacctgccaccatgcccagctaatttttgtatttttagcagagacagggtttcaccatgttggccaggctggtctcgaactcctgacctcagatgatccacccacctcggcctcctaaattgttgggtttacaggcatgagccaccgtgcccggcttttttttttttttttttttttttttcttgagacagagttttgctcttgttgcccaggctggagtgcaatggcatgatctcggctcaccgcaacctccacctcccgggttcaagcgattctcgtctcagcctcccaagtagctgggattacaggcatgtaccgccacgcctggctaattttgtatttttagtagagatgaggtttctccatgttgatcagactggtctgaaactcccagcctcaggtgatttgcccaccttggcctcccaaagtgctgggattacaggcatgagccaccacgcccagccaattctgatgggttttaagagcatcagctcttgggctgagaactgccatggtgtccgcaaggtactcaccccattgagggtagctgcttcagtgacattgcaccaatgctggtgggcctttctccacccatcctctcccccagctaggccggtgaaagggcctgggtgtttgtgagttgtcttatatgctcaggcttcaaggactcaacctgcctctggaacttgttgcttcggttctatttttccttgtatccctgcatcttccttaggaaggatagaccagattgccctttcctttgcttttttcaaatgaagcgactgagtcacgaggaagtgagaggacttggtaaaatcctgagttgatagtgaaagaaatggttctgcaatgcacatctcccctttccctgtcctccatgctgattcagatccctcattttggtgaccaaggacattgaataggagagatattgtgaaatctttgagctcaaagttttagaggagaatgaagccaagcccctgttccgaggatgaggaagtggggtcgggatgaggaggggtctggccagggccagcaggcattacaggctcgggccagcagaaatgtggcattcaccctggactagctgtgggacacgcttcgaacagtttaatgtcccaggagggattgaagtgtggccagtccatgccacccaccactggtcccagaacagggagagcattgtagttgactattatattggctttgagtctccgtttgggcttctttgatcagcttgggagaaaactgaaagaaaaaggtagacaaagtaaccacccaactcagctaaattgctggcagcaaaaagtcaaagaaaatcagattttctgagcaagtttgaaaggtctccctcgagtagctgggcaaattcccatggatctgggccatgaagcaacatttccaaaggcattggtctgctcttgcttcctctgtgttatggcagaaacactggctgtatccagacctctgaccgttcttcctgtccacagcacagagacacatcgccatgtgcctgatgtgctgccattgaatcctagggatggtgtgaattgaagagcccatctcacagaggaagaaactgaggccgagagagctagggaaaccctgctttgaactctcggcctcgagactgctcactatactccctattcagggcttccctccaagctgcttctagaagatcagatgtgtttggagactctcctgatggccctaaaactctcgccctttttctcctgctggagaagcctagtaagaaggcctgtgttacttcccttagagaaaacattgggaaacttaccctggaagaccactgatctcacagagcaaagccagccaaacgtcagactccataaagacgtcagcatgttaaggagaaccgtctgggcctgcagtactcacacacaccagccttgttagcagatgggtttatgttctccctcccgtgccacaaattgcaacctccatggcagataccagtgggggactggggtcgggcctgaggacagtgtcttgcgcatgcctgatgtgtgtcgtgtgtcactttgtgggctaggagatagggctcctgggggtaggtcagcccattcatccttgtttccctactgtgcctagaattgagctctgtccccagagggtgcctacaacatgcctagggaatgagtccctgggctggtaatggaaactcttaacccactgctgcacctggctggcttcccagcctctgcaagaatgagtcagccacctgcaggagagcctcagggaagagcctagcacttccaatccagataagctttggctacctgggcctgtgacaagtgacaataaaaggaaagcctgagcagacctgtgtttataagcatgagggaggggtctgcactcaggtgtgctaattaaaagctgagaacctgcaaaagaacttatgtttaaaccacacctcctctctccatccaccctgccttatcctgctggttgcttttgttgcaataaaaagccgattttatttcccccacagagcctttgttaatgaatttctaaccagaacctaaagttagggaatgtgaagggggagtgtggccctcatgcaagcgcatgcacacatatggactctcacacgtaagaccaaacactccatggctcctctctgtgtccccccaacccccaccaaaagcagcatttcttgagagatggacccttaacctcagtgtatccaaggcccaaaggacctaatgaaaaccagagctaccaccaaagcatttctgatgctaaaccggcctccggagtcctttagcatcagggccctgggctgtgagtgagctcagttcaaaacaaatctggggcccattatctccctggcctgatttcgtctcctgtggctgccctattagacctttcctggcatgatgacatgttttgccgggtccttctcctttgtccaatttccagggcagtgtttaggcagctcaaagtagagcgcagtgctgggtactgacctcctgggcacctgagggtttgcaggtgacaatcgcccacaagaggtggcaggaagtaggatggtgttgacctggcaagctctggtggaagcccttgagaaaacagtattgcattattgtcactgttaataatggccctttatttgagctttgctaggacaatgctctaaacaaagctgagaggaagaaacagtccctgctgtggggccttgtaatttatcaaggctaatggaggaagaaaaatccactggggaaagattgtgggggtgggctggcgatagatttgattgttgctggaggtgtaattggacgatacccacagcctagctatgcatccctatttgctttgttgcaacaggactgtgtttctagcccctcctttgtcttgtctagttccgctggatctgagtcccttgaaggcagattgaggtctaagtcctggatctgatgtagcagcatgacctcaagcgggttcctttacatctgagccttaggtttcctcgtctgcaggggaggtacccagattggaaatcatgagagtccaagccccttaaattgctaaaggaatactagctgccaaaaacagatgacaaaagtattgaggaaagaggacttgctagaagtgtctttgcatttcttagaggatccaaatcccaaggttggacctaactgaggccaccatttactgagagtgcaagcatcaaacctgttgcatctctggacatcatttatttctctatcaaagaactgttgcaagaatggttgcctcccaccttttccacacaaggatgtgagtcggtgttgttttcttgttgggtgctggactcactgtaccaggggtatggtggcatttcagggctggaaggcctctatgaaaaccagcaccccaccctgccaagttggaggtcctgctgtcctccagaaatgctggcagccacaagctgcagctgtgttgcaacaagtctgatttaatttggggggtggtacagagatagcactgtgatgttttttaaaagccagaagaatacagcttattcaccaaactgtgaaactggctatgccttgggtgggggaagccagaggaaaatgtgtgatagcgttttttaaaagagtaaaaatggtgataattataaatttactataatgcccattattgcatgagatctaagtggattaactcattatagctaagtcagcatcaggttttcttaaggcctcttcccttctggggtttataattctgttcttatctttctattaatttataaggtgggaagccaatcattgtcttttgtaatccttgttatcacccccttgtttcctcagaagtaaaaatcaggcaaaaaaaaaaaaagtacttttttatataatgcaattggagtaaacctgaaaatgttggtaaataggaggatttctataagttaaattttctttcaaatgtatgaaaaaaacagactaccttgtagaatcccattgtaaatagttttgtcaagcaaggatgtgtccatatatttgtctttgtggtaagcctggatctttcctgtccacagctgtgacactgtgtactcaagctgatacatcagtcactctagcagcatttctgttttttatattaacttatatcctttctctataaaattttctaggttattaaacctaggtgagcgtgattgagagagatgtgaaagtgccttacaaagtgtctttttttggggggggcaggcggggagatggagtcttgctctgttgcctaggctggagtgcagtggtacaatctctgctcactacaacctctgcctcccaagttcaagcgattcttccacctcagcttcccaggtagctgggattacaggcacccaccagcacacccagctaattctttgtacttttagtagagacaaggtttcaccatgttggccatgctggcctcaggtgagccaccacacccagccttagaaagtgtcatttagatgggagaaagctatacaccccacaggacaaggacgtgtggctgtacagtagggtggaagaaagcctggaatggaaatggagtctcagtttgccctcagctctgccctcaccttttgcatgaccctgggcaggacacttagtctccatgggcttccatattcacatctgtaaaatgaggggtaccgattggatgctttaagaaaacctgtgagataagcgtttcagaattcttccaatggtgctatcccagaccaaatgtccatttaagaaaaactattaatcccttatcaatacaatttatcctttgaaggaggtagctgtgtgtttctagacaacatcccgaggagtaactctatctggggattccgctgccttttcagagccctgcactgcagtgtgtgctgacatgtcctcttcagagacccctcattgaattacaccgtgatcagcggttgggaccttctgtgtttattattcaggaggcagtacacagccctccgccctgcagagtgcaggtactttatcagctaggatcagatgggttattgaattcagaaaatcttcattttgtattcagcttgcttctccctgttccacttgatcacgttcctcattgactctcagggcccttggggatttcatggcgagaagcctccaagcgctgaacggtgggtacacttctgtcctctttgtacttaggcagggcacccaggaaagcaattattccagagccttactttacatttagcagagattttctttttcatttaggccaggcgtaatggctcatgcctataatcctggcactttgagaggccgaggcaggcagattgcttgagcccaggagtttgagaccagcctgagcaacatggcaaaaccccacctctagaaaaaatacaataaaaaattagccaagtgtggtggtgtgcacctgtgatctcagctcctcgggaggctaaggtaggaggattgctggagcccaggaggtcgaggctgcaatgagctgtgattatgccactacgcttcatcctgggtaacagagaccctgtctcaaataataataataataaagtttatttaggggaaggtctctgggatttgttgactagtcctagttttctaggggtgctaagcatttgaggacagctatgaatgtgatccagccagttttgaaacgccattgataggttatatttctgattaatgtaaccggtcacctttctttaaggctgcaggccagatcccagctgctgaaagggagagaaagagacagtgataccccacagatctgaaagtcaaggaaaggctgaacttctatatcacccagaggagaatacctgactatttctgagaaggaggggagctgagtaggggagaatttccatagagttctgcatttcctcttcattctccacaaaacaaaaatctgttcatcgtttgcaagtttctgtggtggttcttacctattccccaaactacttttaagagcttagggttgctgggtacatttcctcccttatcttccctgctttattcctgctataaaatcaccacacttaattcaaaccagagttgtttgatctgccctgccaggcctcgttcagacttggtggtgctgactagcaaaagcccaggccagacacatgagcttatgacctcactgtggaggacaggcagagagcagagggcggactagggtggagagacatacctgggctattagaccaaaatgctaacaagcctgaccccaagaacaattgcaacagtaacagtaacaacagcaagaattaacaatagcagcaaacatacattgaacacttagacttcaccaagcaaataaatgttcaatcctcacacatagcataatgtgagcagaacagcaggtgaaaaacaaccaggtatataaatataaagtgatatgccccaccactaccacacgcatatgtactacacttccctaacaagagcaggcacttctggctgggcacagtggctcacgcctttaatcccagcactttgggaggccgaggcaggtagatcacctgaggtcaggagtttgagaccagcctggccaacatggtgaaaccccgtctctactaaaaatacaaaaattagctgggcatggtggcaggtgccttactcaggaggctgaggcaggagaactgcttgagcccaggaggtggaggttgaattcagctgagatcgccctgctgcactccagcctaggcaacaagagcaagactccgtctcaaaaaaaaaaaaaaaaaaaaaaagagcaggcacttctgtagtgctcactaggcacagttctaaggactgtgcatattttaactcacaactctaagaggcaattcctactgctgtttccatttgatagatggcaccaaaacactgagaagttaaataagttgcctagagcaacactggattgtcttcagtctactattgtgtcattaattccatctctgtaaatctttgacaggggtatttctcatctgtaagacaggtgtgatggtacctcctcttacctctctctcactgtgaggattaaagggaaaaaaaaatgaagtgggatagatatttgtaaattgtcattccatattcaaatgacctgtggggaaaacctgtgagggatacacagtaatagtggagaactgttgggatcagtgacacaaagtttataggccaacatcacaatccataaagtatgccctgggacccttaatcctgagatttctatggggacaacacagattggagttattgaggcgggtcctgacagtggagttgcaggggtcattagagaactgcctgaaggctctgctgcccctgcctgggccttgcctccttgagggactctgggctggggactcagggagactggggtagcatggcctgtgactgattgggatgtgctttggagggattaggtgggtccatgtgattattaacaacccctaggtagagaatatctcctcaaggccaggtgcagtggctcacgcctgtaatccctatactttgggagggtgaggtaggtggattgcttgagcccaggagtttgagaccattcagaccattctgggcaacatagcaagaccctatctttacagaaaataaaaataaattagccagatgtggtggtgtacgcctgtagccccagctactcaggaggctgacataggacaatgcctgagtccaggaggtcgaagctgcagtgagccatgtttgcaccactgcactccagcctgggcaacagagcgaaatcctgtctcaaaaaaaaagaagtcactcctcagtcgtattagctgcatttcaaatgctcgatgattgtgtgggttagtgactactgtgttggacagcacagatacagagcactgtcaccattacagaaagttctagaggctacctgattcatctgagtatatgatggcaagccttctctttccttggctgggttctgtgcccgtttctagtgtaaaaactctcctccaccttcacctcttagaggcctcctggagatgtggcgctctgggttgcttttgataagtaccaattctaaatgctgcagtcgctttttcttccttctctgctgccatagagccacatcttcctgagccacgtgtggctcttgggttcattttcttttcattttttccaccatggtgttctgaatggacaagtcagaattcagaggttggtattaagacctatcttcataacaagcccacttcatcggaccataggccacctgctatttgtactaacacttggggtcatttcatgtgtgaggaataatgaagttgcactgtatattcagaactttaatatttcttaaataagtttgtgttttaccagctaagctgctcagaaggcatttgactactatgagtggctctgtgtgtagatgagccctggttgggtagcagttcagagcaactcaagaaatctggccagagacaggacaaactctgtctcatccttgcagctgcacagccatgacagtccacaaaacggagaatttgccagcaagattttttaggttgtaattttcctcttggttagcctgtggctctccgtccgtcccctccggagtgaaagagcgtgagtgttgagataagagactgggaaaatagacttcatgaaccatttttcacttgggaaacaaaaaagtcattggtgattttgccttgagtgtttggaacctgacaccaacctcgtcctccaccaagcccccaaatgtcacactgtacaggttgccgacaccatgtctcattagcgacttgattctcccccaaccctggcttcttttcccaaacaaaccccctacaactggaaggtcagaaccccggacagctttttacacagccaccatatggtgtttgctttagcacggatccacaaatgatgtgttatttcagtggaggtgcagaaaattatatgacaaaaccgggtttgtttctctgctagaaacccaaggctgaaatactgcagtattccttcaagactgactcagaagacgaaagggagcctttcccagaattagggggcattcaccagggaccagaagggaggggggagaaagacaacattgcactggtcactagtggctgggccagtggtttattttctgtctgtgttttattaagtttatgttttccatctgactgttcctcgtgtgatttatttgtctctaggtgccccccgccccaccccccacaagtagatgataaaaccgacggcagtgtggacaacacagttgctgagactctttggttggattttacgcaggaacagaaataggtgttgggctagtgccagggtgttttgtgaggacttaatctccacctagtgggttctgcaccattttggactgaatgctgatgtcctgaaaactgggctgggtagtgatgcccgaaaggaaatgatcaggagttgggttttacttaagaagacatttggaatgtccttgaggccattgtgggatcacatttctccccctctatttttatggctcctcggataagaccggtagaggaggggaaaaaaaatgtatttaatttctgggcgggcctggtggctcacgcctgtaatcccagcactttgggaggccgaggcgtgcggatcacttgagctcagcagttcaagaccagcctgggcaacatggtgaaaccctgtctctacaaaaatataaaaattagccaagtgtggtggcacgtacctgtagtcccagctacttgggaggctgagacacaagaattgcttgaagttgaagttgaacttgagttgaagttgaaatcgcttgaggttgcagtgaactgagattgtgccactacactccagcctgcgcaacagagcgagactgtgtctcaaaaaaaaaaaaagaagtttttaatttctgactcacttttctaatttttagaaatataacttagaaccatggagcagcttaaaggattttgaatcctgagcaccttgtcctttttgatctgaggagatccctgccatgggctgtctgtaccgttctctgctgggtgcattccttccttttacttcccagagttgaggggaaaggtgagaaagtgatgtggatcctgatagggctcctgggcaggacaattactctaggcccttaggctagaggtcaagtttaggagaagatcacacaatggaaatagtttaggagtttagagagtgaagtgcttaatccgattcagcttgagccagatctctgaatttcagttttctcatctgtaaatggcataaatgtgctctgtttgcttgttgtgaacattgaatgatatggtatggatggaagtaatttgtgcaaaatttggctttatgcctttgttgtccggtatagtacccactaaccatatgtggctatttacatttaaattaattaaaataaaatcagggctgggcatggtagctcgcacctgtaatctcagaggtgtgaggctggcagatcacttgaggtcaggagtttgagaccagcctggccaacatggtggaaacactgtctctattaaaaatacaaaaattagccaggtgtggtggcaagtgcctataattccagctactcgggaggctgaggcaggagaatcgcttgaacctgggaggtagaggttgcagtgagccgagatcataccactgcactccagcctgggcgatagagcaagactctgtctcaaaaaaaaaaaaaaaaaaagtttctaatattcactggccttattttaagtgcccaaaaaccacatgtggctagtggctaccatattcagcagtaccaccatacatgaatgtaaggaaacaggttttaataaaagcttccattggccgagcacggtggctctcaaatcccattactttgggaggctgaggtgggaggatcacttgagcccaggatttgagaccggtctgggaaatatgatgaaacttcctctctacaaaaaaagaaaatacaaaaattagccaggtgtggtggcacatgcctgtagtcccagctacttgggaggctgaggtggtaggatcgcttaagcctgggaggttgaggctgcagtgagctgtgatcatgccactgcactccagcctgagtgataaagtgaaagtctgtctcaaaaaaaaatcaaaaagcttccctttatttctcggtgtcagaaagaacacgagtttatgagtttacagtcatggaagagattctgcagtacaaatgggggtaataataccttccttatggtgttgttgtgaggatttaataaaatagtgtctgcaaagcatttgactcagtatctggccttgataagtgctcaagtgacttaagtcgtttaagtcatgacttattaagctgtgggtactgttacactgccactgctgtaccacataggaaactacaaatctacatggccagtgctctcacggtccacctggggagagacccacgaacttcactgagggaggattggagagggggacatggtagttttaagctcaagggccaaacaaggaagttttctcttcagtgccctgcataccagagaaagatcccttccttgggagaatgaagagttttgctcccttccagcaggtaatgaaggaggagaggacactgtgcccaggcaggaaaaagcagcaataactacagacattttgcttcctctgtggctccctggtaggttcccctgaaaaaaaaattttttttttttttttgagacggaatctcgctctattgcgcagactggagtgcagtggcacgttctctgctcactgcaacctccgcctcccggggtcaagggattctcctgcctcagcctcccgagtagctgggattacaagagtgtgccaccatgcctggctaatttttgtatttttagtaaagatgaggtttcactatgctggccaggctggtcttgaactcctgatcttgtgatctgcccgctttggcctcccaaagtgctgggattacaggcatgagccactgtgcccagccttgaaagcaggaatttaattaatttaatgagtggggctggcttctcagagctgtgcaggtctgtctgcaacagggcaggggccacaggagttgccgacatgaacagtgctccctgtcactctgaaggaagaagagagaagaatcccaggcctctagtgtgtcttctggcccaggtgaggcctctgggcctgtggagatggcaagtgacccagggacgggtgtgagatgggagaagggggtggagattctcccagactctcctgtgctttccacctggaggagctggggcttctggtgtggcatagagcagccttgccatcctctgggaggagcattgaggagatcacttggactgagcctttcccaggtggagatggggatttgctggaaaacagaagaggggacctaggggctagcacacgtaggtttctccaccaagggcagctgccaaagcagctcttcctcctgggggtggaggggtggaatcgggccctgagccatgtgcaggccaggtgacagccacctgggttgggcaggagaggcccaggtgtccaagctcccaggaggtcccccagcctcctctggcccagctgggagtccagttggccctggtactaggttagggaggtctctggtggttgcacgttataaaaacatgtttgagtagaaggtggaaaataagacaggagaggattatttgaagtaggggagccccagggcaggagagcttctaagcctcaggaaggtgctggaccaggaccaggaggctgtctcccaatccccctcctggccccacccttccccccattctctctccctgctctcctctctttcaggcaggttggagggttgggggagtggcacaggagatgccctagcacaggttaggaatctagtctttctcttagggtcatgcccagcggtggtggggaggtcatgatgtccagatggcactctccccctgtgactgaggagggctggttaagcagtggtcattatcagctgcctggatgctccaaagacacctattcctaaagggaagtcagccccaagccagggaagagatggggccagtccaaagaaaaggctgataggaagtggggagatgcgatggttcaggaagaggctcgtgcatctggcctcctcgctgtcactcctgccacggctttcccaggcatggagtcgtggggctctggccagctctggtgtgggggctcatgctgtgtcaggtgacttcctttcagctcagcctcatgaacccctggagcatgaactccgaaccaccatccgggccttgctgtgagttttgcagctttcatgaaactctcctcttccctgggattgcaagcccctgggtggaggggatgggagtggggtggggctgactttggcagcttagatccctgagtgccctaaacactgtgactcccaggatgggactgggtgaggaaagtctcctccactggctgcagatttccagtgagcacaagaggaaaacaataccaggaatgatttggatctttttctatcgttcaagctcctgtttttttagtctgcggtgaatcactcctcatgtctctgtagatagcctcacattctgctttagttgtttcctgaggaacagttgtgtcctccactccattttaactttctttactgtaattccttatatctgtgtagtgctctgacttgaagaacatactcacctttttgcattgcacctggtcccagcaaataaaaaaaagttcaggagtcttacacaaatgcacgtcagataatgagagaaagtaaagaaccctccatgtactctcttatagctcagagagtgcgcggcttcccccagcatagctgacatcctgctgggcatggcatggacaccggtcaacagttggcccaggggaaggaggaggacagggtccctttaacagagccagccaccctagcatttcactggtgcctgagacagtgtcgggagctgtgtttctggctgtatttctctgtgtggtccccctttggagatgagccccgcctcttcccctggggctgtcactcagccagagcagaatcagtgtcagcgctgtctgagcaggctccttgcctgtcactaaggcatgattcacagctgagtgatgccctctgaaatcagggtgcagagcccacgcccatgggcagcctcacccgctctattttggtgttggttgtcacagaatatgggaggagccattctccttgcctctgagaggctcctcctacttcccctttacaacagccaggccagcccctattaagaagccagggtagaagatttatctcttagcccaccagcttctacctgccaactccatgggtgtagcctgagagatcagaaggaggagtaaatataggggtaaaaacacatgtttgatggcagacagacctggatgtgagtcttgctttgcctttaactagctgtgcttccttgggcaagttacttaacctctctgaacctcggttttctcatatgtaaaatggcaatgatggtttctacccccctagttattctgaggattaaataggcagaaggtaatttgcaaagtgccttacacacctggtaggatctcagtaatggcaactttagctttattagagggagcagagcatttgtagccgcagaaagaagtttggggttggtgctctctctctcagggagggaaacttagtgaaggcttctgaggattgggaggaattgctctggagactagaatgatgaagcgtctttctgccatgtctgttcactttccacatgcatcgctcctctttcaggatgaagttttatctctgtttctgcagaaagcttatcctagggtttgtttgaaaaattgttgcagttggccacaaccctgccatttgatgtcaataaattccacttgttttctcccatgagaaactaagctatttgggcaaggaaggaagagatttcaagattcacatttatcgtcactttgttgagcaagtatttattgcatatgcactacatgccagacatcttcatgggtgctggggatgattccctggccctacagattgcagtctggttgtactagaggactcttatggccccttaagaagaactggggagtcttcatttgcccctgctcttgcactgaaaccttcaatgtctacttattgccagaagatacaaggtccttaatgcctagataccctcagcctccatctaccttgccagccttccctcctctgtgctcttagaacacccagctctccaagacccctgttctttcagttccaaggcagcttgtgcttttctgccttggctcctccctagaatcccaactcctatcaatctttgcctgagtttcccagctctatcttccaggaccagctcaaggtgtcaccagatccccagggatgcttttatagtcactgagcaccattggggttattctgccagagccatgtagaccactctataccagcaaggtctcatttcacagccaggccacaagctttgtgagaacaggactgtgaactgggcttcttcagccctcctgatgttatagagtgatggatgctgaagaaatatttacttagctaggcatggtggcacatctgtagtcccagccactcagaagctgtggcaggaggatcacttgaacccaggagttcaaggctgcagtaagctgtgattacaccacggcactccagcctcggcaacagagcaagactctaacaacaaagaaaagacatttcatatatttacttaactgggacaaagctccgagttagatgttcaagtggggtagtggggtcaagctcaaatgacctccccctttctggaaggtcatgaaatgacctgccaggaggcctgccctcttgtaaacattctaggccctattgtactagaggatattccccaagtgctttctactatttgagaagccttggtggggatattcttgtcaaagctactttacggctgttgcttttgtagaacctgcagccagctctggatatttttatgtgaagctattatttcaccacttcttgccaactttttcattaatacatatatcgtcctacactgaccacagttgcagttcagggccagattctgaagcttgtccttaaaggcatgagcttcagtcattgattcagtggtggtcccattgaccccagctcccctcaaggctgcgcattcacgagggtgcaagtcatgaccacttgcaaattcatgttgcgagtgtctttcattttgtttgtttgtttgagacagagtttcgctcttgttgcccaggctagagtgcaatggcacgatcccggctcactgcaacctctgcctccctggttcaagcgaatctcttgcctcagcctcctgagtagctgggattacagcatgtgccaccacgcccggctaattttgtatttttagtagaaacagggtttctccattttggtcaggctggtcttgcattccctacctcaggtgatcggcccgccttggcctcccaaagtgctgggattacaggcgtgagccaccgcgcccggctgtggtatgcctttatgcagtgtgtgatagttttcctgtatttactagacatcagattgtgactgctcccatagatttggcagttgaaatacccacaacctcaatgtgtcctgctttgaaaagttgtatgtttgtgttcacttatgaaaaccacacttgtgaactaattaacttgttttacgttcttaaggaagctgaggggagggtgttatgaccacatcaaaggcccaaacagtacctttggttttcctctgaaggcagaatcacccctgaaatggatcaggctgtaatccactttactttctgctttttaaattcctactttcagtaatagccttcctggtttctaggaatgtagaatggaaatgaagtcataattaaaggtagtaaggaagggttttttttgtttgtttgtttgtttgtttaataggaaactggtagttaaccctttaaaaaatgaacagaggccaggtacagtggctcatacctagcacttttggaggctgagatgggaggatcacttgaggccaggagcttgagaccagcctgggctacaaatgagatcccccaccctctacaaaaaaattaaaaatgtgctgggcatgatggtgcaagcctcccctagctactggagaggctaaggtgggaggatcacttgagcccaaaggctgcagtgagctatgattgtgccattgcactccagcctgggtgacagggcaagaccctgttttttttttttttttttttttttttaagaaaaattatagataagtaaattgaatgattgctacctggtgttccctttgggttttcccacagtggatccataagctgagcaaggaccttgcccaccaggtgtagctattctttctccctgtgcttgtgtaatacacagcatatacatgccttcttcctcgagttaagacataaatgcccaacagatatgtgtctttctcctttatgcctctgaaccgatttcctcatgtacaaaatggtgccgataattacttttctcatagagttgtttaaatgttttctcataggaggtttaaatgaaatggtacatgtgaagtgcttagcagagtatctgatttgtagtcaatgcacaatctgtatcagctattgctataattggtggtgtcattggtttgctaagatttcttggcctgcattttggccctggctgggccttgactcctcaatacatgtacagatgctccttgacttaagatggggttatgtccagataagcccattgtaaattgaaaatataaatcaaaatgcacttaatacacctaacctactgaacgtcatagcttagcctagcttaccttaaacatgctcagaacacttacattagcctacaattggacaagatcatctaacccaaaacctatgttataataaagtgttgaatatctcatgtaacttattgattactgaaagtgaaacacagaatggtggtgtgggtacttgaagtactgctgctactgaatgtgtatggctttcccaccactgtaaagtcaaacatcataagtcagggaccagctgtctccagcattcctccttcgcagctttgggagggggtggtgctggcatgagaactaagctgaggaacctgtagcggtggctccaccagccaacaggccaagacagctgcacaccagaggccttggcccagcttaagaaatggaacttctgggggccaggtgcagtggctcacgtctgtaatcccagcactttgggaggctgaggtgggcggatcacctgaggttgggagttcaagaccagcctgaccaacatggagaaaccccgtctctactaaaaatacaaaattagccgggcatgttggtgcatgcctgtaatcccagctacttgggaggctgaggcaggagaattgcttgaacccggaagacagaggttgcggtgagccgagatcatgccattgtactccagcctgggtgataagagttaaactctgtctcaaaaaaaaaaaaaaaaagaaaaaagaaaaaaagaaaagaaatggaacttctggcaaaaagtgatttgttgagcattctgaggctcaatacaaagaaactcatttgtgtaggtatgaactttggaaaaaaccacctaaagaagtatgtgaggttttctgttgtggtagggttcaaagcaagttgaaatggcgaagagtacagatatcaagaaaaaggtccagggagacaagatttgtcttttttttttttttttttttttttttgagatggagtttcactcttattgcccaggctggagtgcaatggtgcgatctcggctcactgcaacctccacctcctgggttcaagcgattctcctgcctaagcctcccaagtagctgggattacaggcatgcaccattacgcccagctaattttgtatttttagtaaagacagagtttctccatgttggtcaggctggtctcgaactcccaacctcagatgatccacctgcctcggcctcccaaagtgctgggattacaggcgtgagccaccacacccagcccaagatttgtcattttaaaaccaaacaaaaaagcccttgtatcgaagtttggataagaacctatccaaccttggccaattttgttgaactctgtgggtttaggaaacccacagaattgcctgaggggattttgttgttacttttttgttcagcagaagagtctccctttgaatagaattgtcttttaggaagagagaaaaggaatgagaggtgtgtctcctggctgatccagcaggccccacgcccctcatacccttataggggcttgtgccaggcattggcctgaacgttttagaagctggcagcaaagccagtccctgagtgacagatatttgtggccccaggatgaggagggcctctctcccctgctggggcccatgtgtttccgtggctgcagcttcaaggcctgggtttattactcagtttaccatttagtctagaacagcacagtggctcctgatactttggggacagctttggattggagctggtgagatgggcttttcacctctactggtgctcagtgtggaagcagcagcccaccaaagagcttccatttcccttcattgtgaaacaccatgctttggaagggaccccagggtacatcagagtgtatgagccccagaagcaggctgtgccgtggtctggaaggtggcagccccgtgagccacccagacaccagctcctgctcatctcatgccttccctcacctcatctggatcagaggagaaaagcaaatccacaaaaatcaacacaactagagatcaattgctatgccagacccagttagtctggtgagtgccgcaggtgtctccacacctcagataattgagaattaggcctcaggacttgcacagccaagcactgcctgagactggtctgcagtcggcttccatagaaagatgccggaagtggatacctggtcctgggtggtttgctgtagggggtgatttcctccatgaggaaaaccaaagaatccaaagccctctgcctgcaaggaaagttcagtggggaggaggctgtgctggtcctcagctctcgccagggtggcagtgtggtggggtaggcatatcacagcagcctggagaggaaacggtgctgaacctgagcccttctgaccttggaagttttggttttaatgtatgtgagacagagatgaggcatgtgtcagtcagaggctgttatcagccattataataatagtagccagcatttatggaggacttgtgttccagatcctaaggcaagtgctttatggagatttattcatttagtgtttaaaacaatctttttctttttttgaaaattttttgagacaggttctcactctgtcatccagactggagtgcactggcgtgatctctgcttaatccagccttgacttcccgggctcaggcgatccatccacttcagcctccagagtagctggaaccacaggcacacactaccaagcctggctaatttttgtatttttggtagagacgtggttttgccatgtaacccaagctggtctcgaactcctgggctcaagtgatccaccctcctcggtctcccaaagtgctgggattacaacaatcttataagggaccctagaatcgcagtttgatagatgaggacattgaggcctaaagcagttaagcaaagtgcccaaagtcaaacagcgagtacattgggggttgggagagtgaatatttagaacaatccaggccaacaactctaagcccagctcttattcaccatggggaagagtaaatgaaattaaatgaaatgatcttcataaaaggcttaatgcaggcagcaagtaagtgctcgttcagttacaatgagatatccctgtttttctgcgtattttattgtcctgcattttgtgctaggggccctgatgtggattattctagtcacatgctaaaaatgtgcagggttttcagtctctttgtattgtggtgaaactgctgctgatctgcttttcccactatcggtcagcctgggcctgcttccattttcactttgagttttcaaaggtcaggggagtcctgatagattgccttcttatctcctaagtgttttagagtggtttattcatttaacaactgaaagtgatttttttttttttaaagaaacaattacctcccttggtcagcagcaacatctccagaggtcagcatccccctcctggggaaggtttggcctgctgagtccaggctggctgctaagggaaccaagtctcttttctatctccagggctagcacagggcctagcttgggacaggcactgaaggaaacagtggtttgtgaatttcagcggggggctgttttgcagttctggacttcagagacaaagcttcaaattcctatcctttctccagacaggtcccctgctcttctagagtactgagggatcttggccacagtcaggtggggctttcccagacaacttttttataagcctgtggaatgccctctgctgagtcaccacgctgatacccagggctggggtgtgtctgcgaagaaccgtgctctagacattcagggcttggtcctgggtctgggtgggtggctgaccttaggtctaaccataggcttcaagcttttatctttcactgagtctgtgccaagcacattccgtaaatgatctcattgactcttcaagaaagttaagagaatcaatattgttgttcccattttcacagatagataataaatctgtaaaatcgcgtaagactaggacatattttctaggattatccttgcggatcaaaggtgatatcaagtgggatgtcaggagcaagggtgcttgcagtgtcagtgatttctgttgttggaggaggggcagggttatggatgaggaatgtggggtttagtagggttaagagatttgccagaggctgggcgtggtggctcacgcctgtaatcccagctactcaagaggctgaggcaggagaatcacttgaacccaggaggcggagttcaagtgagctaagatcatgccactgcactccaggctgggcgacagagcgagactccatctaaaatatatatatatatttgccagaggtcaacaggctagtctctagtccttgtgcagaagcaagatttgaaatgggttgcttgttctcacacgtctctttgctggtcagtgtagagataaagaaccctctccccacctacagtgttcttaagaagccatggttatcttgggtgtgatgatctttggaaggtagaaagttccactggcaggcatttcctcctggagtcctcagcctccttatcaggctcccagattcggactgtcagtgaggtgggcagggctgtggaggggagaggtcctgtcacaagagacacccagcttcctcccagctttggtttacctcaggcccggcctgaggtgaagtcctcattaggttacctcccgcctagctgtgactgggttaagttgttggacttctctaaggttcagctccctgttctggaaaatgaagacaaggactgtgcctgtcctgtagactttgaggattagctgaggcaatgcccgcatgagccacttagcttgatgccacataagtgcccaggagacatcatcctgtggtgattagttagatctgtcatacacccttacaccaggaagaccccacctggtcattcttttccccacaatcctcttctcccctaggataccaatgcctcttcttccctcagagttaatgcagttacaactattctagaactttctgacagcattcctactccttcagccacccccctccatcgccgggcaaaaatgccatggtccagcagccactcagctcagtggggtggtacatacaggggcgcgtgacaaggatgaggtaagtgctggatcaccaacctccctgcccctcctgtggctgcgtgtcagatactgtgtgccaagctcccttcagccactatctcatgtaaagctcagaccccacgatttccggagtcctagagtagtctgggtgtcctcgtggtgggaactggctgtcctcctggccccttgctcccaccctcctgccttcttggttcagtgataaggccttagatcaggagggtgtggctaggtctgactcaggggtgacccagaggcacttcacagatctgcggcagaaggcctcatcacaagcatgaccgaatcttgactttatttataaaaggcaaaagcccactcttctgtgcagttgttgtgggccccagaagtgaggggaactccatagcacagttgaggtgggcagtggccatggagagagatttccaacgcagggcccgagccatctcctcgcagcttctgcattttgcttctttcatttgttgaagcaaacaaggggccaggaggctcaatcaatgtgtggaactttcacagacccttcagaagagtccagctgttcccagcagctcttggggactgtggcctgtttctgacttaaactcagccttagattctaaattcttgatatggttcagtgatgatgaaggggggaaacatttacatgttagaatgaaaaggtaaccaattttacattctatctaaaggtgaatacaagatggggattatcttgttaacttctgaagaaaattgagatgggggtctcgccatcttgcccaggctggtcttgatttcctgggctcaagcgatcctcctgccttggcttcccaaagcgctgtgattacaggcttgagccatcatggccagctagtcttttaataataacaataaattatcagcattggagctctggatgtgggaaatgcaaaacagtcctgctgggtcatcatctcaaacctggactcttgggagagataccctgtggatcattacatcttttcaattccttccactcctgtttcctcaccccatttgtggtactcaggcaacagagatgtcctctggctggaaatccagaggatgaggtgggcacccttggactgtccctggttaaatgtcacctcctctccccaccccctttcctggctctctcaacgcacatggggatgtttaatgacattctccttttcccctcgtttaggccttgggagcagtgatattaactcactcagtccacacaactttccatggagattactgtaatctgttattcccgctgtacagatgaggaaactgagtcaaaataaattatttgcccaaagccacacaggaactgctagagctgagactggaactcaaaccatcaggctctcaaatcctccttttagccaccatgccctaatgcaactcgaaacagaaaaaggacagcttgactaaaaagtctcccatttcctttcccccttgccctaaaaaccctgtgaactcagcctctgaagagttcagcccttctctcaggtgtgagaagtaatttggcaaaagagaaaaaaaattaaaaagaagaaaaataacctaaaaaggggggaaggccaggtacggtggctcacacctgtaatcccagcactttgggaggccaaggcgggcggatcatctgaggtcaggagttcgagaccagcctggccaacatggtgaaacccccctctccactaaaaacttaaaaaattagctgggtgtggtggcggatgcctgtaatctcatctattcaggaggctgaagcaggagaatcacttgaacctgggaggtggaggttgcagtgagccgagatcacaccactgcacttcagcctgggtgacagagtgagaccccatctcaaaaaaaggcggggaggagaatgaagatttcggcccaagtgctcaggagcaggggcctcttgatagaactgggcactggaggtgagcaacccagatgtcaattattaggagatcttctctgcttctggctttcccagtgctgacaggtgggatccttgtcaggcagcagggcagcactgaaggaagcaaagccgtttcttgggggccccactcagtgagtgaagccatagcttgtgcagtggccaggtggatcgctcgagactccctggaattgcagcctccagctttgagctgctcctgctggccgcttggcttcacagtcaccaccagccgatggagacggttcatcaaatggaaaagtttcggtgactgtgggaaggagggcattctttgcgagctctcttggctttacactttaaagagggcagtggggggaatgcacacacaacctttttcttctcatctgttctcagaaacccaggggaaaaaaatgggctataatgagtagcagttgtggttatgatgattttcatatgaattgtcaaatcttctgtgtccattaactatcttttgtggtgaggaaattgattatggaactgaaataagaaactccacctgactattaagtgataattcagtccccagcctcttggctctttatccagtatttaggggggaaatgcctctgtggaaacagatgccttgcttttttgggaagacagtccatttgaatgaactagaatgtcttcctgccaggagtgggtctccagtggatccttgtcaagaggtgggggaggggcagagtgacagctgcagttggccccccaaatgtcagtgttccctgtagattcttgtcaaagggcttacctcgtactgtggtacaagtcagggctacacagaaaggcctgtcttgcagtctgtttgcatagctgtgtcttgcttgcagaaagccccgggtgggggtagaaaaaaggcagagacaggccgggtggtggctcagacctgtaatcccagaactttgggaggctgagatgggaagatcacttgagctcaggagttcgagaccagtctgggcaacatagtgagacctcacctctactaaaaatacaaaaatagctggggcttgggggcgcatgtctgcagtctcagctactcaggaggctgaggtaggaggattgcttgagcccaggagtttgaggtaaaccgtgatcataataccactgcactccagcatggggcaccctgtctccaaaaaaaaataaatttaaaaaaagacagcagcatcaatgaagccttggttggctcagcctcagggtagactgcattatccatccctgacaagctcagaggtgggcgcacaaacccaggcgctacgtaaaggccaagacagtgaatcatccactcagagcccacttcacctcccacccctggtccttatcaggtgttgtcgtcccacagatacttactgggtacctcctgggtcccagacagtcctggctttcatggagcttctaatccagcagggaaaacagatgtcagagattacaaaaagaatgtgggctgggcgtggtggctcatgcctgtaatcccagcactctgggaggccgaagcaggcagattattaggttaggagatcaagaccatcctggctaacatggtgaaaccccgtctctactaaaaatacaaaaattcagccaggtgtggtggcacgcgcctgtagtcccagctactcaggaggcggaagcaggagaatggcatgaacccgggaggccaaggttgcagtgagccgagattgcatcattgcactccagcctgggcgacagagtgagactccgactcaaaagaaaaaaaaagaatgatgattaatgggatcaaacacaaggaaagaatagtcttgggaaagagcgaggcttgaatcccagctcaggctgtgagctcaggccagtcactctgcttccatgtcttagtttcatcatttataaagtggctgttgcaagacttaatggctcatatatgttgagtacttggcacgtggtaggtaccggattggtatttgttcaaatgcacatgaataagtcatggcacatctccattcaacaaatatttattgagtacctactgtatcccaggtactgtgctagatactaagaatatagcaatgaataaaacagacaaaagccctgccctcatggagattacatagtatttgggaagacaggcaataaaataatagaatgaatcatatatttgatggttagttttatggagaagttattgcagagaatctgactagggagagctggaagtgggcaaatacaggtcagagatttgggaaaagccctgaaggtcgtgagggacctagccatgcagatgccaggggaaaggaatacttcaggaaaaggaacagtaagttcaaaggccctgtggctagcatgtttgagaacagcaaggaggcagctagtgtgggtagccagagaggctgggagtatgggagataatatagggctttgaagctaatttaaatattttttaaaatttatttaattttgtgggtatatagcaggtatatatatttatgaggtacatgagatattttgatacatgcatacaatgaataatcacacatcagggcaaatggggtatcaatttaaagacttagtgagagtgtggtccagggtggtggtgggtggcatagcgttttttgtttgtttttgagtggagtttcactcttgttgcccaggctggagtgcaatggtgcgatctcggcccactgcaacttccacttcccacctcccaggttcaagcgattctcctgcctcagcctcccaagtagctgggattataggcgcccaccactatgcccagctaatttttgtatttttagtagagatggggtttcaccatgtcaggctggtctcaaactccagacctcaggtgatctgcccaccttggcctcccaaagtgctgggattacagaagtgagcctggcctttagtgggttcttactgaagccagcctgaactgggaaatgtccagatttatacaaataatgattcagaaaatgagactaccctttaagaagaccatattctgatcataatcataaatctggcaaattcatttatggagataacaggaaaacaatttgaaatcagaatatccaggaaaggccaggcgcagtggctcacgcctgaaatccgagcactttgggaggctgaggcaggagaatcacttgaacctgggaggtggaggttgcagtgagctgagatggcgccactgcccagcctgggcaatagagcgagactcggtctaaaaaaaaaaaaaaaaaaaaaaagaatatccaggaaaatcacgaggacacagccgtggtaatcagtatgaaagcatgaaagcccccagtatggaatgtttactgtgtatctattgcatatttaatcttcataacaacctgatagaggtgggtactgtgggctccattttacagatgagaaaacctcaacacacacagaggggttcggtaacttgtccaagatgatccagaggtacatattctgtccccaaagcccctactcttggccacgactccataaaatacttctaaacagcttgcttcccttgtacagtttaaatgattttgtctttttgcatacattcaactttctcataaacttgaggttcaccaaggagagaattatttcccccacagataatagctgccaaaatagagtccgaatccctgagggttcccagatggctgggcacacccaagctgcagaggctgtctggaatgattagggcagaggaaggtgctaatctatctaggagcgagcagctttgcggctgatgcgatttcgtttatctaccctcctcggttctttgtctctttatcctcctgtctccctcctggcctggctaacaggcctgatgtatcggcatctcaatcacttctgcttccccaggagatcaaggcctggccttgggccctgaggcctcccggagtaaatcagtggattgaggggagggggtgccggggaggcatcaaaagagaatggggtcctctggcttcaagctacctaaaatctgctgcttaaaatgctgctgttagggaaaactggcggcacagagtccttctccagccctagaaataacctctctgaaacctgtcgagtgacccaccccaaattagaaagaattttttgtcttaaaaggcacattaaagagagtcctgtgttttctgccctgtgccttctggaggtagaagacaagtgtgaattctctacccttctacaacaagagcaaaggaagaagaaaatttccatattttctcagctatttcaaaacacatttttttacctttcatatgaagtgactgttccaaatgacctcttctttccagggaaaaaactctattttaatactttttctcccctcctctttctccagccctgtctcttttttctatttttaatctccctctgccaacaagaatatccacggacttcccacctggcctttacccttctcttccttgcaggggtgtacccaccagcctgcacccgatgtccacgatgtctgtccaccccagaacccagcagcatctctccccgtctggcgctcagcctgcttctgagtgtgggcagcagggaagctaggcgctgtgcttgcccagaccacacagctgtctctgtttagggctttgctgcctgaaagtttgtttcaaggaggaacaggctctgctctgccttctcagcttggtctccttacctggggcacaaagagtgttcacttagctagcgctgacctcctgcagctaattaatgcctctagcatggatcagaaaaagctctgcaaagtgcaattagcgatggatcacttgttgctacttcataggagtggtgtcagcagtattcatggcttgtggcttaaaagccagaaggagatccccaatcaggtcctggatggctctgataggcaaatcctcttaggaaggtgggatcacaggcaccaattccttttgacctcccccgctccccttcctgtggggcttattgaacagaggctaattcattcagtattggagatgtagcagtttattgtggggttcaagatccttgtcatctctgaggataacagagagagcccttttattgaactcttgctatgtgtcaggcattgggtttagtgctttatgcgatatgttcataaccactacagagaagaaaccatatccgctttacagatgaagaaactgaggtctagaggttaagtacttaccccgggtcatggtcagatatttggctgatggcattcatttcttttctagaaatgtcttgagcatctatgtggctgacatttttcaggcaatccctgctatgcagagcttgcattttagagggagtaggggcaccagatactgagcaagtaagcaaattaataaacacaataatctcggccgggcacggtggctcacgcctgtaatcccagcactttgggtggctaaggcaggcggatcacaaggtcaggagatcgagaccatcctggctaacacggtgaaaccccatctctactaaaaatacaaaaaaaaaattagccaggcgccgtggcgggcgcctatagtcctagctacttgggaggctgaggcaggagaatggcgtgaacccaggaggcagagcttgcagtgggccaagatagcgccactgcactccagcctgggcgaaagagcgagactctgtctcaaaaataaataaataaataaataaaataaacacaataatctctgtataagtgcttcagggaaactaaaagggccctcttctgtggcagaactgggattcccagtctctgaggttaagcaggagcaggtagcattaccctgtaagctgggagtcgcaataggcaattagttacctgactgtcccagggcttggcactgcctggtagccctgccttttcataaggaaaagattccgcacaaagcactttacctaggttttgtgagaggcggagccagagctggcatccgaggtgttctcacaatgctggactttgaggcacaggagagaattgcatttctcctctgagcagtggaaccagccctggtgcctcccttgcccagcctcaccctgggaccctgggtgtgagtagttagtcttgttatcagtgagagtaacccaggaatctccctgatggggaaatcccaggtaatttactgtgtctctgatattccggttacagcctctgctctagaaaggccagggaggggagaatctaaaagttctccatttctcgcttgagatggcatccccccatgctttccttaggcctccttgagtaaggtgtctgcaaatagcttctcagcatgacttcacccggaagctcatctgagtgactcacagcctgctttaggcacctcctccagggagacgctcttacccttgcccccaccccaacaggggaggggaggggagaagggaaaccccctaactgagccacggagaaggccttgccagagcactgtggaaaatacctgcagcccagcttggccctgcttcaggtgccctgggatgtatggtttctctagtcttctgagagggatcaagctgacaattcaaatttgagggagcgatgaccctggaaactgtgtaggtcttaaaaagaaatatatatccaaacacactgacctgaaaagatgtccacaaaatacaggattcagcattaggtgaaaaataatttcattatgttcctgtttctcaaattcggtttgtgattttaaaaaattgataggttagtacatgtatttgtacatgtactatttgtactaaaagcctatttgaagaaaaattataatatattaataatagttatctctgggaggtagtattaaaagaaactttattcattattcctttctgatttttaaaaaataatcataattacctttataataaaaaaaaaaaggtaggccaggtacagtggttcatgcctataatcccagcactttgcaaggccaaggcagattgcttgagcccaggatttcaagaccagcctgagcaacatggtgagaccttgtctctacaaaacatttttagaaacttagccgggtgtggtggtgtacccctgtggtcccagctaattgggaggctgaggcaggaggattgcttgagcccaggagtttaacgctgcagtgacctgggaggcggaggctgcagtgagccaaggtcacaccactgcacttcagcctgggcaacaaggaggctctgtctcaaaaaaaaaaaaagctgcagtgagccatgatcatgccatttcccttctgcctgggtaatagagcaagaccctgtctcaaaaagaaagggttgtttttttgttttgctttgtcttcaaaaaaataaaaagaaaaatcctcatgcaccaagcccaggtgtcctaattgtgtcctcattattaaatgcctaacttcccgtggtggactgttagcaggaagcgactgggatggacttaacattcacttagcaaacagctacctccctagccactggaggaccaaaccactatgacagggtgtctcccttcagtggctcccagcatgatggagggggtagtatatgttttgcggggcatttggggttttggggggaggttagggggttttttgagacagagtctccttctgtcacccaggctggagtgcagtggtgtgattatggctcactgcagccctgacctcacaggctcaagagatcctcccacctcagcttcccaagaagctgggaccattacgcctggctaattttatttattattatgtatttttttttaagagacagagtcccactatgttgcccaaactggtctcagtgatcctcccaccttggtctcccaaagttctgagattacaagtgggagccaccatgccccctgaccaaccaccaccctgcacccaaggccaagggctcgataaatactttgcaaacaaatggatatgtaaatgagtagatactaagtggtctgtgagagaaggctacagattgtggtggggcttcagaaggtctcgagaggtcccttgctggggattaggttaggcctcgtgatggtgcttctgggatattccttttctctaggatttaaatgtctcatttaagaacaatttttttttttttttttgagacagagtctccctctattgcccaggctggagtgcagtggcgcgatctcagctcactgcagcctccgcttcccaggttcaagtgcttctcatgcctctgcctcccaagtagctggcgctacaggcgtgcaccactatgccctgctaattttttgtatttttagtagagatggggtttcaccatgttggccaggctggtcttgaactcctgacctcaaatgatccacccacctaggcctccccaagtgctgggattacaggcatgagccaccactcccagcataagaacaattttagatttacatgaaagtcgcaagagtattacagaaagtttccagataccccacaccgtttcccctattaacattattaactaaagttcatacttctttaggatttccttagtttttacctaatgtcctttttctgtctcaggaacccatgccatatttagttgttatatgtccttagattcttcttggctgtgacaagactttctttgttcttggtgagcttgacagtttagaggagagctgatcagatattttacagaatatctttcagtctaaagtttttctcatgactagtgtggggttatagggttttttgcggggaagtccacagaggtaaagtgtcatactcatcatatcaagaatacacactatcggccgggtgcggggctcaccccatctctactaaaaatacaaaaaattagctgggcatggtggcatgcgcctgtaatcccagctacttgggaggctgaggcaggagaatcgcttgaacccaggaggcggagtttgcagtgaactgagattgcgccattgcactccagcctgggcgactgagtgaaacttcgtctcaggagaaaaaaacaagaataagaagaatacacactatcaacatgacttgtcactgatgatgttaaccttgaccacccgataatgtttgtctggtttctctactgtcaagtattattccccactcccgcccctcaggccacgtccactctgtagtctttagagtgaagtcactgtgtgcattccatagctaagggatgggaagttatgctctacctcctgggggagggtggtatctattaatgcatagattaattggaagattgattggtttattctcccctagttattttttcaatcagtaagcatgcatatatgggtatttattttatactttgggtcattatgcaatattgtgttatttattttgttatgcaaattgttccagctttgcccgttgagagccctttcggttggctcccatctcatcattttaggattctttgagcactcttactttctggtaccacaagatgctccaagctcattttctgttttccatgccctgttcctaaaatcagtcaatttctcgaaggagctctggttccttttattgaagaatgctattagaatctaggatctgctgtgtgcggtggctcatgcctataaccccagcactttgggaggccaaggcgggaggattgcctgaagccaggagttcaagaccagcataggcaacaaagtaagaccctgtctctacaaaaaagaaaaagaaaaagagaaaccagaatctgggcactggatatactcattgctactggagtgtctgggacattccttttgaaagaaggttttcggaaactaggtaaagaatttgcagatcatactgagatttcatgatggaaataagaggaaaaggactggaagaggcactgtaagcctcttgtcatatcaacaacttcaggcagacaccatggaaggtcctgtggcatctgtctggtgggagggtattataaacagtcaaataaatgaccacagatgctttaggaaggggccatcagcatttagggactgtaagggggcaactctccccatcgtcaacttaccagagccttccccgtccatgtccttgttccaggtaccatttttgagtccatcctgtgttccaggcactgccctaggttctcactcaaccctcagggctccccgaaagttattttaggtattgttggccccgtcttactgcagaaaggctgaggacttgtctgggtaagtgactaacccctcattcaaacccaggtacaaccctcaaattctccctcactgagctgactgccacttaatgtggtttgggaacttcttagcttcaaaatgcaacactccccctttgatagagatgtggatgttagtgcaggcaaggactatggtgtcaccaaggtcaccggtccccctgctctgatcacagcagtcatcacagggaactgtaaagaggtagggtgtgttcgcgcatgcatatgcgagcgctgagtgcgtgtgccacctcccacctacaggcttcccaggagcttcaacagagaacccttgcccattgcctggcaggtagctatatccgactaggggccctgctgttgagaactgaacaacagtgagcttcagaagagaggaacgtgaacatatctagaaaagccataggaaagtggctggcaaaactgaaaccagtggcaagaactgggtagacatttaaaggcccgttccaaagatagctaatgccataagaaaatgctgtttggtgtaataagtgaaatgaaacaacactgtaggtttaaaaatatatgaacgatatttaacaagtatcaatacttctctctaagtgatgggattatgggtgatttttattttctaccttgcatttgactgtattttttatatttttctgtagaaaacatgcattaattattcttatagtgctaaagtaatttaatatgaaactagtgagagagctttattcttaagggtcatcctaactttgtgttcaatgtgcttccattttatgtgcctcttccgtggcctttgtggttgcacttgttttaaggaaacccattctagcacagaagtcactgccgatttggtagcaaagaataaataattttctttcttttttttttttttttgagatggagtctcactctgtcacccaggctggagtgcagtggtgcgatctctgctcactgcaagctccacctcccgggttcacgccattctcctgccttagcctcccgagtagctgggactacaggcgcccgccaccacacctggctaattttttgtatttttggtagagacgggtttcatcgtgttagccaggatggtcttgatctcctgacctcttgatccgcccacctcggcctcccaaagtgctgcgattacaggcgtgagccaccgcacccggccagaataaataattctgttaaagaatcatcactaaatgagataccactttctttttcttttttctctttttttttttttttttttccaagacggagtcttgctctgtctcccaggctggagtgcagtggcgcgatcttggctcactgcaacctccgcacccccagatttaagcaattctcctgcctcagcctcccgagtagctgggattacaggtgcctgcccccacacccagctaatttttgtattttagtagagatgctgtttcaccatgttggccaggctggtctcgaactcctgacctaaagtgatctgtccaccttggcctcccaaactcctggaattacaggcatgagccactgcacctggcccctgagataccactttcttaggactataaccaaacagacagataataagtgttggtgaggatgtggagaaattggagccttcatacaccactggtaggaacgtaaaatggtgaagtcactgtggaaaacaagcatggtggttcctcaaaaaatcaaacataggctgggtgcggtggcacatgctgtaatctcagcattttgggaggctgaggcaggcgatcacctgaggtcggatgtcgagactagcctggccaacatggtgaaatctctactaaaaatataaaaattatctaggtatggtggcgggcgcctgtaattccagctactctggaggctgaggcaggagaattacttgaacccaggaggcagaggttgcagtgagccaagatcatgctactgagccaagactacaccactgcactccagcctgggcaacaaagtgagaccttatctcaaaaagaaaacaaacaaaaaagtaggccaagtgtggtggctcacgcctgtaatcccagcactttgggaggccgaggcgggcggatcacctgaggtcaggagtttgaaaccagcctggccaacattgcgaaaccctgtccctacttaaaatacaaaaattagccaggtgtggtggcacgtgcctgtaatcccagatactcaggtggctgaggcaggagaattgcttgaacctgggatgcagaggttgcagtgagccaagatcatgctactgagccaagattacaccactgcactccagcctgggcaacaaagtgagaccttatctcaaaaagaaaacaaacaaaaaagtaggccaagtgtggtggctcacgcctgtaatcccagcactttgggaggccgaggcgggcggatcacctgaggtcaggagtttgaaaccagcctggccaacattgcgaaaccctgtccctacttaaaatacaaaaattagccaggtgtggtggcacgtgcctgtaatcccagatactcaggtggctgaggcaggagaattgcttgaacccgggatgcagaggttgcagtgagccaagatcatgccattgcactccagcctgggtgacagaagcaaaactccgtctcagaaaataaaaaaaaagaagaaaaaaaaagttacaattaccacacaacccagcagttccactcatatataccaagataaatgaaaatgtatgttcacacaaaaacttgtacatgactagcagcattgtttgtaatagccaaaaggtagaaacaatccaaatattcatcaataattgaatagataaacaaaatgtggtatatccatgcaatggaatatcattcgcccacaaaaagtatagtactgatacatgctacaacatggatggaccttaaaaacattatgccacataaaagaagccagacacaaaaagccacatcttgtgggattccatttatgtgaaatgtccaggaaaggcaaattcgtagagacagaaaatagcttagtgctttctaagaacagagggaaatggataatggggagagactgatgacttccaatgggtacagattcttttttttttttttcttttttttttttgagatggagtctcactctgtcacccacactggagtgcagtggtgcaatctgggctcactgcaacctacgcctcctgggttcaagtgattctcctgcctcaatctcctgagtagctgggattacaggtgtgcgccaccatatctgactaatttttgtgtttttagtacagacgggatttcgccatgttggccaggctgatcttgaactcctttttattttggagacagagtctttttcaggctggagggcagtggcgccatctcagctcactgcaacttccacctcctgggttcaagcaattctcctgcctcaggagagtagctgggactacaggcgtacactgccacaccatgctaatttttgtatttttagtagagatggggttttgccatgttggccagcctggtcaccaactcctgacctgaagtgatccacctgcctcggcctcccaaagtgctgggattacaggtgtgagctaccatacccataccataccaaacgttttctttttggggtgatgaaaatgttctgaaattaaatagtggttatggtttcatactctgatatactaaaaacagcgaatgaaatgttttaaaagggtaaattttatagcatgtgaattatatctcattttgaaaaaacagcctacttggactcatgaacgctgagcccagtttctctatactggagttgtgaggagcatggtcctactctgtggccttgggcaagtagcttaacttctcaggttattgtccgtgttttatgttaaagccatatgtgataccatcatgtcacagagtccttaggcagtttgtactgaccctgcctgtagtctgcacttgttcattgctccttaaggaggcagcttcctcatttgtgtgaggggatcttggttttgctttctattcccataggagagctcctcttttaaaacatcccttccaggagactgggctctggatcaaggaagggcagtggtggcccatcctgccaagctattcccaatgtttatttgaggcaataaaactcaaataggtagtggcttctttttttttttttttttttttttaatggactctcagctcagtctttcacccaggctggagagtagtggtgcaatctcagctcactgcaatctctgcctcccaggctcaagtgatcctcccacctcagcctcccaagtatctgggactacaggcgcacgcaacactcggctaattttttgtatttttggtagagacggggtttcaccatgttgcccaggctgctctcaaactcctgagctcaggcaatccacccgcctcggcttcccaaagtgctgggattacaggcgtgagccaccgcacctggcttgatagcggcttctaaaacctatagttacttggaatgtccagggacttctaagctcaaagcactcatgtaacacaggttcttatttttcagatactttcttctttctccttttctctgcccaccccaccagccctttctttttattttatttatttatttatttttgaggtggagtttcactcttgttacccaggctagagtgcaatggcgcgatctcggttcaccgcaacctctgcctccctggttcaagcaattctcctgcctcagcctcccgagtagctggaatcacaggcatgtgccaccacaccgggctaattttgtatttttagtagagacggggtttctccatgttggtcaggctgatctcgaactcctgacctcagttgatctgcccacctcggcctcccaaagtgctgggattacaggcatgagccaccgcgcctggctagctctttctttttaagggaagggaagaggaaagctagagcccaagagggtgggctctgcagtctacaagccctgtgtggagtctgagctattgtttacagctggcgacttcagccataacagtggcggggtcttgcagcatgacagtttaattctttgctccccaggccggcttttggcccaggaccagggccagagctggagaccaggctgacaagcccactctttccccttctgctctaacgcgtcagagcagtcagcctctgccctctgccctccctgacggccacctcctcattagctgagcaattggaggagacgggtgtcatgaatacattgcttttcctttaacttgtaatgccatcggaagtcagaactattattctagtttaatattcagaatatctcagtatctcagttttgactgcatacctcaagtttagatttaaagctaaaataaatccacattctctgaacatggatttttttatacttattaagcacctaccatgttcttggaactgtgtgaactgcagagatgacagcaagaaggaagtgtgaagaaaaatatagtttttgcccttccttagccaaaagcctcgttaaaaaagattaccactatctcaaatcattcctacctcaagcctgagaaccagaggagaggggcagagttcagtggtgattagagacaatggtgccttctgtcttttgtatgcccagtctttgccagggactatgttgagtacatatatgcatcatctcatttgatgttcgccctcagtctttgagagtaggtgctatttccactgtgcagacgagcaaactgaggctcaaaggtggtgttatgtgttggaggccaccctgcaaggttgggtccacctaactcatgagctggtgccttttaaccaacacgtcattgtcgggggaggctctatgaagaccatggcagccagtcacttgatagaaagaaaggatggtcaaagagaggggaggccaccagtgttgaaactgcagtcatcagcattgcagtatccagaaaggggtacaccacgcctgtaatctcaacactttgggaagctgagatgggaggatggcttgaggttaggagtttgagactagctgggtagcaggacaagaccccattgctatgaaaaattaaaattaggctgggcatggtggcctgctcctataatcccagcactttgggaggccgaagcaaaaggactgcttgagtccaggagttgagtccagggcaatatagtgagacctcatctctccaaaaaaataaacaaaattagctgggtgtggtggcatacacttgtagttttcagctactcaggatgctgagcccagaagtcaaggctgcagtgagcagattgtgccaaagcattccagcctgggcaacagagcaagaccctgtctcaaaattaacaaaaacagaaagaggggcatgatcctcttagtctcttctgaaccactcagggtggacacaaacacagcataccctgaagttgtacgtgaggtcctgggctcctggatttaagagggtagtgaataggctgagactggagctgggtttacagggtgtagacacagtaccagagagtggaagctgcaaaaagacagaaataaggagaatgttctagtagttttctccaccctctggcagttgacttgaggggtggacaatcagatctcactggaggcaacatagtgttggagctctgatgtaactggaggcatgctagcgggtcagcaatttgagtaatgaggctgaggctgatgccggggcgcaggagactgctttcctctgtgctccaatcccccaggcctgctgcctgcaaggcgcaagctgcaaagcaggggtgacagttcccagagctagagcatgggccacccaggcaggagcaacaccccatgcagagatagggtcagtctgctcaaagcatgagtgagtgtgtgtgtggttgggagggaggtagcagcagcctacgctcctaatgatgattacggggcaaatgtgaatggaatggggtggcgcaggggagactccaaatcaagaactaagaaaaggcttaggggagcaggagagcggagaattttggggtacagacttcctctctgtcaattgtgctgtgcagatccaggaaagatccaggccagctgtcctggaaggaccgatggggctgcctctttgggacgttgccacctctgctccagtcgggagggctgaggaaacaggttctgctgaaacaggctgattcactgtttccactcggtcctcggctgtgttggtgggcagatcacacgccagcctcgtaaactcactctccgcttgtccatgtgacgtttatagccccacagggagctggctttttaatgagcctaatttgagactgtaagtaggagtttgtaaaacaaacagcgaggggctttgggtcaaagcccaaagtttcagtttaaatacacagggtcacattagggctgtgcagacaggccaagactcctctgtgcccagggcagcaagaagaaggtgctccccagggaaaggcccaccttcccaggagagcttgctgcaggctctgtcgttcccccagaaactggggagacttagagggagaccttcctattttggttctgtgtgcaaagcactcgagagccctagttttcccatagggaggcaaggactccttcggggtaggcctatgtgcaagcccagggttagaagtcagtgcaccgaggtctccagtgcctttctgcaaagcacagccccacatccagccttaagaggcttctgggagggaaagtctgttatccacaggcactgcatctgaaactcagcatctccctgtagcttgatttcatttttgagagctggttttcaaattaagattaagctggagggtgcctgttatgaggcctgttaaggtaacctctttctacagggctccaggtggaggaggaggctcctcacctcccactcggatgcttagggctctgtgaaccaaaattaaaattctaaggctccccagccatctgaatggacttcctccacagccagggcactcttaaaatttaacctgaaagactagttcaggccatgaatggaagtggggttggacatgcctcactatacctctctggcattaatatccacacagaccttaagtctaagcagaagcatttatcatctattctctttgaagcctgctacctggaggcttcatctgcatgatgaaactctggtcaccacaacctcttatgcaacccagacattcctttctattgataaccctttcaaccaattgccaatcagaaaatttttaaatctacctataacctggaagccccaccccttgcttcaagttgtcccacctttccagacagaaccaatggttttttgttgttgttgttttgttttgttttttgagatggagtctcactctgtcacccaggctggaaatgcaatggtgcgatctcgactcactgcaacctccgcctcccaggttcaagctattctcctgcctcagcctcccaagtagataggattgggattacaggcatgcaccaccatgtccagctaatttttatatttttaatagagacagtgttttgccatgttgaccaggctggtctggaactcccgacctcaggtgatccacctgccttggcctcccaaagtgctgggattataggcatgacccactgcacccagccaagtttttaaattaaaattaagtgagtgagtgggactccacagactgcctagcagcaggtgaatgttctggccagaagattgccccgtgaggggagcgttgagcccccctattcaagctgaatgagggctagatttgccgtcaccacctcaagccctcaggggacttggctagagccactctgttctcagtagtctaagggacacaggcacagccagccaggctggacagtgtactctgagcagtcactttagcctgctccttggaaacttggggaatcacttcatctgcaagtcacagaaaacctgacctttaggggctgaactatgtacctctcaagattcctgtgttgaaattccagctcccactacctgagagtgtgactgtatttggggatgaagtctttaaagaggtaatgaagttaagtgaggtcatgagggtaggccttaactcagtatggccgatgtccttatcagaagaagagatgggccaggcgtggtggctcacgcctataatcccagcactttgggaggccaaggcaggtggatcacgaggccaagagttcgagaccagcctggcccacatagtgaaaccccgtctctactaaaaaaatacaaaaattagccgggcgtggtggcgcatggcttgtagtcccagctactctggaggctgaggcagacgaattgcatgaacccgggaggtggaggttgcagtgagccaagatcgcaccagtccactccagcctgcatgacagagtcagactccttctcaaagaaaaaaaaaaaaaagattaggacacaggcacagagaaagatcatgtgaagacgtagacagagaatgggccacctacaagtcaaggagggaggcctcatgagaaaccaacccctgccaacaccttgatcttgaacttcaggcctctagaacagtgagaaaataaatgtctgttgttgaagccacccggtctgtggtattttgttatggcagccctagcaaattgatagaccaacagggggttatttatttattatttatttattttatttttgcaacaagaggttcagggataggcagtgcctggtgtcttttagctgctgggtgagactgcgagagagccaggctctttctgccttttgctctgccatcctcagcacgttggctctggccccactctctgagaacagcttcagccgtagcagggtcctgcctcctggttacacagtggctgctgctgcaccttcttcaaacagtatgtcacagttgaggcaataagaagagcaaaagccctgccagccagagagctgattatcccttttgatcaggagaagtagtatttcccagaaaccctgaagtcttgaattgatgtctcattgtccagaactgtgtggcacggccataagagagcctgggaagatgtccaccagggctcctggcatattgcatggccactcgagacagaacggcatgtcagccaagaaggagaaggaatggagctgggtaggtcactgagaggtcagcccggtttcaagtgtccagtgatcgttttcttacttctttgcagggaaagatcatagtgtcctccaagatgctgggaatgacatagtgacctctggcaggatatacccatctgggaatgagtgtcctactgggacaataaactagcttccttccctatacctcctccaccccttcagtccctctggtattgcatattgttgcttaactatgagataaccagggagtgtttgcttctcataaagtctgtaaaatccctttggagttctttgagtaaatgggggctttttgaaacatcctgttatttttcctcccttgctgacgataacagcacatagcaaaagtcctcttttcaggctgtccttccaagtttctactacagccatgcattgcttaatgacagggataggttctgagaaatgcatggataggtgattttgttgtgggaacatcatagtgtgtacttatgcaaacctagatggtatagcttcctacacacctaggctatatggtatatccaagtgctcctgggctataaacctggacagcaagttactgtactgaatgctgtagacaattgtaacacaatggtacatatttctgtatctaaatatagaaaaggtaatgcattgcactatgatcttatgttggctacaacatcactaggtgatagaatttctctttttttgtttgtttgtttttggagacagggtcttgctctgttgcccaggctggagtacggtggcatgattgtggctcactgtagcctcaaccttctgggcccaagcaatcctccctcctcagcctcccacagctgggaccacagctgcatgccaccatgcctggctaatttttaaatcttttgtagagacagggtcttgccatgttgcccaggctggctttgaactcaagcaatcctcctggcttggtctcccaaagggctaggattataggtgtgagccaccatgcctggctggtgatagaactttccagctccattataactttatgggaccaccatcgtatatgctgtctgtcactagccaaaatgtcatgcagcacatgactattcctactacagactcctcctctagtatttatcatggtctacttaaattatttgtgtacatgtttttcctcccctccagattagaaaactgggtcttactcacctctgtattcctagcactaagcttggtataattagtaggcgtgtaatgaatatttggataagtgaatgaatgatgagaacagcatggtaaatttccctagacaaatagatcaatggaacagaatagagagcccagaaataggcctacataaacatagtcaactcatcttgacagaggaacaaaggtaaacaatggatagtcttttttttttttttttttttttttgagatggagtttcgctcttgttgcccaggctggaatgcaatggtgcaatcttggctcacagcaacctccacctcctgggttcaagtgattctcttgcctcctctcgagtagctgggattacaggcgtgcaccaccacccctggctaattttgtgtttttagtagagatggggtttctccatgttagtcaggctggtctggaactcccgacctcaggtgatccacccacctcagcctcccaaagtggtgggattacaggcgtgagccactgcacccagccaaagatagcctttttaacaaatggtgctagaaaaaccagacatccacatgcaaaaataaataaataaatgtagacacagaccttacacccttcccagaattaactcaaatggatcagagacctaaatgtaaaacacaaaactataaaactcctagaagataacatggggaaaaaaatctaggatgaccttgggtttgatgatgactttttagatatgacaccagacaccaaaagcataatccaggaaaggaagaatcaatcagctgcactttatcaaaattagtttctactctgtaagagacagtgccaagagagtgaaaagacaagccacagactgggagaaaatatttgcagcaaaagattcatctgataaaggattgctacctaaaataatatgcaaagaacttttaaaactcagcaataagaaaacaaccaatcaatttaaaaatggatcaaagatcttaacagacatctcaccaaagatgatatgcagatggcaactaaatttgtgaaaaaatgttcaacatcatctgtcattaggaaattgcaagttacaatgaccatactaggacataccactgcacacctcttagagtggccagaatccagaacactgataccaccaaatgctggtgaggatgtggaacaacaggaactctcatgcattgctggtgggaatgcaaaatggttcagccactttggaagacaatttggcagttccttacttactcataggtatatgataccaatacaattcagcaactgcattccttagtatttgcccaaaggagttaaaaacttttatctgctgggcacggtggctcatgcctgtagtcccaacactttgggaggccgcggcaggcagatcatttgaggttaggagttcaagatcagcctggccaacatggagaaaccccgtctctactaaaaacacaaaaattagccagtcatggtggcaggtgcctgtaaggccagctactcgggaggctgaggcaggagaatcgcttgaacccaggaggcgaagattgtggtgagccaggatcacaccactgcactccagcctgggtgacagagtgagactctgtctgaaaacaaaacaaaacaaaaaaaacttatatctacacaaaaacctgtgcacagttatttatagcaggtttattaagaattgccaaacttggaagcaaccaagatgtccttcaatatgtgaatggatagataaactgtggtacatccagacaatggaatattatcagagctaaaaagaaataagctgatgatgcacgacaggcaaacctcaaaattaggacttatcccaggagagttgttggcttcgcctaggaaataattcaagggtgagccagtggtgttaaacagcttttattgaagtggcagtttacagcagcagcaaaggtactattccttgtgggtcaggggtatcccataggcagtgtgtccagaataacagcttagaggcagttccgtactactagtacagtaatatttgtacccacttttaattatatgcaaattaaggggtggctcgtgcagaaatttctaggatgaggttggtaacttccaggttatcaggtcattgccacggaaagaggcaggaacatctaggtgttgccatggaaatggtaaaccaaccatggcacactggtgggcgtgtcttaatggaaagctgcttctgcccgggacctgttttagctagtcctcaatttggtctgatgtccaagccctgcttctggaatatcaagccatgcagacatggaggaaacttaaatgtatatttcttttctttctttttttctttttgagatggaatttcgctcttgttgctcaggctggagtgcaacagcacaatctcagctcactacaacctcctgcctcccggattcaagtgattctcctgcctcagcctcctgagtagctgggattacaggcacctgccaccacgcctggctaattttagtatttttagtagagatggggttttaccatgttggccaggctgctcttgaactcctgacctcaagtgatctgcctggctcggcctcccaaagttctgggattacaggtgtgagccactgcacccggccttgaatgtatatttctaagtaaaggaagccaatcagaaagggccatgtatagtatgattccaactatatgacattcttaaaaaggcaaaactatggagacagtaaaaagatcagtggttgccaggggttgggcagggagggatgaataggcagagcacagaggattttcagagcagactgatacctgctcatcatcaactgaggtgtcccttcttccaggaagccttccttgaccaccaagcctaggtagtctggcttagagatccttagtttggattccttgtgctgactgcatcacagccctttgtatccaatatttatttggctggcatactgtcttccctcctccactagactgccaacttcatgagggtagggacccccattcactttcatatccccagagcatagctgcttctggtgtattattaggtaatcattacacagttgttgaataaatgagtgaatgaatgcagaataaatgagccatctgtggtgagtaaatcacaatttttttttaaatcactgtggatcctagtggcctttaagaaaataacagaatcgagtggccttgggtctatccctccttcctaatagtgacaataacttttatatagtatctgatgacttctttgtcttgaagccatcagccctaggaatcaggctattaataaaaatatttttatttactatatgctttactgtgtgccaagccttttgctaagtgcttatttacaaaacctgttttaatgctcaatcttgtgaattaggaagtatgattaggcctattatccagagaaacaaattgtggctcagagagctcaagtaactagtccagagtcacacagctagtaagtggcagagctgggttttgaacctcattgctctgactcatgccctttaattgtctgaagagtctaatgatcaatcccttttggaattggaaccgaagctgattgaagcaggttatgtttataagcaggactccagtgcagtaaatctctgatgaatattctctgatgaatatactcatgttctgttaataaacatcttggccatctgccctgggccttgtgatgtttgcatcttttccttaaactctcaaggagagacttgtgtttgtgcccttttgatccctttcttcctctctgagctggcactgagaggtcacacccactgccctctttctgtccctggcagcactgatccctagcaggggaaggatgcagctcagctgtcactccctgcgctggctttgcctcctctccctccctcaccccctgcccagcaatggcagcatcccaccagtggtgattcagccactgtagctgtagaatgatcacacaggctcagagcagtaggtacacggcagggcagagcatcagcaagatgccacagaaagtcccactggtgatgcagtgcctgagtcaccaccacctggggccaggcgaaggggccagatgatagatacttggaatgaggcatgcagacaatgtctcatctactggttagcaatttagaatgggttctccctgagtttcttccaaaagcagtaccccctcattttttggtaaaatttctataaaacaaccaggttttcctttcatgtacctttttcttttaacctccatgagctcataataattgtaatattagttttgttaaaaagtatgaagaataatgggagaagaatcatctaaaagtataccatgcagaaataaattctaggctctttataggtaacaagataatagcgatagttttggctgggtgcagtggcccacacctgtaatcccagcacttcgggaggctgaagtgggaggatggcatgagcccagcaggtgaaggttgcagtgagctgagattgcaccactgcactccagcctgagagacagagcaagaacctgactttaaaaaaaaaaaaaaaaaaaaaaaagtggtatttttaacattcactttttcctttatctaaaaatttaatttcagataacaaatgttataccataattcaaattatgggtgttctttgctcagaagaaacattttgtcaccctcctctgcctctgattacatctcatcccctctctcatattgctcaaaacagtcattgttcctatgccagtaagccatattcattataaaaagtttggaaagcatagtagggcagaaagcatttttatgaccctagcatcaagcgaaccactcttttagtggctgttgagaagaaggctgatatttaaggtactgagtctacgactgcttcatctccatccttaatttctccatttactttgtgtgtgtgtgtgtgtgtgtgtgtgtgtgtgtgtgtgtgtgtgttttgaatgtgctgccttaatagaaaagtggctctgtgttgtcattggcttacaggaattagtgtgctcacccactgcgggtcaaggacagcgtatgacaaaggaccgtggtcatgtggcggactgttcttttcaaagaggcagtagttccaagactcatgctccctgggtcactaagttcttcatgtgttacatcaatactttggagagaggccacccagaatctcttaaaaagtattctaaataacacagagatatttttccacaggaaaaagctcagtagctcgaatgttagttttctgccccacattgcccaatgttgtgactattgcactggtttttccagggttcacctttaggtttaatttcctgaaattgatctgcttggttacactggctttattttatactcttttgcaaagaggagaaatggcagtgagcagatggcattttattaagtttttgcttcaaaaaaattaaacagcaatgtagcatccctgctagttttcttacaggcacctaatagtcatcctctgggtctgtgtcagaactgatatttaccatagatgaatcaccaaagtgccactgagccagcattcccagtggggattccaaatttgccacacttgtggggctgtctagttttgtttgtttgtttttgagatggcgtctcgctctcttgcccaggctggagtgcagtggcagcgatctcggctcactgcaacctccgcctccctggttcaagtgattctcctgcctcagcctcctgagcagctgggactacaggcacctgccaccacgcccggctaatttttggatttttagtagagatgggggatttcaccatgttagccaggctggtctcgaactcctgacctcaagtgatccacctgccttggcctcccaaagtgctgggattacaggcgtgagccactgcgcctggtcagggctgtcgagttttatagtagttcctccatccttctaaattctaaccctgctggagcccctctgagaattggaggagccagctggatgggagagaggcagtccccacaccaactccacaagcaggtgcacccccagcaggcccaaaggattccaagaggaagtgaatccagcccggtgttcggagtgaggtttactttgcaccactcttttttaggaaaattggggttgctggccctgagcacatcaccctttgccagccttttatctccccctgggttctgtggccgccagcttcttaagcagttgttaagtgtgtgttattattttactgtttaacagtgagctcctgggccccgggcctgacttcaccagaagaccaccttttgccagtgctgttctgataacttagccagaatgaagtgttaagtggaggataattgttatttgcttttaatttcctgaccttagaaaaagaaggaaagcacagtgctgatggggtggtgagtgctgaaggaagagtgctgtctctgagtttgcatggggagagcctcgtgttctcctccttcagactgagccagtgtggactccagtatcagacacactgggtctgaatcccacctctgccattttctagctgtggacctcagtcaaatgactcagcccatctaaacttcagtgtccctcgctggcaaatggggttagtaatagtactccactgcgagggtctttctagggtttcaaatgctcgttcatccaatccctggcagaaaggacctactcaatgcatggtagtccatgtccatttattattagccatggttaaaacctgcttctctggccaggtgcagtggctcatgcctgtaatcccagcactttgggaggtcaaggcaggtggatcacttgaggtcaggagttcgaggctagcctggccaacatggcgaaaccccgtctctactaaaaatacaaaaattagccgagcatggtggtgggtgcctgtactcccagctactccggaggctgaggcaggagaattgcttgaacctgggaggaggaggttgcagtgagctgagattgcgccactgcactccagcctgaatgacagagtaaggccctgtctcaataaataaataaaacctgcttctcaaacttccccttatctctcctgtctcccagcattttctccccatttgaatttttgggcctcacagtatcatggtcacgtcttgagatgggttttgcccaagtattagatgactttttgattatccttttttttttttttttttttttgagacagggtctcactctgtcacccaggctgtgtcgcccaggctggagtgcagtggtgcaatctcggctcactgcaacctctgcctcccagtttcaagcaattctcctgcctcagcctcctgagtagctgggattacaggtgtgcaccaccatgcctgactaatttttgtagtaatttttgtattttcaccatgttggacaggctggtctcgaatgcctgatctcaagtgatcctcctgccttggcctcccaaagtgctgggattacaggtgtgagccaccacgcctggcttgattattcctgatgaatcactttacatggatgattgacagctcctggggcatattccattccacttcaggtttttcctcttatttccctcatcttgctcttgtctcaacacccatccccccagcctctctgaacttagaatgtcatgtggaatactattcagtgaagggtttgggggcttttttaaagaattgactgtcctggctgggcatggtggctcacacctataatcccagcaaatttgggaagctgaggcgggcagattgcttgagcccaggagttctagacccgcctggaaaagatgacaaaaactccatctctccaaaaaatacaaaaattagctggacacggcagtgtgcccctgtaccccagctactcaggaggcagagatgggaggattgcttgagccccgaaggttgaagctgtagtgagctgtaatcccattactgcactccagcttgggtgacagaataaaacctcgtctcaaaacaaacaaaaagaatgaattgactgtccttacactctatttgggtctccctgaaaactattcatgcttcaacttttctacactttgttctggcatgactaatatataacaactgggcattaaatgtactatatataaaattccagatcagagaatggaaacacttaaaaataaaaaaattttaaaaaggggttggcttatctgggctatttggaaaccgttcagtggggcagtataatttttattttcagaagcttatggattgcaccccacccaagcttcccgcgcacctaagaaggctggcagaagacgccctgccaagtttccttgcgagtgcagtaaaggagtaatcctctgccctctggttttcctttcaaagaaactagggacaggcggtggccttggctgccttggccatgagcttccctgagccgggtagctggtgggctagtggggccgttggtggcaggtgcagaaatggtaccacactcactgtcccattgcccagaaagaacatttacaagtctggggagagcgctcgtaatggttgctgagtttggaggacagttatgttacagtcttggtggctttttgatgaatggtcagataaagcttcactataaacctatccagttttacacagaaaggacatcttttttacatttaaagttgtgtgtgtgtatatgggggaaagtggtggtgttatagctctggaggaaattaaaccataggaaatagtaaaaacaaggtctctgtgttcccactgttgacaattcacaagttaaatggtggaatgagaagggataaaaaggatttcaggggtgcacctgagtgctgtcgcacacataggggtcagagtctagaatcccagtgctgggaggacttgagaagccatagattccacccccgtggtttacagagaagggaatgaaatccccatcaatttggcctttggcctaagccctgcttctaaaaaccctttagaagtctggcttgtcatcccaaagtgcagtccaccagcttccgtcagcttggaagagacagcgcctctgcaagctaaaactcagctcacgtcccggttggcaactggcaagaaggcggcttcccagtcttctgagaactgggtttcccttctaactcagtggcaccctctctgggccctggtggagaatcacttaggaaagaagcaggctgctgtcctccagagttccacccatacccctaccattgaccctactcctaccactacccctcacccccatccctcacccccacgccggaaccggggtcgccctccatgatccggactggtcttgaaggatatctaagatgtgcgggggagtgggaacatcgctgtgaagctaggtgatagtcattgaagataccgacaggagtcaggtgtccagactacggggcatggggtaagactggacgtattggataggtgaggaagctgctgctggtcactcggggctcgcgaatatggcatcctgattgcggtggtggcattcaaagatatgggatagtcgttcgtgatgtccacggctacgcctcgtgggtgatgagttgtagatcataaggtagagaacccataccgatnnnnnnnnnnnnnnnnnnnntacccctcacccccacccctacccctcacccccaaccctttccctcacccccacccctacccctcacccccacccctacccctccccctcacccccatcctcacccccacgcctaccctccacccctaccatcacccctctgggctagagcagagcagagtgaaaaagtaacttagagaagcgaggatcaggtgtgcacagggttcctaactctgctgatatcttgggaggtgctgggaaattttccagtttactggcagaattactctcctccctaaatttcaaaaagcagagaaggacgttatctattctcttttctgggggaaaaaaaaagtttttttttggagacagaggctcactctgttgcccaggctggagtgcagtggcacgttctcatcactgcaacctccaccaggttcaagtaattctccctcacctcagcctcctgagtagctgggattacaggtgtgcaccaccatgcccggctaatttttgtatttttagtagagatagtgtttcaccacggtggccaggcaggtctcaaactcctggcctcaagtgattcacccgtctctgcctcccaaagtgctggaattacaggcctgagccaccacggccagccaggatgctaactattcttaaaggatagttagatgtgcaaaggagtttggacttctttgtgaggctaacagagagtcattgaagagtacaaagccggagcaaggtgaccagagtaaggggaagggggtaagcctggaggcaggggatgggtgaggaggctgctgcaggtccaggggggcaggggaagatggcagcctgactggggtggtggcagtgaaggatttttgagatatgttggtggtaaaagcagcaaggcttggtggttgatgggaggtggatgagaagggagagaactgataagggtgactcacaggtctctccttgggcaaccgggtggccacggtgctgtactcacagaggggctggtggaagaggaggtggaggctttgaggaacaaggtaatgagtctgagattcaagggttgggcaagcagaaagagaaaagttgagcaatggaagattagggttctgtgtagagattgagaaatgttgaggcttcagcacagtccacagcacattcgagtacaacactgagcagaaatgctgctgttttagaagagggaggcaaaggatcactcgatcatgctcactgctccacactccgagattcactcacagtcatgggtacagggtggtgcatgcggttccctccgtggcttttacatggtcccaaagcggttgtccctcttccctctaataaaggaataaaggcaaatgttcccgcatgctttcttctccatcatgacagaaaggaagaatttttttctaaggattttactaaacagaaaaaaatagatatgtcctttccttttttcttttttaaactccttttcactagaatgatcttgccctgggcccgttatgctagagctgggaatttgtgtggggaaaggaacacatcgaggtgttaagagaatgtaaagaaaatattttccatctctggtgagaactgctgaggaatgagctgatgtgggagagagaatttagaattgatgtagagaagactttcttacagagcagacttggaagacaagctgtggaactgtgttctgcaaagatcagagggagtcagagagacagctttttgtctgtagagtttcatgggaggcctccaggaacccttggcaggaggtgcctggagacccatgaaagggaaagtcctacttctgggccttactttgaatttcctcctcttaaacctcaggcccagacaaaacctctttcctctccaatatcctaggcgctgcctagctcgagaaaggacaaggtgggcaaagttagaatgtcatttatttcagcagcttgagaagaaattgaaactccagtccctgttccgtttctgaccctcagtgaccttaggcaagccactaaacttttcaggcctcagttttctcagctgtaagatgggtgggaatagtacctcctgcagttctggggtgttagataacgcatgtaagtgcctggcacatagtaagccttcaataaaagtcagctgtggttgttactgatcatgactgtcctgtctcccttgctggaagaacaaattactagatgtaaaaagtcatttaaaagcaaaaggtactaggcaaaagttgtgatgctatcaattactattattaataataggttcctaattacttttgccacggtattaagtgaaggcctctttgggtgggtgatgactgagaaaatgggaactattattaatggagctgacagctcctgttactagctccattgacataatatttctctctgggaatcctttgacaaatcagctgaatttcctattcccttaccctaagctctgtaaatttgatccacatgtctccagtgttgtttctgtagattaataatggagaaaggaggaggagtcaggcctgcactgggctctcccagctgtttggcctgtcgtgggtttcagcctgtagttggggtggttttcccttttgttttacttgttttaaagcttacggccagctcttcccaatgtgtttggttactcagctgtcagggagagtttctgctttagggactggggccctggcagggggctgcgggggagagcccaatcatgaactcttcctcctcctccaacagaaacaaagcttgaaggaagtgctttgaagcagtgctttgctaagtcagcactggatgtgatgagaggggtcgctgccatccaggagaggcaaagggagatggagagggggccttcaccacatcagccaggaggagagcggggaggcctgggtcaggggaaggtcaagctaggagggcaggactgaccatcagctgaacctgcagaacggtcagagaacacactgaggccctgggctggaggaagacctctgtgtgcatttcctcaacaaagaaaaacacatggggttcagcacagggtgtccatgagtgaaatgggcagtaataatacagccatattgtcatatgcaccagccacacataaggacagccatgagtgagctttggtgatgtgttcactggactctgagctcacagaggagttaagtatatgcattgtggaaccagtccatcccagatttgaatcctagctcttccacttacctgagcaagttactcaaagtctctgaatggcagtagcccagtatctcaaatggaagtcagtagtacccatcacacagggtttttttgttttgttttgttttgttttttgagacacagtctctgttgccaggctggagtacagtggcgtgatctcagctcactgcaaactctgcctcccgggttcaagcgatgctcctgcctcagcctcccgagtagctgggattacaggttaattttgtattaaaatgaaaaaactagccaccacacctggctaatttttgtatttttaatagagatggggtttctccgtgttggccaggctggtctcaaacccctgacctcaagtgatttacccacctcagcctcccaaagtgctgggattacatgtgtgatccactgtgcctggcccttatagggttgttggaagaataaatgagataatgtaaatgaagcctatgttcccagcacaaagtaaaaataatagcaacagcacttggtagagcatgtactctgagccaggcattggtccaagcattgacccccagttactcagttaatcctcacagcagccctgtgagctaggtactctagttatctctagttaacagatgatgaactgatgtagagtctaagtaacctgaccaagatcacaccactggttacgtgacagccagaattacgaaccccaacattctgctccaaagccctgtctgctgtacctgttgctgctgttgtccttgttacatcacacatgtttagggacttctaacccagacttggccacatcccggtgctctccagttatctctaggaattttcagagattttctccaaagtgattaaattcctgtgggtatttttctttaaaaaagaaaaaaaaaaacgtttgtgggtgagtgttggaaaaagaaaatctgtccatcaaagaaacagtggttaccaaaagttgggaatccctatctagattctgactgcaactagaatctctgtggccacatgctcttaagagccaacatgtaattttaaaccagtctgatttcacttttctggtgctttctaagaagccacatagtgagttggagaaatttacaggctgtcaccctctgggattgattctgacagttctgctccactgctgttgaagtgttaatgaaaaacattaattggacttggcccatggctaggacacgtccccttcttgaagtggagaaggcagcatcccttttgaatggttgctcccagcatggggaaaggagaggactcagggcggcactgcccttcaggaagtcaggatgggcatttacatctgactcagccatccctgagctgcatgaaaacaaagtcaggtctctttgtcaccccagaaccctaagtatagcacaatacctgggctgagtcaggcactctgtaaatattcaacgagtgagtgaatgaatgcttgtatgatccaggagcctgggctgagtcaggcactctgtaaatattcagcaagtgagtgaatgaatgcttctatgatccaggagcccaagaaggccagtttcttgagtacctccaagaaacgatggtctccacgtgcttaaaaccacagctacgagtgagctacttctcattctggcccctatagcaccgtccacagtcaaagttctcaagtcctcaaggctcagagagattttacctcctgaacctctctctgtcaagagcaggggagcagggctgagccctgcctgcagcaggctggggcccactgaacttccactccttcctaagtgtgacctgtctgccttctttccccataggtgtcctctccctccccgcatacttcagcccctacaacggcgggtccctgggccatgacgagcgagccgatgcctatgcccagctggagctccgaaccctggagcagtccctcctggccacctgcgtgggcagcatctcggagctgagtaagtgtggcctcagtgtctagctggatggtagagcaacggcgaggtcccagggctgggggaaggcagggagagctcgcctcctcctcctccaagtgctctggcctcctcctcctccaagtgccttgccttccctgaaagctagatctttctagaccagaggttgcaaatacacaaatctggatttctggtttctcttgaaaaaacaaatgatctagcaacatggtaccccattcctgcacagcagtgacccacgggagctaagtagcagcaaagtgggtggcatgtgttccccactttgccacagacctgggtttcatcctggggaggctgtttcattaatttcacctgcctggccccacaggctctgaattcacaactggtgctctttctcgaaagaaagcacacccaaagcctcaatatagtaaaaggaagataacaatagagcccctctggctgaaggcaggtgtggccaggtggcatctcccaggactcagggctctgtggcacacacttggaacttgatgtggctctttaccgttgacagctgcttccagggtgttaggagagatgaaatcccatgccagctcctgagctccccctctcattacccatttgatttgagaaatctgactacatcctctgctgccttcattccccctcgctctgttgagatcacccagtggagggcagtgacacagcaggggtcatagcacacagcatgggcacacctggagtttccctctgctccggccttctccgtttgtgattccctcaagtcttctgacccctgaacaataaacggcaagcctctgtttcttcaggtcatggcttcctccttccctgcattcttctgccccctctacagacaggaaatgaaggtgcctggttcaaggtcacagagcagagctgcaatagggctgggagagaaagcaggatttctgactccctgtctcctggtgacattacagtaggcagggccaggatgttgttgcctgggtcccctgtcccctgaggggccccacaggaagtgggttctggtttcatctccgtccctgagaagtgtctcctggacaatgggctgtcttgggccctcgcacagtcatgctttggtgagttcttgtgccctgcagacagtaagggacacagcccctggtccactggagagcaccttggttttactttacacttgaacattaagtgagcgccttctgtgtgcaagacaccattgtgaagcaccatattcactttttatctcatttgttcctcagaacaatgcagcaagttatgtcctgatgagagaactgaggcttagagaagaaaagtgattttctccaagtcacacggatcagagctgggggcttgactctggacgtgtctagggctgttggccccctggataagactagcagcccagccaccagctccttggggcagctgagatcaagatcggggctgatcctttgcctcttctcatggtggcctcatgcccattacaaccccagcccagcctaagggaggagcatttagaggcctcccctaggtaagggcttgacatcattctgccattaccgctagccaaggggccaagacctgttggctctaccacttacaacaatcctgagttttagtctgcccctttcaccaactccactgctaccaactgagcccaagctgaccatttgttttgttttgttttgtttttgagatggagtctcgctctgtcacccaggctggagtgtggtggtacaaacttggctcactgcaacctccgcctccagattcaagagattctcctgcctttacctccctagtagctgggactataggtgtgcactaccacacctagctaatttttgtatttttagtagagacggggtttcaccatgttggccaggctggtctcgaactcctcacctcaagtgattccccgctttggcctcccaaagtgctaggattataggcatgagccactgcatctagccccaagctgcccatttaaagcttaaattgggttgtgtcactcatctgctcgatatctatcccctctatcccccgacaatggcttcccggctcatcggtaaaatccaaaatcctcactctggcccaggatccatatatgatctgacttcatcacttcatcctcttctctgtggactgcactccagctgcctggcctcctggctaaggaccctcccactccagagccttcacactggctttccctctgcctgcaacactttccccttgatcctcaagtacattggtccttcacattttcaagcctctgcccaaatggcaccttctcattcaggccttccatgagtaccacactctcattccactgtcttccctcttgtggctttgattttattaaagcactgatcaccacttgacatgtattatatatttacttacgaatagtttatcatctctctcctctgactagaagagtcagcttcctgagattggaaactttatctcctttgtccacggctgtatcctcattgcttagaacagtacctggtacagagaacagtacctgaggtgcagcgtgcacacgtgtgtgtgtgtgtctgcacacatgcatgcctgtgagtatgcatgttcatgtgttaggaggaatgaggtctatcccaccaaatcttttctcctaaaactcgcctaggatttgtccacatcctggcccagccactcctcagggccaaagggagaagcctccttacagcatcttttcacagaccagagaacaggctgtgtcatgtgccaagttgccctgttcctccctttgaaaccagggcttttgctaacctgctgtggaggagggaggagacagaggtggaggcagatattgcagtttttctccctgagactaaagaacttaatgaggctagtgatacttggcactgaaccccttggacctcagagtgtaccctgagtttacatgcattaactccctgagcctctccaacatcagcctgccagatagggtgagaagtttcactcttgtatgagatccagcttcacacggagttttgggacttgtgctttttctttgtccctctctacccgcaaaaattttaaagggagagaatacaaaataaaacaaaacacttctttttgaagggagccagatgttctaggccttattttgaagacggtgttgaattccagactctctcctgctgtttttatttgatggctcataatgagaggtggaaggaccagagtgaaacctagcacctctaatcaagtctttcatggttaacaaggggggaggacttgtttttccttgcctggggggtgtttctgggcttcagactaaggtttcattgagtgtaggatcaattgaagtttcagaagaagctctgagtccctgccatgcttaaactgagagcccagcctagcctgcatcaggccttctcaaactatccatggtgaaggtccagagattttattcccctcagtctgctgcagaatgaaacctttataatgaaaaatcaaaataaatgtctagaaaaaggaaataagacatgtgaaatgcaagcccgatttttaaaattattattagctagatataaaattactgtcaattgctatgtaagtttttaaaaattcactcttcacttctgaaattaacttactgcaaaccagtaagtttgtggacctgtcccggttcacagaccacacttttagtagcagccatgtgatggtcaagagcatgcgtttgggaagcagggaccccagttcaagtcctggctgattgacttactagttgcagaactgggacgggtcatttaactcttgcaagcttgcttccttgtctgtagagtagaaagacctccttcacagggtggctgaaaaagttaaaggaaattttgtctatcttttcatgtctgtcatgaagcctagaaaatacaaagtggcagggagcaaaaatcaccctaggagaaggttccaagcaagccgctttctttgccataagtgggttgccacgcagtgtaagtttttagacgtcacagtcagagttctctgcagccatttgtctttctggtctgagagaaactgaccatagcagggcttggatcgaagaagccggggacctccatctccagctgccttcgtggtttttctgaacttttgggttatctgcttctgtttggatgggagattccatttctttcttgattttcttgtctacatgaagcaggaagtgtgctgccaaagggttctccaccaataacaataaaacaacaataaaaataattaaagataatgacttctaccttgttgagcctttgaaatgttatttcaacaaggtttctctttgatgctatcacagactctttgatttctcctccttgtggtcctgtggttctgccaaaagttatgacatttagacctggagaaacgggagccaggtttcaacttattagcagccaacttagctgtacaactggctgctgtgaggcgggttggctagtggttgtgatgccagtttctaccacccatggagcccaagggcagggttgggatctggcatttcagggtgcagactcctcctgtcctgggaaatgtggggcagagtttgacggcaggcagtagtcctggaaggaagagtccacaggaggcggcctgtaggatagaggaataataataataggacattaattataacagtgctatgttcagccctaccaagtacttactctgtgccaagcaggatgttaagtgctttacatttattgtttctttgagccctcaaaatcagtagggtagatactattgttcccattttacagatgagaaaactgaggctctgataactacgtaagggatttctctttctctgtaaggaatcgccaggggtggggcttaagctgacctccgggggagcctccctgagttctcaggcctaagggaatatgggctggaattaacagtaacaggccctgatttgaggccaactgtgtctgacttgaatcaatctatcagttcacctggtgattttcaaacctgagtggacattagaatcactgagggaacttctacaaactagagatgcccaggtccagccacagaccaatgaaatcagggtcacagggatggaaaccaggtgtcagtaactcactgccctcagccctcttggccctagggtttgtcaggagcacccaggcagctgaactccaacggtatggatgagtagtcaggagtagggaggagtgaggaaccaggggtggtggtggaaagggacaaggaggactttcctggtggggatctcaaactccaggggtgtcatttgtccctgcctggaagccaaacaccatcaccgtggctgtcatgggagaatttagcagctaatgagctcaaatcaagcctcagcagaagttgtattttaaaaagaaatgaatgtgtaaggtgaattcttcattctccaaatatctgctgagaacctagtatgtaacagaccctgtgcagggctctgggacacaacggaacagaacaccagattcccagaagcagcatgaaggttaattgagtaaatgaatgaactggttctgccatgcatttcatggcacttcaccggccaaattaaaacctgttcatttcttccaccttaaggttagccgtgcccgcctgttgaagggctctctctaaggaatggccaggggtgaggctgaagctgaccccgaaggagctgcttttcttagagcggaggtgcctgcaggtgccagggctccttcagcccatcctttctcagcattgtggcctcacacaatgatgagccgtttcctgtctggggctggtgagatattgaaaatacttaagtagaaacacatcacaggatatggggacctaaggatcccacagactccagcagggcaggctgcagcccagctcacagtgaagtccatggactttggagtcgaacagacatgaattcaagtctagactaccattttctagccacacagccatggctggttaactcaacctgtgggctctgaggtgtccctgtggccaggagaatgaatatatggggtcaggaaatgtttatcagataagcctcaagtttttgttttttttttttgttgttgtttgtttgtttttttgagacaaagtctcactgtcaccagtcacccagactggagtgtggtggcacgatctctgctcactgccacctccgcctcccaggttaaagcgattctcctgcctcagcgtcccgagtagctgggactacaggcgcctgccactatccctgactattttttgtattttaagtagagacagggtttcaccatgttggccaggctggtctcaaactcctggcctaaagtgatccacctgcctcggcctccccaagggcttgggattacagcgtgagccactgtgcccagccataagcctcaagttcttcatctgtaaaatgggaataataccccctagcactgtaaggatcaaattaaatcatatttctggggaattgcatactttgtacatagtgagtcctcaacaggtgatgatggtggtgttggtggttgtaattggtgctgagacagagggaccttctccgctgaaatactttgggttttgtacaagacagtgcaggggagaattgccacagagcctggccctggctggtagaggctgggaagagagacccagagagattcccttggtcaaagatctggggagaggcccatgagggtggtggagagagtggggatgtcaaaaaagaaaccaaattaccctaagttctggaggagacaggccctgccaagtatttaattcagcaagagtgaaatgaaagggaaacgaaattgctattgtgcatctaggtgacagtttccacctccgcctgttggctgcagggcaaacagtaattatgcactaaggcaagggagcttcagccaggaacatccttggaagaatgcaggctgtgaactcagactttgtcttctttttttctcttcctcccctctgccctccccgccccccaccaggtgacttggtctcccgtgccatgcaccacatgcaggggcgtcaccccctgtgcccgggtgccagccctgcccgccaggcccgccagccgccacagcccatcacttggtcccccgacgccctccacacgctctactactttctgcggtgtccacagatggagtccatggagaaccccaacctggaccccccgagaatgaccttgaacaatgaacggtagggatcttccttgggctgagcacctggtgggacgtgctcccaaacgtgcattgaccgactgactgacactgactgacgactgaccaacagggcgaggaaggggccctggaactgtgctatgcctgtgaggaggtggcccaggaattccgatggatgaaggcctgcactggtgtgcagtgggatttttttttcctctgagctgatgcagcatggggccactgaggctcagaacgtgtgcttctgcctctgtgcccagtctggcatgagctcactgggctctctgaaattcagctgccttgttataaaatgagacagtcacacccacctagaaaggttagtgctctgagtaaaagcatgtaggatgggggctaggtgggaactggcccttggccagtggtagctgtcacctcttttcatgggtttatcccattcaaaagtgatcaaatgatcattgctgccgtcattgttatgaggggtcttgggtgtgttttgccccatccattcatttaacacaggagactatcctggccctggcagctctctgatctccagcaggttagtggttgaatagcccctggacccaagcctgtgggcttctagtcaggtactttcactagagggtcccaacactttcctagctgggagcaaggctgcaaagaacagatgtgcaggttgtatactgcacaacagaacccaatgaggggcatgagtaggggatgcacgtggggccatgtcagcctgaggacaggataccttttcttttttttttagacggagtcttgctctattgcccaggctggagtgcaatggcacaatcttggctcactgcaagctccacctccaaggttcacgccattctcctgcctcagcctcccgagtagctgggactacaggtgcccgccaccacgcctggctaatttttttgtatttttagtagagacggggttgcactgtgttagcaaggatggtctcgatctcctgatctcgtgatccacgcgccttggcctcccaaagtgctgggattacaggcgtgagccaccgcgcccggtcttaggataccttttctaatgggttttctctgagggctgccttttgaaattttctacctggaaaatataatattttttttataactcgtaccaaacattgtatatgctggcatgagcctcacatggaggccactgcttggccacttaaggtaaggtctgtccatgggctcaagagttgtgggtttgagggtccaggaagtgggaaaggcttgcactcagtttaggaagccccatccacacacatttcaccactcagtgaagcccaggaaaggcagagcccacgggcctcagtgccccacctggagggagacgatctgagacctcaatattggaagtcccaggggctctgcagtccccttgcctggctgtccgctgtctttggggggcattgagtctcatcagctctgtgatccacagctggctccacagccaggtctgcttcctcagtgccccagaaaacaaaggcactaaggtggatttactgagtgtttactatgtgctaggcactgtgctgagcagtttgcaggcggatgctcagttaattcacacactaccaagaaagaggtgttcttcagagccccatttacagatgagtaagtggaggcatggagagactaactggccccacgacacaggctcataaccactacactgtacctcctgtcactaagaggaatataaaacagcagtggcccagtacacgcatagtagggtcccagtaaatggtaccattgctgttatcagtactagtatccttatgtcatcattgttttacttctctgggagttggagggcaaatgcaagtctgaggagggccaccctgggcctgacacagcaagaaggctgcaggtggagccctgggcatcctgaaagacacctttggcgggagctggggccaaagcataggccctaagccccagctgttcctgctttgtggaaaagtgttgtggttgaaggagtcagctgggaaggaaaaagagcagggaagatatctgggaggaagaggcaggaggcttgcttgctgtttggtaaggtgctgggctgaggccgggtcattcacacaaaggtgactgggaggacaggcgccttcttcaggcctgttgccctggctgctgggccctcaggctgtcatggctataggcccaggggcagtcattcctctgctggcactttctcccgcccccaccccccccccctccgccgggcatctttgtcatgtcctgtggctttcccccaggagggttcccagccccctgtactctaatacacagcatcagggtttcttcatgatctgagttgcacagccctatgtggttataatagctgagcttgcatggtagtagacacacgtgcatgtgtttacgtagccatttatttaaaaaccgcactatctgtagcacaaataatttggtagcaaagatatttttccatgaatcatttcaaatgaatatcagacacctggggaattggaacccccattaggaaaaaaaaaaaaaaccaaatttttaagttatgacacagaaaggaggacaaccctaaaaatacctgagggagccaacagcccgacggcgccctggtggcctggctcctgtcgctgagcagatctgctgccctctggctcactgacagggaaggccctggaggctgtggggatccttcctgggagcgctgagcttacagcattactgcaggctgggctgggccaatgtcccatcaaggccccagcaccctgataccctcaccagagctctggggaaaacctctcctgatgcaaatagtagctggagtttgctagggttccagagtgggagagctttgcttttgtgagtttggggatgtgcgacgtctgtctcttgctccacttcatcctcctgaagccccgtcctctgtcccacctggaagcatggcggactgagttcagccagccagaattggacggagcccctgatttcaatgtgaccgtggttgtctggctgtagagactgtctgtttggggattggtggctctctgggtttgtttgggattaagtgacctcctctactgccttgcacacatgggagagggagctcagtttggtgatatgggtttggcagcatgacatcattgatggaaccactcaagtctgtcctcatatttctgctttaaagaaaggtaccctgattccttcaattaggggctatgtgtgaccacatccatggcgacaaagggaagggacgtgtgttcatctcttttgtgtggagctcactgtggcattccctgctaagccacctgctgcttctgcagtgtttggtggggacttcacatctttccgtaaggggccttctccccagagctctctgctctggtttgggagaagagacagtgggaggagggaggggcagaagcagcaggaactcagagtggtgagcgggcagctttgcagggaatgagaagcctctaacctcctttcatctactgctgcagtgagcctggtgcatcaagaaacagtacaggctttggggcagaggcctgggctcagagggcccttccatgccttaggctcctcacctgtaaaatggggctaagtaattctatccggtaggacaaagtcagataacatacgcccttcttttaaagcccatttctacctacttctaggcccaaagaacttcagcaagtttggtgctatcattacctccgtttcacaagtgagtacaggaggccgcggggtacctggctgataagtggcgaggccaggattcaaacctgaggtctctctcacctcaaggcctttgcctttccctgtgccaggctgtggctttcccagctggctgctgagacctgatcctacagcactgaggcatgctgggtgggccctggcctttggggccaccttctctggggccattccagccccaccccctcactatcctgggaaagctctgcagctggagcctccctgtacccttccagggtgcctttctcactggcagctttgcatcccaggcaccagccaggcacaaggcagagtctaaaacacagaattagtcacagctgctgccctgcagggtgtgtcatcacccgagatcaagcttagaaagtgaaagagcctcttgtcagggatccaggttgcccagggagatcgggagcctccttcctctgaggtctggaggagaaaggacaaccatctggttagatgtggcccttgctggttgtgcctgggggcagagggatgggctagctggaacagaatctttggcagaggatatacctcctcagccatcacccttctggggaatgagaggtctggggcagtaaggataaagactacgcagacacataggaaggcaagagggccgccagcttgccagcaaattgctggaaggcagcgtcatcaagtagaggagacagagggagacatgcagtcagaggtgcagagggcctgaggtcgacaggaggtgaccatttctccacatcagaacctgggctgctggagggtttggggtcccccaggcacccttccagactgcatctactgtgagcagcagcaaagaagccagacccttgaggagtggccaggcagagagagtgggaatggcagagggccactggtccacagagcggtccgcttgctaagcctcagatcctggcctcttgcctcgttctccccagccctgcacagcacgtctccgcctctgtggagggcggcacactcagaaggcttggagcctgctggtatccaggacatgaaaacaggaggagtgtggaacccttcccagagttctgattgggggtcgggcctagaaacctctggtgtcatgacttcgtagccagccagaatagccccatctgaggagggccctgctattcaaaggcgtgcatttgagatctaccttgccactttttataaccttcaaccagtcatttaacctcttcaaggctcttaatcatctgtaaggtatgcggacccaatgagttaacatatttggggggttttcttggaaacagggtcttgctctgtctcccaggctggagtgcagtggcacaatctcagctcactgcctctttgacatcctgggctcatgcaatcctcccacctcagcccccccagtagctgggaccacagatgtgccccaccacacctggctaacttttaaaaaatttttgtagaaatggggtcccaccatgttgcccaggttggtctcaaaatcctgggctcaagggaccctcctgccttggcctcccaaagtgctgggattatagccatgagccactgcacctgctcactacatacttttagaacagggcctaggacacactgagtatctgttcttatgattatcagcacgatggtttgtatcaggcaggggagcagcatatacagagtccaagtggctagaggcagcaaggcaccccagagagaccggcgatggggaggagcagagcaagggaacacgggcactgttgtgcaggatggagcacagaagtgggcggaccttgttggccaagacacacagggctgagcttgtggctgagaaggtcctgcccccattggtgcagctatttgtgattggctgggttttatttgtccttcttcccacacttcccttcttggggcctgaacccttctaagaataagggcagcagagggtccaggaagcccctcccatgctgcttgtcttgatgctcctataaaggtctgccctggagaagtctgatatgtagttctgcacccccagacaggttcaggagagacgagaccagggtgctgatgttatactaatcttgttctccaactcacatagagctctttttgctagggctagcaggacctgctcagaggttgaagctcttgtccaggtgagatcctggtagacgataaatgtgtgtctggcccagctcttggcttccctgttccgtatcaggctagacagaatttcaaagagctggagccagcaaacgtgtcagtgctctgggttccagccactttgttggaaacgcacacctggggctttttttctctttaagagactggctcactctgtcacccaggctggaatgcagtggtgcaatcatggttcactgcagccttgaactcctgggtgcaagtgatcctcccacctcagcctcccaagtagctgggactataggtgcatgccaccatttcacctggggcttctgatggtgaccaaggggaggagggtgccataagcctcttgggtcatcccagaggtgttatctcatctaccttctaggagtatgaccatgtcaactcatcttcctgggcctcagtttcctcatcagtaaaatggtgaagatagtagtatggcttctacggttaaatgagataatacagtaaagcacttagctaaatgctaggcacataaaaagtgctcattaaatggtgtctcctcctcattataatggccataaacaacatttagatggcatgtttgacactcagagcaggctctctttattgaggtagcatgacatttcctaaaatgtgattctcaagtgatatctgggtcagtaatactactactactacagttattaatactactactgatgatattactactaattaaccactaccactatgactaataataatacaattactaagattactgctactaccagcattaccactactgctagttatagcgagcgttatagagcacacattcacagacagatactgtcttaagtgcttgacttactcctgtttctccctggactcctgcggatccatggagaagggctctaggagaatgataaagagtggcttatgagtctccagcctaatgagggagacaaaagcaagacggaagtaaacaaatgagcaaaacccaccagacagtgcaggaggaagctcaggtgcatgatggtgcatgaggtcagccctcaggctctgaagcctgcctggattccaatcccagccctgccactcacgagctgggtggcctcaggcatgtcatttaccctctgcatctcagtctcttttttttttttttttgggggggcagcggggcaggggtggggcaggggccggatggagtcacactctgttacccaggctggagtgcagtggcacgatcttgactcactgcagcctccaccttccagatgcaagtgattctcctgcctcagcctcccgagtagctgggattataggcacatgccaccatgcctggctaatttttgtatttttagtagagacagggttttgccatgttggccaggctggtctcgaactcctgtcctcaagtgatccaccttcctaggcctcccaaagtgctgagattacaggcatgagccacttgcggccagcccagtctcttcttaataggtgattaatagtgtcaacttcataggggtgttgtggggatcaagtgagttaatatacataaggcacttagcatagtgcctggtacacagtaagaagcagcagcagcagcatcacatttaagaggattctgagaaggctggagtaggtgggggacatgtcggagcagacctgggatttttaactgggccttaaaggacagccacagaagattgggagaggtgaatggcatgggcagcaagagtcatagaaggacttttgttgtttcagagcatgaattttataacagaaatggacctacactttaaaaacataaaaattagttgagtggttgttgttgttgagacagggtctcactctgtcacccagggtgggatgcagtggcgtgatcacggctcactgcaacgtcgacctcctgggctcaggcaatcctcccacctccacctcctgagtagctgggactgttggcccactctgccatgcctggctaatttttttattttttgtagaaatggggtttcgccgtgtcacccagactggtcttgaattcctggagtcaagggatctgcccagtcagcctgccaaagtgctggtgttacaggcgtgagccacagtgcccagcattttttattatatatatatttcttttcttttctcttttcttttcttttggctagtcaagtgaaacagtgggagtggcgaaggaacaaggaaatctgtaactggttgtgatcgattaattgtagaaaccactgcactcagaccagcagttggttttttaagtcatcgctgattgttgtttatctaggcaaatacttcaaggtcaagctgtaggtcagtggtttcccagtggaaaaagaagtgcatcctctgagccgctgtgggatgaggatcaaatcccagctcttttcttctggctctatgatccaagcaaatcatcttacctctcagagtctccgtttcctcctgcataaggtagagatctgaactgtgcctgcttcctaaggtggggaaatgccctgatacgagtgaggtaccacatcaaggcacctctttgttccattccagatgcagcagggagaatgtttccctcagacagcactttacataaagaggacatgcccacagataggctgtgtgttcagtctgaagaagtgggctcgttaatcttttgctcagcttgcgaaagtgttttcttatcaaataatagagatgatggcagtggtggctttatgctactgacttctgagttccttaaataccatttcaagaagatttgcaatgttaagctcttttctctcctttcctctccccctttttgtgcattaaatttccatctgtttacccaaaatggaagtaaatgaaataagaatagctattgggtgaattaagtacttgtttccgtgtattccccaggctggcacatccactagcctctgaagggacttgttcacagtctacggtgcacacagggagcttcctttccactgccaggaacctccctcactatacgctctttttgtttccttcagagcaccttcctctatctgaagtcaccttgctcatgtctgttccctccccacccctctggaatgtaagtgccctcggtctgccctgttcctgctgtgtcctcagcacagtcccaggcatgtgtagtaggcagttaaatattttgctaagttaatgaaataggtggtagaacctaatggttgggttctttggagttaaaaaggccatgatatggggtcccggctctgccatttcctagctgtgtgactttgggcaagttacgtgatttgccaagtctcagtttcccttgcttgaaatagaaaatgacttgaaatatttccagaattttttgtgaggggcgaataaggtagctacatgttaaggatgtggcagagaataaggtgtttgtgcatggcagctgctattatcagaataatcactgttaccataagcctgcgtgaaggccaaaaagaccacgttgtgttcaatgaacaagcaatccagaaacatttgtaacagcaaaaatcatatcttctcaacatgcatgtcttctctccttctcatccatccctccctccttccctcagtccctgctctttagtccatcttaactcagccctcagagtagctgggagccaggtgagtgagaaagatgagaggctcacacctgtaatcctagcactttgggaggttgaggtgggaggatcactttaggagttcaagacaagcctgggcaaaatagtgagaccccatctctataaaaataaaaattagctgggcatggtggtgcatgcctgtagtcctagctactcaggaggctgagtgggagaatctcttgagcccaagagttcgagactgctgtgagctatgatctcaccaactgcactcagcctgggcaacagagcaacaccccatctcaccaaaaaaaaaaaaaaaggcaaagaagataaggtagacgagaagaccacatcacagaaggcttgttaaacgaggcccattttggacatctacgaaatttagccttatcacaccctacccaaggatttcaaagaactctacaaactggattccatttagctatgggatcaaagacgaagccaactatcagtcactctttaaagttggtgacgtccctggccccacgcctgctggtttagccatagtgcctatgtgcaatggactgcggctgctgaaggttaaacttggaagagacctgatctatctttacgtgggctggaagcatctagacaaagttttacagtttacagagcttgtttagtacacagctctctaacaggtccttacagtagctcttggaggaaactattacattcccatttatagcgagcagactgaggccttgaggaggtccgaggcatgcccaccatcacagctggtaagagacagatctcagctcaggaatggaggtcggttgtatcaataataatgcaatgaattcacattgctcagagtggtaaatcccttcccctcccaggaggggagagggtgagaccccggagccggggatctcggtcagcacctccttttcccagagcggtgtgggcagcttgctctcagctacttggggcctctttctcagcaggcttgcattggctggctctgggaggccagcctgggggtgggcgtctgcccagcatccgagaaggagcgagccagggattcggggcaggaagtgtcagtgccacataacagggatagagacaggacaggatcctggcccggcctctgacaagcaccccccagggctggctgttgcatgggacttcctgtcccattgttggacccaccggtcctcgcagaaaagaagactgggaactgccgggcccgaggagcttcattcatttggagtgtttttgtaacacgggcagcaacaatcccctttgtctgcagtcttgccaggattctcaatgcagggaattcccaactctaaagggaattgattttgctttcttaaagaagcctgcttccgaggcgaagctggagagcattcagaccctcaggatggggggaggacaggagctgggtggtatctggagccaagccgagctggttcctggcgtgctctcacttgcctgccaggcagctcttgggatttctatcctcttgcaagaccagccgccctgacagctgtctgtgacttgcccctccccgctttgactgctttaatatttgtggatttgaggggaaagggctcttaaggtgcctggggtgcaccccctgaggcactggagcccagccttctgttcccggccgagttcagggcctgatgaggctgagagagcaaaagctggaggttgggcggagcggtgccgtgggccccaaggcaaacctttctccatcacgcctcgttccagctttccacccaccagggctcagagcatttcatgcctgcagtttggtatcctgaaagacccccagggtggtttggggggttttgttgttgtttataattgacacataataactgtatatgtttatggggtacaatgtgatggttaaatacatgtatacattctataatgatcaaatcagggtccttagcatgtccattgcctcaaaccttcatcagtgctttatggtggtaactttcaagatcctcttttctagctgtcttgaaacatataatacattgttattaactatagtcatcatactgtgtaagggaataccaggacttatttttccaatctaactacaactttgtacctgttgacccacctctccccccaaccccactccagcctccagtgaccattcagaatggttgttttttagaaccagactaatcacctttgtctagctatgtcaccttggacatgtgacctaccctctcaaaggctgtttctgcatttgtaaaaatgcagactaataagtatatctccctcgcagggtgactgtttcagaggtaacatatgcaacctcacacccacctggcacagagtaggccctgagcacatctcagcaaggtggctttgctgctcagaagccaatgccagtcttccctgcagctgcccttgtgatgtggatgcacaaagcagggtcaggccctgtcctctgagcttgcactgtctcttcctctctctctgtctgggctggagtgtaccacccctccatgacccccatcccatcaacagctcaggtcaaaacactgcttgccagtcaagaatttcactctcatatcaggcttcaagagccctcacgccactgcttcttcctagaagtttctagaaactcttcagctgacaatctgaatgggtcatctttctgccttatactatgagagttggggaaggtgagtgctgtgtgattacagttagctgaatccaaacaggattacctatcccaagagcctaaacaaaagtcccccaaccctggcccacagctcagcagataggataaacctcggggtcctcccacgtctgtcttcttggcagaggccaatgggtggtggcaggtgccctcgggagggaggtatgtttgagcaggttggaggtccccgcctgtctggtttccatgtggtgaaagagctcgtggtctctggtgagccaccacaaacaccgctcatgggagaagaaagcgagtccctggcacatggctgcagtgagccccatgggtggggcgtggccagtaggcctgggagctgcttcccaatgaggtggagagatgccggctttcacacctgccacccaagggtgtgggaagcactgaggcccaggcctgctggaccagctgcctgcccttgtgctggggcagccatgctggggagttctggcctgagaaatgaggcagatgtcctggcccttgcagggctaggagctctccctgccgtgtgggaaagcgaggaggggtggaggcccatgcgcagtctccactggaatctgtaccatctcacccacacgagatgccgccctggaaccaggcctgattcctaaggacagatggctgtgtaccctccactgaggctcagacacggtaacatctgcagaaccacagccaccttttcctattcctggtgacagctccatccctacatcctagctgccttcccagaagctgccttcccagaagccaccttggccccgggctgccgtgcttcccctaggaagttgttgcatttggaacactctcctgtgcaatagctgtctttttactggggaattatttccttttttttctgaaaagaactctttgccaatacccaagccaactcaagcttctaggaatgaaagacgaagcagctccccctttcgtgagagtgctctggagcccttaatgaacagtcctggaggccggacgcagcagctcaagcctgcgcaacatagacctgtctctacaaaaaaaaaaaacactttttaaaaattagccaggcctggtggctgagatgggaggatcgcttaagcccagcaagcaggttgaggctgcagtgacccttgattgcaccactgcactccagcctgggcaacagaggaaaactccccgttttttgttttttgtttgtttttgtttttgtttttaaaacaaaaacaaagtcctggagtaagagcagcccctgaaaccatggtagcagctggaggactttgcctccaggagtgagaaacatgccttgtgtttataaattcaaaaatgaagtttctaacaccggcttctgtgcggagagatggggaaacgtcagtgagcaaaaatgcctctgccttcagagaagatatagtccagaggagagaccgtacaaaaccataccaaccaaatcattgcaaattggacgagtgctgtgcaggcactaaggtagggctgagtgctggagggcagagggaggcctgcttctgagggggtgagcaggaggacctcctcctgcctgcagacagcatgagcccggcagcaggccaccgtgggcagtctctctagccgagggcagtacggtgaccatatgttctggtgtgcccagcccagttctagtttacacccggtagtcccagtgctggcggtagctctctttttccctttcaaaagtcatccagctgggcacggtggctcacgcctgccatcccagcactttgggatgccaaggtaggcagttggcttgagtccaggggttcaagaccagcccgggcaacatggtgaaacctcgccttacaaagaacacaaaacttagccgagtctggtggcacacacctgtagtcccagctacttgggaggatgaggcaggagaatcacatgagcagaggaggttgaggctacagtgagatgtgattgtgccactacacctccagcctgggcgacagagcaagaccctgactcaaaggaaaaaaaaagtcatccagtttgcatgacaaattgtggttactgtgcctaatatcatcatccctaagatggaggagttgggccagcaccaggtgaagaatctgagtggctgtggaatgtcatcttcagaagcttagactcagggacactgcccaggttcatatcccagctctgctccttggcaggtgcatgacatagggcaagtgacctcacctctctggccctcagtttccccatgtataaaacggaaataataatagtacctgctacatcaggcagctctaagaagcagatgagccactagatgtccagggcactgtggcagctgcttagtaaacgctccagaaatgttagctgtttgcatttttctattactcctgaaggccctgattgtcacacggtggacctcccatctcactgctaacagaaactctcaggctcctatggggacctgaagggtgacccctggggagacacaagggaaatcacccagagctagtcatgacttggttggctctaaatttctgtccctacgtgtatctgggcaagcttcatctagtgcctctaatctgtaccagatgagttttaataggaaaagtgaatttccccccccccccagagaacccaatgccccacctcaagcagaagtcacctgggcacaagtggagattctgctgtgggctcagctgcggttcagaggcagcctggctgctggaggagatgaggctgggggtccgaagagggaaccatgcccaactctgcctccaagccatgccaaaccattctggtttacccagcaattctagaaaaataatgagtacaagatgtgagctggactagaaatgtttctttggtgcagagtgaaatctgacttagcgggacaatgttggttttttatcctacgtggatgttttggcttggtattaggccgtggtggctgtgtggaaatctcagggaagctatggtgagggcctcattgctggccctgcagagccagccctgaccttcccaaagaagtctgttcgtggagccgtcacttgcttaggaaaagcttggcatctttgcaagttcctgacggtgccacttggcacccccagcccagacaagacagggaggagcatgggagcagtgtgtttcacggcatgatccatgagaaagggtgagtccagggggatgtgaccccattcaaccccagtgcttggctctgactcccactgaaggtggggcaaagttagtggaagaatttagggctgaaggtaggaaccactggggccatcctctcccttgatcgtcatctcttgcctgtcctttcctggactcccagggtgcttgcaggtggggcaggccacagcttagcgggtgatggggagctctcttggaagcaagcctgtggcacagtgtacctcccagccctgggagccgggcctgcaccccagaacgttgtatgctcacacccaccctgtcttcccagagctaagcttgggcctggtctcgaggcccttcttagcttgtgggtgtgtccagggtctgcctgagtctttgtattcagctcctcctgggtggatggagaagggcacaaaccggctggcctcatttgcttggcctgccaggatgggaacagagacccgaggcttgtgcttggggcccgggtcatgtggcctctggttacaggcctgtgccccatctgccaacctgactcactctggggcccctgcctaccccggggaagaacagagcctgctttgagctggaaactggaggggtttcctgttccatgttgttaagacaccacttataggactgtaatcccaataaatcatatgctttctgagtgcaacagggttgtttttttttgtttgtttgtttgtttgttttccaggctacaggggcctcttaaaaccaaggccttggctgggcatggtggctcacgcccataagctcagcactttgggaggccgaggcaggcagatcaggaggtcaagagattgagacaatcctggccaacatgttgaaaccctgtctctactaaaaatacaaaaatttgctggtcatggtggtgcatgcctatagtcccagctactcaggaggctgaggcagaagaatcgcttgcaccagggaggcggaggttgcagtgagctgagatcgtgccacctcactccggcctgggtgacagagcaagactgtctcaaaacaaaacaaaacaaaccaaggccttaagaagcttatactctttcattttttaaaggggggaaaaatagctttctcagtcctagttccattgaggggccttaggagacccttggattgaacaatcaggctcacctgtatgattaacttaaaggcagatgagagagactgttatggcacctgggtctagcatccctattgcagctgaattggccgtgtaaccttgagcaaggcgcttagcctctctgggtttccttttcctcctctagcaatgagaggaggtggtcagggatttcccatgcttctcatataaaaagacccatttccattggtctatttcatgtgctgccctttatgtacacaaagacaaatgctaccagaaagccactgacctttttaagtggctttgtccatctctgggatttgtctgcatgtatgcatgtgacggtatttaggttaggcctttgggctgtttgcagcatttgaggacagatcaggggttgctgatcccttgaagtaattctctgctcacccaccctcgccaccacacacgttcatgacccaaggcctctgggtctgtgttccttgctgttgccccttcccttgtgtgagttttttcactgccaaggccaagaggctgcactgccagaaacagtttccagctcacactcgacatagtggttgcatttgttttctctgttttatgagctgggatggagtgggtggtgggcagcctgctggcagacttttgcaggctttacatgtttatacttgctgtggggggaaggcaaagagttggctggactttcagaaaactggagctgaggcatttaatagaaccagattcctatagccctttttgctattatatattttctctgtcaacagacactaaactagtaataatagttaacatttatggagaagttaccatgttccaaatatgatggtaagtattttacatgcatgcttctagctgttttgtgaggtggtcctattatttataaccattttgctgatggaacaactgagaccgggagaggtgaagtaacttgcatagacccacatagctgaactcattgggaatacactggattccaacccaggccatctccctcaggagtccgtgctcttggtcaccatgcagtaggtacagctactatcgtatggagtctgtgaaataaaagcaaaagggctctcacaatgaaaggagttaaaaaccacgaactttggcaatttcttctttaatacaaaatatggcccacagaggatgacgatctgcccaaggttatagagcaagttcagttgtataaaagaaactagaactttctcccagtgaggatgccacagggaaggggtctaggaccttcggatccctttgccaggagcatgcatgcaagccatacaccactctaggattcaccagaccgtgtgccaccaggggcgaaatgccagctccgtgccagcgccgcctgccagcccctaccagctttgtcctagccatcagctgtggtcttccacagcaacagtcctcaaagtgtggtccagggacccctgaggtcccagggactcttgccaggagtccacagggccaaaactattttcataacaagaagttatttgccttttcattcttgttctctcacaagtatccaggagacttttctagaagctgtgtgatatcatgatgtcatcactctgacggcaaatgggacatgagcttgtgcgttcatgtgtttaacattttctcagttttaatttctgatacagccaatatccgtagaataacacacataaacaaaagctctttgaggtcctcattaatttttttttttttttttttttgagttggagtttcactctgtcacccaggctggagtgcagtgatgtggtgtgatcttggctcactgcaacctccaccttctgggctcaagcaattctcctgcctcagcctcctgagtagcttggactacaggtgtgtgccaccacaccctgctaatttttgtatttttagtagagatggggttttgccaagttggtcaggctggtctcaaactcctgacttccagtaatccgcccacctcagccttccaaagtgctgggattacaagtgtcagctgccatgcccgaccaatttttaagagtatatatagagtcctgagaccagggaaaaaattgagaaccactattctgaggtatcagatccagctaaggaaaaattcagcaggcagaaaggctgaacaaagggagctttttcagccccgacccggtctcctggctctggccctgcagatatctgcattcgggcacggaacgaccaagctcagcctacgggaaacgcaacaagcggggaatgagaacttctttgggatcttgaggatggtgcacacatcagtcattctcagccttgctccttcaggccctctcaccctggagttctcacacagccacgctgttgcagatgggagtttttaaaggggttttccagaatggccagacatgcaggtccagctcatctcagcctgcccagcagactccatggaattatcaggaaggaaacagtagcctggaacccacagcccatggaaggcatgttcctgagaaagtccatgaattacttctctttttaccttcccacagatcccaggctggggaggtgggtggaccaaggagtaaggcctgaagggatcagtttgggggccttgtttgtacatgtgggcaccagccacctccccagaggcagagggctaatctagatttctgtatattgaaagaggcagagggctaatctagatttctgtatattgaaagtattaatcagttttcattcaggaagcagcattctgggtattgtaagcaggagatgatttaatgcagggagttgggggttcacagaatcattggaggagctcgtggagcagggtgtaggctgagcatccaggaatgacgaactcgcccattaggggagctgctccctgagacagcgcctggaactgtgagtttgaacaacacctctggagctgcagttcaggagtaaagctggaatcaagaaggcgttgcagccaggcacggtgcctcatgcctgtaatcccagcattttgggggccgaggttggcagatcgcttgagcttaggagtcgagaccagcctgggcaacatggtgaaaccccatctctgctaaaaatataaaaaattagccaggcatggtggtgcatgtctgtggtgccagcaatttgggaggctgaggtgggaggttaaaaaaaagaaaaaaagactttgctattgcttttatcatttcaccatcactaccactactctgaagcctcagataggtggaaactggactggaatgttctgtaggaaaaaaaaaccctcagttttcatgacctggtttgctagcaaaaacagacaaagggaacacaaaggtggcctctgcctcccattcacttaccaaatttcatgcagcatatcttaatgataaaacctaatttccagaatcccagctgcaaaggagactgggaaatgcagttttcaattttccacctcaccagccaagatggtaaagtgagggctgaatgagcccagtgtatacccagtgagtccagtgtatacccaccaggactatcaatactgcattttctcaagtgttgagttctaaggagcatgaggcagggggatgaaccaagatgccacctgattagacttcatgatttcccgaattccctcttggatttcccctagtgcagctaggagatgccctcttagagttttagtagccacacgtggtgctttgtcttggctgttggccacaatagggaagaatggctggcaaatccacggattatctttttgtttacacttcagtctccaatgctgatggttgaaataaaggcttttcctgcaatcagaaggactgatatatagaagcatgtctctaagcttgccttccagccctgtaatataagaattgtgaaatctaaaaatatttggggggaattgggcatttatgtttaagggaactcttataaacagagggataattcatgaatagattgttgtttcttcctagactacacaagatccccccatagaatctcagcttcctactctaatgagtcaacactaggctcttgaaaattatacaccattcttttctgggcagaaacatgacttggtccataactgaaaacctgggtacactatagtaagttactgatgttcatccatactttttgtcactcagcaaaactttctactaataattttgtttgtttgtttgttttcttgagacacggtctctctttgtctcccaggctgcaggggagtggtgcgatcatagcttactgtagcctccagctcttgggctcaacctgtcttcctgcctcagcctcccaagtagctgggactacaggcgtgtgccagcaggcctggcttcagtgaacatttattgaggacctgccatgtcaggccccaggctggtcatatttcagagaatacagagatgaggaagtcattgttcccgtgcttagaaggaacagtctggttaggaagacaacatgcattcatggctattgctgtaaaggaaagttttcagtgatctcagagcaggaagatatttctttctcttttttttttttttttttttttgagacggagtctcactctgtcaccctggctggagtgcagtggcatgatctcggctcattgcgatctctgcctcccaggtttaagcgatacttatgcctcagcctcctgagtagccggaactacaggtgagtaccaccacgcccggctaacttttgtatttttagtagagacggggtttcaccatattgggcaggctggtctcgaactcctgaccttgtgatccacctgcctcagcctaccaaagtgctgggattacaggcgtgagccaccgcacccagccccccttttttttgggggggtggggagagagaatctgggaaggcttctgaagcaggtggcattggaatggagtcttgaaggataaataggatctagacaagcaggggtgagagctgttcgttctcatgcatagatgggagcaggcagggtgggcctgaggtccatgagtgctggtggtgtgtcctggtaacaggggtgagtcacggcaggagatagggtgaggtgaggttctgggagtccttgagggccagagatagtgaggctttactggcctgtggccctccccttcatacagattggtatgctcagtggaccagttaagtggttcaaacccaggaatattggaaatgacagaaccagaagatcagaataccttcccaaaggaaagacctttaagatcacttctgattacagaaaatccctaacttatgatggtgcaacttacaatttttcagctttacagtggtgtgaaagcgatatgcatttagtagaaactacttcgagtacccacacaacaattctgtttcactttcatacagtattcagtaagttacactgatgttcaacattattataaaacaggttttgggttatataatcttgcctaactgtaggctaatgtaggtgttctgagcatgtttaaggtaggctattcagtaggtgaggtgtattcaatgcgttttcgcttaggatattttcaacttactatgggtttattggtatgtaaccccatcctaagtcaaggagcatttatatttgtttgccactttttaaaataaaagcattctttgccctcaaggagagaagaaacttttagaactctggagatgacccgagcttttggagacctgagataggggttccgagggcagcccaggctgactccctggaggtggcttacttcctagccaaggagagagaatggacatcttttccctggcgggagcacttagctgcatgtcaaggggagagaccacagtgaccgcacaggcgggacgctccaagagccccgagggagttggggtggctggaggcctggccgcctgcccctggctgcctgcccactccctggcttaatttgtaaggaaggacaagagtggcatcgggaagggctgggaacaggcaggagccgggaggctgacttttgggctgtcatcagagagaacagcatgagtgagggacagggctccagggctgccttgttcctgtgatggagcagggaaagagctccgtccattctgggcagagcaggtgggtgtcccacgaagtgatgaagccacaggctgccatccgggcccctcggtggcggggaggtctgttggacggcgaagtggtctcctgagggggctccaacacggagccttgccagagctggcagaggacagaaacgcgtccccgccccccagctgaatctgagccgctcgccgagggcaggggcgggcgcggcctgagccgcagtcagggcccagcacaggctgtgcacatggcgtcccctggtggcacagagcgggcctcatgagcggcgccccgggagtttgcagctctaagcctgccgccgcctttccctgcttttgtgggctcttagtgatactcggacccgctaggaccattcctccctgtgggacttgaagccgctactctttttctttcttttttttttttttgagacggagtctcgccctgtcgcccaggctggagggcagtggcgcgatctcagctcactgcaagctccgcctcccgggttcacgccattctcctgcctcagcctccagagtagctgggactacaggcgcccgccaccaagcccggcttattttttgtattttttaacagagactgtgttagccgggatgatctcgatctcctgacctcgtgatccacccaccttggccgcccaaagtgctgaggttacaggcgtgagccaccgagcccggccgaggccactactcttttctgagcaccaaactgggggcaacctggcctggcacacgaagtggtgtcagcccacctcagtctaggtgccagatgaggaaggagtggtcattaatgttgtacaacagcctaatatgcatcatcccatttggcctcatgacagcctccataaggaggtatcacacgtgtgctacagatggagaaccagactcgagtgtgcttgtcggaggggatggtgacctgaccctgctggtggcagccctgggtttggacctgggtctgtgagactcttagctgtgcagcctctcccctctgcatagaagaacacttggcgaccctgactgaactctttggagggggaaaggtccccaattccacacactggggaactgctccttccctgggccacctgagggccctcaggttctgctaatggcccatgatggaatttccttctgtgcattgcaggtagtcggggtctctgtgagcagaaagagcaggtcccttgcaaggggtgatcagccttggttgccacttgtgagcatgtgtgtgcttaaggggtcccctgctgcccttcagggagcactctctctaggcctgaccctctgctgcccagcagggagccccccaccctaggactgaccctctctctgctgccccacaagaagcaccctcccaggcctgaccctctctctgctgccctgcagggaccccaccccaggcctgaccctctctctgctgccccacaggcccttcatgctgctgccgcccctcatggagtggatgcgcgtggccatcacctacgcagagcaccgccgcagcctcaccgtggacagcggcgacatccggcaggcagcccggctgctgctgcctggtctggactgtgaacctcggcagctcaagtatgaaccagggaggagggagggccccggcatccatgacctgcccccagcggctcccctctgctcgcttcttccccagatggctgggcgggggtcagagagcaggggctgcagcacatttgagctgttctaagggtgtcctctgcaaaggccaagcctgagtatgggaacagatctattgtagactttggctgctgtctggaaacgtctcctgcagctgctggtctgctacacagaggagacacacattgggactggggcaggagagcccacacatctaactctttgggatacttggggactgaggggcagaagtgggcccgttctttcctctgttcctgtaattgacaccacatggagcccttcctgggtgcaggtgctgtgagcccttcctctttatgtgcattatcttagtcctcatgacaagtgcagggaagaggcaatcatgcccatcttacagatgaagaagctgagggtcagaggggaacagtagcttgcccacagatactcagctagcactttaccgtgcccagatttgaacccaggtccatacggcctccaagcctgtgctcctaatttccttccctaagtgcctctcacagtagacttgtttgctgaggagcttttctagagaagcgtccctggccatcctaggcccatgagagccttttatctatctatctatctatctatctatctatctatctatctatctatctatatacacacacacacacacacatatatatatatatatatgtatttttttttttttttttttgagacagagtttcactctgttgcccaggctggagtgcaatggtgtgatctcggctctctgaaatctctgcctcctgggttcaagcgattctcctgcctcagcctcccaagtaactggaattacaggcacgcaccaccacatctgggtagttttgtatttttagtagagactgggtttcatcatgttggtcaggctggtctcaaattcctgaccccaggtgatccacccaccttggcctcccaaagtgctgggattacaggcgtgagccactgctcctggccttatatcttttttttaaccctctgccaaaacccaggttatggcctcctctgtcttcatacggaaggcccaaaccccattctaggacatgaattttctacactttggcccaaccaaggctccagaccaaagctgccaactggacgtctgtgatgcgccccctataacacaggcattatctgtgactttccttgtaggttgcgttgattgcaaatggcagtctatgctactctctaccatctctttggtacttctgagcctcaccaggaagccttaaagagagagaatgtagagctaaatactagaacctggccatggtgaccgtttataggctgagtgcagcctgctcaacacaaacagtatacagccaagtgctgaggcatgagtctgggtgggagctgcttcctgcttggggcagacccataacagattgttttacatgagtctttgttttctgccagttgaagcaacaagggctcagaacacttacttacttacttacttattgattgattgattgagacagagtcttgctctattgtccaggctggagtacagtggcacaatctcggctcactgcaacctctgcctccagggttcaatttattctcctgcctcagactcctgattagtagggatacaggcacatgctaccacgcctggctaatttttgtattttgagtagagacagggtttcaccatgttggccaggctggtcttgaactcctgacctcaagtgattcacctgccttgtcctcccaaagtgctgggattacaggtgtgagccactgaacctgcctcccaagcaattttttaatgtacttatagaaaagcagaaatgtgtgctcttcatatgacagaacatgatggggacagtaattgctgatctgatcataactccctggtgcttcccacccatcctcatcctcactctacacgtaaagctcacacatgtgtgtcacatcattgaaagttgctgtctgcatacagtcacacgcacctttgggtctcttctgggcagacccgaacactgtttcagttccttccggaggctggatgcccgagcagctactgaaaaattcaaccaggacctgggtttccgcatgctcaactgtgggaggacggacctcatcaaccaagccatcgaggccttgggtccggatggggttaacaccatggatgaccaggtacgtcctgagagctccacaaagacaggcacgaggaccagagttgggaattctcagctcccagcattggcggccctctgtcctaaccctgagatttgctcagctctgtacttcgaaaaggcgggctacctccctgaatcctgccctgcctggtcatgtggaatgtcagcttggagacttctagtatcccttggaagaactttgtcatgtggcttccgcttccctggctggacagctggccactgtttcaggtggtgcaaggctaggaacgagtctgggagagtgagcttcatctccagctagggacacgatcgctaaccctgtagtacagcctattgtgtgccaactacttgccagggcatggaaacccttgtcctcatggagataccattttagtgcaggagacagataagaagaaacacagacatgtaaaatgtagaggatgttaaagtgctgaggactaaaatgaagcatgaaaatgggtaggaaatgtgggaggtgatgtagttttagataggctttaacttgagtttcgcatctgttttgttttttacttttgctgtgaacagctaccatttatatagcatttactatgttcgatgcattgttctaagtgcttcacatagattaactcacttcctcttgacagcagccctgtgatgtagcactattattttccccattgtatagatgaggaaattgagggacagagaggttgctttacctaaggtcacaccactagtaaggagcagagctgggtggagaatctgagcagctggacccagcctctcaaccactatggaatatcctgtgtgtttatttgacactgtactgagagcacttacagtgtgtggaagggcactgtggggtttggaaggccacacagagcatggggagttagatgacagtggcgagttaaggcagtgttctcagatgaggtgacggcacaatgcagcctgtgatgaaactccaggcagaccgtgaggccagggtggaccctgacagatgggatgggctgcaaggggaagcttcctgctggaagcggttgagccgagcctgggggagggcaggatggggacggagcagagaggagtcaggaagggattccagggaaagggacataaggagtgtggggtggggcagtcagggcgtggacccaggccaggggttggggaaggaccacaggcccagcactggacttccagagggcagtggcaggtgacaggctgctgtgggatctcgtgggggcctctccgtccacacaggttcccgggctttgtgggagcttttgtcccagtggagtcttccttcttgaacagcacagtgtggaagcccgtggactttagcttcagatagacctaggatttagtggccatgtaagagctgtagcatcttgaacaagttactctgcctccctgaggcacttcagtttcctcccctctaagatgggggatggtagcacctgacacatagggttgggggaagtctgcatccagcacgtagtcagcactcactaaatgttcattccggtttttattgccaatatgatgattattgtagtcgtattgctgttgatatgatgatgatgcctgatatctgcgagccggcctggttttatttggcctctttatatgtctggagtgcgtggggacagggacaagggaaaaagcagtgtctcctcaccgggcccatcatttggtttaaactccaaattgtatacagatgtgtggagaaaaaagtaagtcaagtctgtccacagggagatgaaacaaagccaaatttttattctgtggtgttggcctttgtctaagtgctcaatcctgtttgttccctaaaccttagtatttatagaatgatctgtgggtaaacagctctctcaccccatgattaatctcaggccattgctttatctctggccactaggcaaggatttatgaggtaaggagatcttgtctacacacaaatatcctaataaataacatcacgggacaccaggcaaacacttgctgggatccagccgtggaataaacagtttgcactgcctttgctgttgccggccacagaggaggattcccagccagggaggcggccccgccaactgcccacctaacccagggagacagcaggactcagcttgcaggaatgctctgaactgctcagtagcagaagatgttgaagtcaaatgcctcctctaccgtctcgtgggacggcgcaaagcttgggcttcacagcttatggaggcctggttcctgccccgagttcaacctctcgctagttgtgtgactttgggcagtcagttccccttctctgctcctcagctgtaaaatggggaggatgggaatattacgatgatggagggagatgctgcatgctcatcactagcagggtgatttccatgcacagggcctgggatggcggctatgaggctgtatggcatagtagccatgagagtgttgttggtattttaattacatagctcttaatcaaggtaagctcattctgaactaagcactttatacatattaatccacactctacaacaaccctttgagggagataagatactgctgtggttccccatttacagatgaaaaaactgaggcacagagagggcaaatgacatgtataaagtttacagctccccatggcagaggagaccttggcaccgagcctggctgcacggcctgtgctgggccctgctccagtgtcctgcagtgctcatggcagtgcccccactcaccttccccatgccctgtgcccagcagcccaggaagcacagagcctgggggaccacaggatgctcggctggggtggcggggtgcccgatctgtggtttctggggcagaggcctgtgggcacatggtgttgtgttctgtttgcaaacagttcagcacgtgcatttgatttgctcagggtatgacgccactgatgtacgcctgcgctgctggggacgaagcgatggtccagatgttgattgatgctggggcaaacttggacatccaggtgaggaagccccacagagctgcacccaggccctaggccagcagggatcactccgagggctccaacaaacacgctgggcgtgatgttttgggcaactgagtagatgtgtgtcaaaagaccggaaagacaagatgcacagaggccactgttagccagggaagtctcctcaagatttgggctttctgtctgaaaaggagtggactgaggcgggagtgagtggagagatgggctgtgattctgttttcatgatatcttcctccttttaccagcctaatctccagccattccttccatccccaaatacttctagctctgcctccctctgaagcataaagcactccccatctgccctcttttgcccagggcagacattgctaattaaatacctatcctctctttttgagccttgtccactttgtgctccaggcaaacattatcaatcgaatgtagaaagcacttgttaactccggttcaccatccctgcagggtactcccttcgctcgggtgcccagaaaacacagatgatttgtggtattttccaggttccaagcaactcccccaggcacccttccatccaccccgacagccggcactggacctcactgacattcgctgtgctgcatggacacatctctgtggtccaggtgagctcctgccaggtgaacaccatgccccccagcttaccaggtgacctgggccccaagcacagccccagcctcagctgagtgggcaggtgccctgaatcagagatcccaaaggcactgcttgaggccagctcacctgatcgatagagcagcagcccacctgagttgcctcaaggaaaggggttagtgcaaggacaaatggaattttaggaaacaagacccaggtccaggcagcactagggtcctgtcatgccctcccggcatctctctctctctcgtgtcgggcacactgggggctgtcccagtcccactcagctttctcgcctacagccgcctttccgacccttcccttttctcctccctcgtgaattctactacagggccaactctatatcatggggtctgtgcaattctgtcccctccttagttcctgagagaggtttcggattggcatggctcacccgtcgagccaagccacaggttgcccacctcagctcaggtagctgtgctggcgtggggacagtggtggttctagaagcagaagctgtgggcagagcagctccccatgccagcaggggctccagccacgtgcacttactcccaggtcctcagatcgctggcatgcgcagggtttcatggcaccccttccagggagttagcgtgacaccctcgctccccactaggttgcaagacctctgagggcagggattgtgtctggctgattcacagccctagcctatcacaaggactcagcgagtggctgttacccactggccaccacatcctgccgcctttgccttataagaaccggagcaaaatcccaacctcagttcagactgggcctgcagggctgtgccctgagcttgcctggatccgtgcctagttttgccccagtgagcaggcccccgcctccacggccttggcactggtacagggagtgactgatttctgactgctgcatctccagtgatgtctgtcctccatgccacagtccatgggactgagaggtcagcctgaactccactcctggtatccaggggaagggcggttgggctcccctagactgccatgcatgcttggaggaagctttggtcttcaggagcctgggagggctggaaggttgctccctccagagcagctggtcagggaaggtggaaagggagctgaaagtcaccagttggagtaatgcaggccccacccctgccccaaggcagagccaggaccggctcatctggaactgcctggtatctgttaaccctgccccgtctgtcccctgtcaaagcccgcccttgctagcatggggagaggccctctgctgtcctagactgggacttcctgcttcagccccaccacctgccttcctggggtacctgctgtacctctccgacaagaagcctaagggaagcaagcccctcttcccattctgtgaatgaggaagactgaggctctgggagttgaagtacctgctcggggttactcattggccagtggccagcactgacaccctgctccttctgactccaacacgtgctgccacccagagccatggtttaccatagattgcgggcaacattttctgtgctgctcatccacatgtgttctcagaaaggtggctgcagtcagttcatgggaaagcatttgaaagacggaaaaagctcagaggtcctcacagcttaggggcttggtcttggaccacaataatggagttgaagattctagaaactttgagccctgaggataacctggagttctaaagttccagttcctcagctgctggggtgaactgtgtcttggtcacatgcctggagagaagcaaaggccctgtccccgaaagcaccctggcccttcccaggtgctccctgccacgctgagcagtgccctcctcctctgtgcccctggcagttgctgctggatgctggtgcccatgtcgagggctcggcagtgaacggcggcgaggacagctatgcggagacgcccctgcagctggcctctgcggcaggtaggcacctgctacccggaggctctgtctacccttccctgcagtgccccccagcctggccaggcatgtagctggacgtgcaggggtctctttagcacacacggaccccatgcaggggccttaaaaccccttctctggaccactgggggcttcccctggccccacccatcagtttctgttgggctcagcatctggcaggacccagcagggcagggaggcccttccctctggagacccagggagggggagcaggggcagggcacggccagccttcttcctctcccttcacttcgtccaccaaatgcagatgagtgtggggtttactgacttattccagcactcagagctgcgagaatcctgctctcccttccctttcgcctcagctgccctggcggctactgtctcagtgtcctccgtgctgcccaccttctctttcagggaactatgagctggtcagtttgttgctgagccgaggcgccgaccccctcctcagcatgctggaggcccacggcatgggctcctccctccacgaggacatgaactgcttcagccactcagctgcccacggccacaggtacctgcccgggattcccaccctgtgtgacatgagggcactgaactaagctcacaggagcctcagtttccccgatgggagcaaaagagctaggcccggagacctttcccaaaacagggggcctgtgtgctagtaaaccagaaacatgggggagtttagcctgcacagggcccagagatgggggaggccccacagctgattcctggcagacctgggactggagcctgggcctcccgacgcccagggcagaccgtcccatttcccagtgagatgccattctgcagctgccagagcccactcaggacattgcttcccatgcctgctggtggtcctccagtgcccaagtggccttggacgtccaaatagcatacggctcagctgtgcagaggcttctggtgcaaaattgcaccctgccccaggtgcagatggtagagcttgctttgtggggaccaggcctgcccaggggtgtggcgggacagcagcaggctgaagtcagggacagcacggaggggcaaagggagaccagacaagggcttattacagggcagaaacggggctggaaaagcggggctggaaaagcggggctggataagcagggctggcaggcaggacacttacttccagttccccgacaccattcttgccaccagcctcatgttctggctggggtcccctcccctagaatgcttttctctccagctgtctccagcccacccccacattcacccaccccagccaccctcaccctccaggcgccatctttcacatcaccacctctaggccgctccaccccacccagtgcctgcatcccccatggaggcctcttcaccctgcgtggagactgcctgcctgctcatctgcctgtcactctgagcacaggacccttgggacagtcaccgtggctagttcaccttcacatgccagcgcctggcccaaacaaggtgctctgtaaactgcctgaactagcaagtccacacgtgaggaggagcccttgggagggaccttgggtccttggaagggcacctccaggccatgggcttggcaggtaggaggaggatctgcggggtagccgtggagcaggtcagcccccaggaaccttgcagcaccacccatgctgcatccatcccagagccccaggccacaggaggtgacagaatgagcctgggtcttggagccagaagtcctgggtctgtacccccacctggagtggccttgagcaagatggatccatcgcctatgacggtgatgtgtctgggctctcacgaggctaaaagcagcagcacgggggagcgtcctctgtggggtctaacattctgtgtcttcattcataaatatgaatacattctacatgacatccgtcttcagttcatccttatcaacatgaagggaccaaatgagtacttactgggctcttcctgtgttttagacactttcacgtgcatagtcagctgctatttagaaagacctgctgtgtttcaggctctgcatttaaaccctttacatcagcctcacataagccccaggaaagtgtgatatagtgacaccctgtaatatatcccaaagcagtcagggctcagagaggtagagtgacctggctaaggtcacacagccaggatggcagagctcgctcagccccgaagcctatggcttctctgcaatacggggatggtagaagggtgggttcccctgcaccctgccctgcctctcagaggtatatggggattggtgaccctgggacccctggcctgcctggaggaggaagaccatgaaactccgagccctcgggtaccccagagcagcccgtcggggcaggagggcactgggggacagctcaggtgggcactgcctgtgggacttcagccctcaccttcattcatccctgggcctgcaggaacgtcctgaggaagctcctgacgcagccacagcaggctaaagcggacgtgctgtccctggaggagatcctggccgagggtgtggaggaaagtgatgcgtcgagccagggcagtggcagcgaggggcccgtgcggctgagccggacccgcaccaaggccctacaggaggccatgtactacagcgctgagcacggctacgtggacatcaccatggagctgagggcactgggtgaggcctcacgggcatgcacacccatgtccatgcatgcatatggacacacacggtcactccctgctgctcttcagcaggcctgagagggccagggcctgcagggacagacaagccccagggcagctgagcacagactgggtggaggctgggacccccctgctacacggccagttcaggaggggccctgggcctcagacagtgctcaacagtgccacgtcttggggtcatggcccagtcccctgccctcgggccctccaccctgcctggctggagcttcgctgccccctccccagtcacagcccagggatgtcgagcactgggagcctctgaagccccgggactccacgctgtgaggcggcagtcctgtcactcggctgaccttgcactccttgggtctgcgagtctgtggacttttggtgtcctccagggaggctagtcagacagacttaggtcaggtcctgtgttagctgcataccacgtcctctctccaagcctcaactcccacctctgtggctttggtgctaatgatccttatctaagaatggggtgacatcacctgaagtacaaggcgtagtggccaccgtgagcacttggtggatgacagcaccgtcactgtcatcacaaggccacaaacccccagggccgggccaagacagcagtgagtcagcctcagtgttcttcaccgtaaaacagagacgtcactcccacctgcagtcaataacccaaggatactaacacaccacactactgtcaatgtgtcgctggggaatgccgtcagttctttgatccacagtgaggttggggtaagaagctgtctctctaattaccagggacaggactagtttatgtcatgaacttcccacagcaatgttaagttacagccccactgacacatgctggggaactgtaaaacagtcattatgtgcctggggatgtgcagcggctttccagtgctctgtgtgctggagagcccctcgtgataggaccgggttcgtttcaagcttccgtgcagacaaggaggcctgtgtgtccttgagtgcctggcatattctctggccatccaagccctcctggccacccctccacaactaatgagacctctctagcaagtaattcttgagcccactaagcaacaaggctactttgggtgctgggcccatacttccaaatccccaggctgggcggtcaactttcagagcttgagttccctgcatttgggccgaagccattcctccacctcatctcatgagaacctgaaactccactctgacctgccagcaagacctattagaatgaattaaagctttcattctatggccatcctgagagggccactccatgcccaggaagggggcaggcgggagggggcgggcggggtgctctgcagacagcgggggcatcccgagagagtctgcccagaaaaggctgtggtctgtgccgggagcgctcagctgtggtgcgtgactgcctgcccttccctgcctggaccaggagtcccctggaagctgcacatctggatcgagtctctgaggacctcgttctcgcagtcgcggtactcggtggtgcagagcctcctgcgggacttcagctccatcagagaggaggagtacaacgaggagctggtgaccgagggcttgcagctcatgttcgacatcctcaagaccagcaaagtaagtgtggccagtggccagttcccaagcccacggcccagactcagaccacgggacacacagatggacacacaggcagacacgtggacagacacagggaccccctcacccaacgcacacacactcacacgcctgccctcagcacccagggacccccccacccaacacacacacacgcccgcccccagcacccaggccccccccccccactcaacacacacatacacacacacacgcgcgcgcgtgcacgctcgcccccagcacccaggaacccccccacccaacacacacacacacagcacccagacttagacttgcgctgcctggctgtagagggcaggggccatgggctggaacctgaccaaaaaagccatttcgggaatcactgatgaaggaacaggcatctcttgccaagccacatccagcaggaacaaaagatagcggctgcactactcctggcctggacttttgaaattagcctgacgtatctgcatctgtgaacagccagccacagcgggcagctcacaggccctctctcctctccccacagaacgactccgtcatccagcaactggctaccatcttcacccactgctatggcagcagtcccatccccagcatcccagagatccggaagaccctgccggccaggctaggtgaaggcgcgccccctgcgccctgcatcaccacacgtcctccccctcttccctttcctgcttcctccccactttgtcatctttctccatttccaagcgccaaggccccagcctcagtttctctgttcctcacctctgtgtcccacccccaaccccagacacgcacctcacagcacactcaagcaaaccccagcaggggactcctcagccatatccctctgtctccccgcttttcacagatccacactttttgaacaataaggagatgtcagatgtgaccttcctggtggaaggaaagctgttttatgcacataaagtcctgctggtgacagcttctaacaggtaggcagcctcagataacaaactcccagcccaggggcacagaagcaccttgtttcagattccaggtgacagagagtgactcgctggggctgtaccctgcagcctctgcccctcagactgcagtcacattgcagcagagccccactcgccccacagcgggatgagacggggtggacccagggcagcaggaaaggggggctctgaggtggtgttctttctggcctagttattgcttttattattagaaaacataaatatcctggaatgaagagtcagcattctggccacaggcgtcaggtcgcttgtagggtgggtggtggggacagaattgggctcagctcagatgtcttcctaagatggtgtaaaatggcacttgctgaaaattattttaggagcacagcagtaatttttaaaatgttccgtcttgtggtagccggtcaggtgacagatggtgccatcgccacacagtggtgaagtaaaaggttcaaaacccaccttgctttgtctcctttgctccaggttcaagacactaatgaccaataaatcagaacaggatggggacagcagcaagaccatcgagatcagcgacatgaagtaccacatttttcaggtgtgtgggtcttggtgccgccctcttctcagagggatgaccctcccccaggagcccaccttgtgggcagctgtgcattggttgtcattgttcactctattcccagtgccttctgtattctgttgaatgaatagagcatccaggtctttccctgtgcagaggtagccatccgttgtggggctgcagcttcagagcctgtcacatgggtcctgagctctaaccgctggacaggtggtctgggcagcctgcagacagacgtgcaaggacagatacaagccacacagctggggtgtgagtccttgttatcagggtgggctcccagccaatgggcattactgagagcttgttggaaatgcagagccccaggccccaccccagccctcctgcatcttcacaagctccccaggtggccatgtgctcagtgcagtttaggaagtgctggtggaggctgcgtcacttctcccaagcatcaaaccccggccacattggtcaaacacgtggccgtgaggcacacatcctgactgtagatcaaagtcaggtctttcgggctttaagctttgcagaacatacaaggttacatactagaaactccagtcagggcagacaaggtccagaggaagacctggctgggatctcagctgaaccccactgagaggagctttctagaaagtagcaactgcaggtctccaggctgtgtggtgggctcagggctgcaagagctgacccttatgggctgggactgaggccaggaggcagctggcaggtgggtctagggccttgccctgcacaggagtggtttgtgatataataggagagattgcaaaccccagagtctcacagaagcacatggggccacctctaaaatggcttttttttgttttttttgacacggagtctcactgtcgcccaggctggagtgcagtggcatgatctcggctcactgcaagctccacctcccgggttcacgccattctcctgcctcaccctcccgagtagctgggactacaggcgcccgccaccacacccagctaattttttgtatttttaatagagatgggatttaccatgttagccaggatggtctcgatcttctaaccttgtgatccacccgccttggcctcccaaagtgctgggattacaggcgtgagccactgcgcccagcctctaaaaggttttaagcagtaggaggaactcaccattactaacacttaggcaggcagggttctaagtgctttgcttggtttccattgaggcctcacagcacagttccagggaggtaggtatgttattatcccctcttggtagaggagtcagaggcatggagaggttgagtaacttgctcaaggtcacatagctgggaagtgatggagacagaattcaaacccaggatgtgcaaaacagccaagtttgcatttgcagcggtaagaagggatggaagggggcatggccacctccaggggaccagttaggggctgctgaggaatccaactgagtgacagtggtgacctggattggcagtggctggggggatggagggaaatggaccagggaagagtggatgggacttggaacttggtaactgacggatgtgggaggaggggaggcccagggtctggcataagccaggtggcgtctccccttccctcttttctcaccccttaatccaactcactggagaatgggcagctttaggaacatgtccaggtgagtgggagcaggaggtggagtcatgctcagatcaggcaggaggcaggtcctagaggggctacagggatcgctggagactggggagcgcacttgtggccatgggtgaccactgcctgtaaggggacctgtgcgggctcagtcgcctgtgctcacctgccaggccaagggagggcatctgtcatagaacaggctcagcagccccttggcacctcccggggttgctgggagggcaaataggggacaggcttcaggtccacagcacacacatgccttcccctgggcctcttgccaagttctggccgactgttctaactaggcccagggcactggccttgccccgtgggtctcctgggtacagaattttgccatatccagggcatcatttcagatggggcttccagacctcagctccgactttccgggcctccctggaggggtcagcctgaagccatcagtctggggtcagggctccctaacaaagcctgcaagttttccagcagcccctaaataccgcattgactctcatgcaggcggggtggggtgggggtgtgtggatcattattttgttttctggaggaggaaacagaggcccaaggacatctagacagtactgtcggatacagtgtgaggcatacattgtaattaaaaatttactactagtcacataaaaaataaagagcaggtgaaattgattttaatatttttgaacttacagtatagccaaaatattatttcaacatgtaatcaatgtaaaaagttactcacagccgggcacggtggctcacgcctgtaatcccagcacttttggaggccgaggtgggcagatcacctgaggttgggagttcgagaccagcctgaccaacatgtagaaaccgtatctctactaaaaatacaaaattagctgggcgtggtggtgcatgctgcataatcccagctacttgggaggctgaggcaggaggatcgctcgaacccaggaggtggaggttgcggtgagccgagattgcgccactgcactccagcctgggcgacaagagcgaaactctgtctcaaaaaaaaaaaaaaaaagttactgagcatatagcccagagggccccaaccctgcccttcccacatggtttctgcagtatcagcttccaagtggcccactcaggacagaaggaaaccctgctgcccttctacaggtggtcctgtctggggcctttcctcaagcagcctctagccccacaggctgcctggctccaggaggcacatgacctgtatcctgctagggactgccaggctgtgcaaaattcacccacctctgcctgctggctgcccagctcccatagcaaggctccaggtgagccgttctgatctgacttctgtggcctcatatgcattcaagtggcctcagggagatccatgtgccacggatgccaagactgggccttgccaaaaccaaatcctaaaatgcagcaggaggtagccttccaggccaggaagggagctgcagcctaaggtggctggtaggcctggccctaggggctgccctgaggccatcccttagcaaagaatcccaacaggaagatctgacctgcctgcctggtgctctaaccccaaccctgtatgaggggcattccaggcactgctcctgctggtgcctcaccttactgagcactcactcagtgccctgcatggggagggcagagggacctgggcatggcctgcccaaggcacacactatctggagggagcagacggacacttactgtgcaatcatgagctcaccacccaggctccagcaggggctgcagaaggccgtgggagcttcccagacctctagaggtgggaagaggctgacatctccagggtgggccttggccaacatctcctgatgcctgaacaaggctggcaggcctgtctccccacttctctccccacagttgggccttctcctagaccctctggtgcctctgcagcctcagggccggtcttgacagagcccgactgtgccggctggagctgtgtttacttacacacttgccagctccttgctggagccgtttcttcagccagccagaaagaattgtttttctttttccaactgggaacctcactaggctccagcgtgatggcagagtttgtaactgaaacctcagcagaactaaatcgttcccggtcctggaccacctcatctgggagcccaaggcagggctcagcctgtcgaggggagctccgggcctccgggcctccgggcctgggctctgcgctttctttttgaggaagcacacctgagacagagcccagatggggcactcacctccacattggagtccttgtgcaaacaggggaaggcaggaggcagcgtcctccaacatcccttcagagaccctcccactgctactccctgtgtagaatttagatcacaccagcaatgagccacacggggccaggcatgatgcgagagccctgctgcaggcatcaggggagctgaaggacttgagccaagtcatcttccttccctgggtctcagtttccccagctgtgaataggaacttccctcctgggctcaccgtgttctcatgaggattgtagggaaaacattccaaggagagagcctgttatccgggcagggactcaggagagagggtcttggagttggcttccccgggaaaacacaagtctcagcctgagcaggagagggagggagagacagagctggggacctgcagagggacaggcccctggaggcggcagctggagcagtaccctgtggggctggcaaggactttcatgcctcaggttcacgtggcattcacatgggcctcttcccaccacagatgatgatgcagtatctgtactacggaggaacagaatccatggagatccccaccactgacatcctggaggtgagactcgggagagggggagggggcctgggccagggtgcccagcggctcggtctcccattcacccccttcagagggaaggtggctcttcctctccatctgacaggaagagcagttcccagaaagaggaactgtgcacaccactgagcccagcctcagtgcgtgtcccagcggggatggttaggcccaggagtatcagaaggtagtggggcctgagggtggaggcagcagggcacacggcactcgggagctttctgttcggtgctgtctgggccactggtctggccatgggtccccaagacctgctctgcctccctaccagctgctgtcagctgccagcctgttccagctggatgccctgcagaggcactgcgagatcctgtgctcccagaccctcagcatggagagtgccgtgaacacctacaaatatgccaaggtgagggccaaggatgcctgctggccacctcccaccacatgctctgctccacgggggcctcggccgtgtggctgcactggggatgagctaggagatgcaggtgaccaggctgcttctgagggcagtgtagaggctgagggagggttagcaactccctgtgttgcctggggtcactgctgcccactggccatgtggtagcttgggaggtgagcttttgagccagctgcaccctagttcacattccagctctgccacctgggctgtggtagctggacaagttgctgagcctctgagtcaaatcaaagccataggtatttacttttctcccctacctgtctgtgcctccctagctgtcccatctcaacaatcaacatggtcactgctcagttgctcagactcaaaactcaggaatcatatttgatttgcaaaaaccctcccatatgcaagccacccacctctgaaacacaccagcggtttctccacttcccttcatctccactgccctcgccttgccctaagccaccaccatcactctcttggacaatggcatcagcccagcctccctacttcctggctttagccctgcaatccacaagcttctttcaaaagttcaaaaaccatggccaggcacagtggctcacacctgtaatcccagtactttgggaggatgaggcaggaccaggagtttagaccagcctgtgaaacatggcaagaacctgcctctacaaactagctgagtgtggtggcgtgcatctgtggtcccagttgctcaggaggctgaggcaggaagatcagttgagcccgggaggttgagactgtagtgagctgtgatcatgcgcactccagcttgggcaagagcaagactttgtctcaacacaacccccgccccccaaaaaagtacaaagactgtgttactcccatacttaatcccaccaaaggttttccacctactgcaggctaaataatagccagcccttatcatgccttccaaggcccccaaggtcctgcccacatctcccctcactctgccatgcttccttctcagcgtgcccagaccccaggacttttgtgacacttcccttttcctgtaaagctctttcccgcccttcatcttcacaactggtgtccccaggcctcccctggcctctcacaagccatcctgtcacgttggctttacctccttcacagtcttctgcagttaccttgtctttggttcctcagattctgtctgtctctcccaaactaggacatcagcagcactgcagagatcttgacctcagaactgaaaacccagagcggccccttgatatgtgttgagtgaacatctttatccagcatttaccatgtgcacagtcacatgccaggcctggtgctgagccctggacacccagtggtggacagtccccgttcccacccttaggaagggaacttccaacccaacagggatgactgccacttaacagggcagcatgacagtatgacacaggcaggaaaatgacgggggctgaacagttcggatatagcagaggtggcctcaggatgcagggacagggaacgcctaccctggccagagtggggcttaatcagggctgtggccatgggtaggtagtatttgggggtgagggtgagtggggctgtactaaggcgatgggcttcacccctcctctctctgccctacagatccacaatgccccagaactggccctgttctgtgagggcttcttcctcaagcacatgaaggccctactggagcaggatgccttccggcagctcatctacggccgcagcagcaaagtgcagggcctggatccactgcaggacctgcagaacaccctggcagagcgcgtgcactctgtctacatcacctcccgggtgtgaggcagggggcggaggctgccgaggccagggcctgtggaggtgccagggcccaccatgtcggggtatggttgtaggccctcttggagccaggttcacggggctgtttcctcctcctcccccagatgtcccccctgtcaccgggcagctcaccctcatctcctctgccctagagctgtttgttcaatcactgatgggcaaaggggagatgtagctaactggtggccctcctccccatctcagtttgcaactcaagggcagccatgcactccccctgggtgtcgctctcccctcctgcaggtcagcagctgatcctgatccacctccgcccaggccctccaagctctactcacccctagggcctcagtaaactcagaccatcccaactggggctcctgggggtacaggaatccttatgaatgtatagaatgcatactgcctaggcccccagtcgtctgcagtaattcaaaagctggtatttttcttcctaaatgtcacatagcaaaggctgcccaaatccccaaacttgttcttcaaaggtttgacaggcttaatgtgggcatccagtggcctgtggacccccccctgccaccacgactgctgccacccggagttcccccattgtctttggtgcctgggcttccagagtccctcccatcaggactaccagcttgctcagttagcagcagagggcagttccccagcttgatggtttctgagctaagtctggcatggaggggcaaggggtaggggatggggtgctgtgtaggaatggcctcagctcttgttttgctgctggttttaggggccaaagtaaatgggtggattctggaacctcaggcctagactaggttgcctttgtgggggcgatgaagcagagtcccctggtcaagtctctcggctcctttaatgtaggattgagagctgggcaaacaggtcccactggggactgtgactcttggagattaaaggacagggcattgatggaaggtaagggccaggagaagaggcctttctgctgtgtcccctcacggccttgccctcgaattctgcaggccctgggctcccctgacacctgtcatatttatggaccagacactggggcagcatcaggcacagtctgtctgggtgcaacttcttcagctgtctggccgcaccttaaaaactatttattcaccaaaagccccaggcatttcagaaggtggcactcaggtcaccctgaaaagcccccaggggcttgcaattctggaaaatattttgactagctgcttggctggatgtacaaagaaataggcattattttattgctgtaatattgtatgatactttaactgtacaataatgttgtcacttactgtaaatgtactatggttttattaacaataaacactcattaacaatgaccttggcctcactgctcctggtagagggttactcagagttcagaactggggaggagccccttaggaccaggaagagatcccagagctaacgctgttactcaggtctcccccctctcagagccaagaccctaccaaagccattgctgtggccacccagcactcgcctctctccagaaacgaagcctggatccattcctcacccgcccacgctcacatttaattaagcacatgtgtgccactgagctggacagacaccaaatgactgaggaatatgacactatcaggctttcctgatctccactcccatcccctccacggccctttatgtgggagctattttgggggttgtcttcagaggcacatccccaaatggcacagcccaccaaagtggcagcagggcctccttcacccaggcctgacctggcctgattgatttgagggacctatccctgggtgactgctgcccccaggcccagctaagctaagctggctgtaccaccacaaggccactagcagaggtaatggagggagatggtgaggcgccgactcaggtccaagagtgtactggagttatggctgtagttttaggtgcaaagttcaggcacaaatataagtttttaaaacattccctgccagttagctgggcatagtggtgcacatctgtattcccagctgctcaggaggctgaggtgggaggatcacagagcccaggggttcgaggctgcagtgagctatgatcacccctgcacctcagcctggacaacaaagcaagactctctctcaaaaaaaaagtcgcctgcctgcctgcctgaaacaggtatagaaattcctaaggtcactgagaacctgaaccaaagtggctgtgggtcagtgaccggccgtgactcaggcgttaggggaacgacataaagatcccagtccctggcaaagcccaattccagcaggagctgcgcagggcagctcgaggcccagcctggggacctgtggccgcacagacccatggtgccctctgggggccactaggagggggcgcactcccccacaccatcttcctgtgcagtggcccaagacggtggtggagcgggctgtccgtccccagcacttgccattcaaagtggctgcccttcatgggtctgtgtccagcgtccccacaagttcccccatccctgcaggacatgccttggtccgtacccagcctagaaagcaagatctagttgcattctggctccagatgagggatccaccatttcctctcttgagagggtgagtggggggttgagagaaagtggaggtaggaaggagggagcgggccccttggagcctgtgggtagcaggaatacatttttgaataaacatttaaaattaaaataattaccaaaaaaaagcagacatgcttccaaggggctaggactcaaacagaaatgatcacttacccaggcagctggacctcctaattccgggccactgctcacggcctgccctgctccgcctgctatgagcagccacaggcaggcttgggggagttaccctcttactggagcccttgaggacccaggtgctgtgagcatgggttgcatctacagggatttcactcggctccagtgggtccacaggcaagcataagctggcgccttagccgtctccaaagaaaacacctctccagaggtggcaggtaccagtctgctcctgcaccgacagggctaacactgagattgtcctttttgaggctgtctggtttctttcctgcattcaaatcttctcctgaagctttcctttaggctctcggcctggaaggccagttatccttttccacattagtccccgtgccagataccaggtggctagagctttctcaacggaaccagcccaagcaggaagccccggcctctccctttcaggctgcctttcaagtccgctttgcaggatccagatgatgtttaactggaaccaattgtttgtagaatcaagggcctgccccctcaggggcaatcccctgaaattgtctattccagcccaaggggcttccgaccccaccccctcctccaggcctgcagaatggctgcgggtgttgtaacaggcctcagataatgagtctacatttttccaaggtgacggtcacttatttctgcccctcccccacctcccagcctcagcggccccctttgtgtcccgtctcctggtcatccggagtcctccgggactgccgggccagatgagcagtggaagcactgaagcaggccggcattagccccgcctggcgagggggtatggggggtgaccatttagtaaccttctttgttcaggcttcttcaggctcttccccttctggtgacagcactcatggctggcctatctgaattcatttcgcaagtgacatttcctaagacagccaagctttacagatgtcactctgtctgggggccagatggtgaggtgtgggggagacatgccttttcaggtttgaaggagaacccaagatcatgaccataaaatgcaaagacccaagcgtgtgtttaggaacacacactttgcaaataaagaggccttgtccaaggatacagagatattatacagagccagacaagtctgactgcaaaatgcatgctcttcgctggccaagggagactccttttctagcttaggttgtggttttataacatggccagtcctggccaagtgtggtggctcatgcctctaatccctatactctgggaggcccaggcggatcacttgaggccagagttccagaccaacctgggcaacatattgagactccatctgtacataatttttaaaattaggcaggtgtggtggtgagcaccttcccagctgcttggaaggctgaggtgggagaatggcttcagcccaagagttcaaagctgcaatgagctatgattgagccaccgcactccagcttgggcaacagagcaagaccctgtctgttttcaaaagaacaccacagctagtccttattgagtattcttagagctggcatgtaactgaacttgagcggctcctctagttagatctgatgagtgcccagaacccagaggcacttgctatgtgccaggcactgttctaaacgtttcccattctaccccacccacttctcaccacagtcccgtgacggaggtgctattcctaccactcaaattttgcagaaatggacctgaagggcaggtaggatgaagtaacctgcccaaggccacggtgagcgtcagggcagagcagtctacctccagagccctcaccttgcaccccaaagcagagccagccggggagactttgagggtagagacactaaacaaaagcttccttacctgtaggatgatatgcctggacaacttgcacagtcccatccagctctgaccatttgagcatgtgactctgcttctggccacggtctaagaaaaccctctttgaaaggcaggttcaggcacccacctgagaaaataaataaaaattattttcatgccccctccctgcctccagcaaaatttcctacagacctaacagaggtctgtggccaggaaacttcagtcccaagaaacgaaagacccctaggctcatgtcctgacagcctcggtgacaagcctcagcagccctagggtcgcatacagaacctgctcttctccctgtggggacgagtcctaggagctgtatatgaaatacccttaggctgagaagttaccgtttccttccctgtccttctctgaacctagacaacatatcggggctgcagactcattagcctggataccattaaacaaacataccaaagtatgtgtaaagccaccaggttacctctgttcccaacaaatggaagggaccaagtgacctggaaggagctgggaaggaaatgaggcagttctagctggcttccagccaccacaccaagcccctcgaggtgaccatagccacctgccacttctcccgcagactcctgggctgggaagccctagacacactgctcacctttgaccttgataccaacaccttccaaattccaccaggcagccaagacccaccagaagaaacgtccaggtgcgtggatttcagaacactcacaggcagctgatctttctagaatgttatttattaaaaatagattctctatccttcccctcacccctgcgagcaaagtggcctttcccaacatcttttcccaaatggatgaaacaggtcttgaggacgcagatgtggcattctacataaactacaggatcaggcttttctgggacagtgggtctgctggagccaagagtggaacagcacaagacaacatcagcaaaccctggcgcacctaaccgcgggctgccatggatgccgggacggactggagttcctcctgctccaggtacaagtccacaaagagagacccagcggcccagcagcagcctcctgggcaccaccagaaagcgatgtacttaagggcctcaggcggtcgagaggcaacgtggcttccacatgtgtgggaatgagactaaaaagctggctcaaagcaaaatatgaacttataggaaaggagggccctggactgggcaggaagagagagactcgtggcaattctagagatggcagtgcccagccatcaagttctaaagagacccatttgggagtgactctgcctttagccaggttgagctcacagacacacaggcccagaggccgaattcgcggccagcttccaggtgtgccggggcctctcgttgcttttaacagtccagccagagagggttcagttagtgagagtatcttcccatgatcaaacacagatgcccgagtttctcttcactatttcttccgcttcagtttcatatcttttttgttctttgtctctctgttcttcaacttcttgctctgtttgggttcttgtttggcctctaacttccttttcttgtcactagagaaaaatcaaaaatagaaagaatgaaatatgtacagatctgaacatctgagactgctttaagcttgctttgctttgtcaaaaagggtttccaccgtctgaaacttgatgtaggccacccaattggacattaatgttctctgcaaacctattagggggcaggcattgtgctggggctggggacacaccatacagaccagttcctgccctgagccagctcttagtctgtggaagaacaaatctcgatcttaacacctgaaatccgggttctcctcagggtgcagtacactctgctcccctctcccaagacagacctaaggcaccacaaggattccccaccaccactctcaccactgcagtgactctggaaactagacatattcatcccaatgaccctgaagacagtccttaatacaaggcatgagactccaaggaaaaccctgccatactttctgatgtgctactattattttatttttcctatatgagaagaagaaaacccaaacaacagtaactcaggtgacaccctgcgaccagcccctggattcttcattgatatcctggcataggaatcactcagcaaacggccacctgccattaagaaacttacaggttaaattttgctctgggaacaaatacttccctataaggagaccgtgaagagttcagtccagagaccattaacatcatatgaatgaagtacctctcaaaggaagaaaaagaaaggcctcagaggacttaatgatagctaccagtatttttagctcacaaagttcaagctttcacatttactcagagccatcaagcacatgaacaaccacacaacactggtttgttgggctcgagaggcttctcactaccagcaatggccaaacaaatggcaggaaaggccaagctctgcagagtgaggagctgaggccgtctccacagcaagcatgctccccggccttttgttccagtcaaagccaccgtgctcaaggccaaagccatcatgggccctgtgctacatttgccatactgtacaaaacagagacaggtcacactgacagtgggcttctgtgctgcaccacaaagcatctgggaaatgaggccggcatcgatgctggatccttcaagatgccacagtgactaacggagactctggaagacagtacctgatttctgggatctatagttcctagagacacaaggtttcctcttcccgaatgtttccaaaatataagcttttaaggaaaccaataaataggggattgccaaaatctcaccctccccatcaacccccaaatcagctgtgaaagcctcaattccagtggctctgggcaggggaggcctcattgtactcccagggaaaactgatgaaggttccagcctaagttatttacaaatgcaccactctgcagataagaagcttggagtgaagattttcaaagagtggtctagggactgctggggtccctaagaccctttcaggtgtccacaaggtcaaaatgtatttggattagtatgaaaacagttatttgccttttttcattttcattctctcacaaatattcagttttccagagagtataagatatgacagcaaaatagtgtcagtgaagacacagacattagtatccggctgccttctgttaagccagatattgaagagatttgcaaaaatgtaaatgtaaaacaatgccactcttctcaccaaaatttttatgaaaaagagtatttttcaaaacgactgagtccgttattactgtgaacaaatgaattttttttaaatttctcagtttttcatttattttctttttaaaatttttttgcagagacagggtctgctatgttgcgcaggttggtcttgaacacctgggctcaagcgatcctcctacctcggcctcccaaagtgctgagattacaggcgtgagccactgcacctggccagtttttcatttctaatatgggaaatttccatagatataaccaacaaaagtcctttggggaccttaattgttaagagataaaggaactcaaagacccaaaaccttgagaactgctggctcaaaggaaggacaacgtaacagttaaacctatggccttgcagtggagaaacctggacttgattctggctccggctctcactagctgtgtgcttcttgggaacttaacccctgagagccttgttacttcatcttaaagcaatgacagtaataaaacagcccccttatgctgtcatcctgagggctgaatgatgaaagcccataagcaagtctcagccagtggcagcttctggactgttccctcaagcccttctccatgacaggcccagtgccctggcatggctgacaaatacaaagagtgaagagatccatgcctaagagatggccctcctggtctgtgggacatgcactgcaagggtaatggccaggggactctcaaagggaagaaccatgacttttctgtcaaagcttttgctccaacctcctattttctagtcaaagttaaagagaagcagagaggccagaatgcctcttccgccagatgcacatcagaccctgggccctcaccttttcaggctgatgatcgaggcgttcggcccagctttgttcaaaacttcattccactcttcatcgtccccacggattatgtatctaaaaaaaagaagggaactatcaaagcctgctagaaagaagaggggactgcttaagagaaaataacgacagtgacaacattcttatcagacacttcctgtcatgaaagccaggctgagctgtgtcagcatttgaacagcagaaaggacagaggggacaagcatgcaggagggccaagagacatggtgcttagctctatggatagaagctccacaggagcgagggtcaccaggcctgctggcaggggtcagtgaggacagtcctgcacagaaggcagcctgcctggctcttcccacatgactctcattaacatccaccaaagaagcttcctgtcacccccacaatcttctcactcactcccacctccaagcatttgtccacaagcccttgaactgtgcctctcccctccctcccttctctttcagatttagcagtcctggcaaatcaaggttttgatattgcaaagctgagggcaaaaactagagctcgattctctgtccaaggactcctggccacctccacctcacatacccagcagccaccatcactaatgacccagaaacaggactacaggtcacagaggctcagaggccatgaattctggagttattattcacatcaatccaggcagtggagggagaggcagcaccactacagctgaagcacaaaagggactaggattcccagacggttttagagcaaggggtgttttgcttgtttggttggttttagcagtagaatcctttcttcaaacaaagtcacacgtaaaagccaaatagagtaagtaaccattaaagggcctgctcatccaatcggcacccccactcctggaaggacccgaggtgtgacctggagccttggggatcagagagtgcaatgtgtaagtcaaagtggcggcactagtctccggaacccaactcttccaaaattatacaaacaggcaattagaaggtcaaatagaactgttagcatccctaaaactgatcccatgaaagacactttccagggcacgtgggatatgattagaagaaacgtgtaggcagattcttagggccccagaagccaaggcaaaccctctgcttcccacaagccttactcagagaggtccatgctcttcagcttccctacttccttcttgtgtttctcctgaaattcctttgctgcttcatcctgtggttaaggacccataaagagactaagtcagagtcaaggattgaaccaaacacaggaaaaggtgaagctggggtggaatggcacaatgatgagaaaacatttccttctcttccgtctacctgcaaaaaccttgtaggcagctttgattattttaaggtagctctgttataaactatgcatttaagaagtcaccaaaaaagacaaaacatttccaacagatgctggaatcctacattcacaacacacacacacaatcagtgggaggcacaactctaggcctgtgtgtgctcagacaatgctgggtccgtttgtccaattaaacctacagaatagcacttagctcaattagtgcagaggactctttctaaaggggaaggggaagacagtctgaattcacagcctaaggcaactgatggaaatgctgggactcccgaggccatgagcagggacatactaggtcgtcactgagggtcttcatcgtgggctccatgaccacatccttcgctgccaccatctgctcctcaatggccttttcctgaacttcattaaatagctacaaaagacaaccaacagagaagcagaagatgaaggagcagcagggacccagtcacccgtgacccagacacttggtgtcttatagaaaggtgtgcattttgaagacacaaagcaacactctacagtttaggaatgtggatattagcgggaagagctgaagaacacagactggatatgtaccaaattcctaatagggatgcctctgggagaggacacagaacttcacagattctttagagctgaagtcctgtatttgcgcgcgcacgtgtgtgtgtgtgtgtgtgtgtgtgtgtgtgtgtgtgtgtgtgagatgtgtgatgagatgcagcaaacacagctaaatgctaacatgtgttctgaagtcctggatttgtgtgtgtgtgtgtgtgtgtgtgtgacgagatgcagcaaacacagctaaatgctaacatgtgttcatctcgggagcagggagtgggtttgttgcactatttgagagacatcaagcccctgccctcaggctgaggttaccttcacaactttgcggatgatccggttgaaaagtcccatcaactggcccgagggcagctcaatctccttttccagctggtccacagacttatgctgcaggccaatccccaagagaagagcctaaaggatggaaaatctgctgggtgggcctctaggacacgcccttgcccattaaaatggcgccaagaaccagagtactctcttgaccaaagctattggtaca

SEQ ID NO: 315 - DNA, 4614 bp, Homo sapiens
atgtcggacgcagccgggtacccagctgtgctgccggccggcgcagcgcagaagtttgcagagcgctttctcgccggctggtcccggactcgcgctgcgccctgcgccctgcgccgccgcctcctccttctgccgccgccgccctgttctcccgggattccttctctgtggaggactgactctctgcttgtgggaattagaggtggacaagggggagtgccggggggtagcgacggggttctttccagtggcagctgcgagtcgggacgccgggagcgtggggctcctgctggccacggatctcggccaccttcccgcggcctccgggcaggcaatgcggccgccgagccccgcgacgcagagaggaaggagggtggcccggagggcctagagcttgtttctgcccacttgggaaagagggcatggagttgtgagtgcccctcgctcggcgacgccgccctcggcaggctccccatggccgggacgtacagctcgactctgaagacgctggaggacttgaccttggactccgggtatggggccggggactcgtgccgctcgctcagcctctcgtcctccaagtccaactcgcaggcgctcaactcttcggcgcagcagcaccgcggggcggcctggtggtgctactccggctccatgaacagccgccacaacagctgggacacggtgaacacggtgctgcccgaggaccccgaagtggccgacctcttctcgcgctgtccgcggctccccgagctggaggagttcccctggaccgaaggagacgtggcccgggtgctccgcaaaggcgctggcggccggcggctgccccagttctccgccgaggcggtgaggcgcctggccgggctgctccgcagggcactgatccgcgtggcccgcgaggcgcagcgcctgagcgtgctgcacgccaagtgcacccgctttgaggtgcagagcgccgtgcgcctggtgcacagctgggcgctggccgagagctgcgcgctggcagccgtcaaggcgctgtccctgtacagcatgagcgccggcgacgggctgcgccggggcaagtccgcgcgctgcggcctcaccttctcagtgggtcgctttttccgctggatggtggacacccgaatctccgtgcgcatccacgagtacgcagccatctccctcaccgcctgcatggagaacctggtggaggagatccgggccagggtgatggccagccacagccctgatggcggaggggccggaggcggggaggtgtctgctgaggccctggagatggtcatcaacaacgacgccgagctctggggcgtcttgcagccctatgagcatctcatctgcggcaagaacgccaatggtgtcctctccctccccgcatacttcagcccctacaacggcgggtccctgggccatgacgagcgagccgatgcctatgcccagctggagctccgaaccctggagcagtccctcctggccacctgcgtgggcagcatctcggagctgagtgacttggtctcccgtgccatgcaccacatgcaggggcgtcaccccctgtgcccgggtgccagccctgcccgccaggcccgccagccgccacagcccatcacttggtcccccgacgccctccacacgctctactactttctgcggtgtccacagatggagtccatggagaaccccaacctggaccccccgagaatgaccttgaacaatgaacggcccttcatgctgctgccgcccctcatggagtggatgcgcgtggccatcacctacgcagagcaccgccgcagcctcaccgtggacagcggcgacatccggcaggcagcccggctgctgctgcctggtctggactgtgaacctcggcagctcaaacccgaacactgtttcagttccttccggaggctggatgcccgagcagctactgaaaaattcaaccaggacctgggtttccgcatgctcaactgtgggaggacggacctcatcaaccaagccatcgaggccttgggtccggatggggttaacaccatggatgaccagggtatgacgccactgatgtacgcctgcgctgctggggacgaagcgatggtccagatgttgattgatgctggggcaaacttggacatccaggttccaagcaactcccccaggcacccttccatccaccccgacagccggcactggacctcactgacattcgctgtgctgcatggacacatctctgtggtccagttgctgctggatgctggtgcccatgtcgagggctcggcagtgaacggcggcgaggacagctatgcggagacgcccctgcagctggcctctgcggcagggaactatgagctggtcagtttgttgctgagccgaggcgccgaccccctcctcagcatgctggaggcccacggcatgggctcctccctccacgaggacatgaactgcttcagccactcagctgcccacggccacaggaacgtcctgaggaagctcctgacgcagccacagcaggctaaagcggacgtgctgtccctggaggagatcctggccgagggtgtggaggaaagtgatgcgtcgagccagggcagtggcagcgaggggcccgtgcggctgagccggacccgcaccaaggccctacaggaggccatgtactacagcgctgagcacggctacgtggacatcaccatggagctgagggcactgggagtcccctggaagctgcacatctggatcgagtctctgaggacctcgttctcgcagtcgcggtactcggtggtgcagagcctcctgcgggacttcagctccatcagagaggaggagtacaacgaggagctggtgaccgagggcttgcagctcatgttcgacatcctcaagaccagcaaaaacgactccgtcatccagcaactggctaccatcttcacccactgctatggcagcagtcccatccccagcatcccagagatccggaagaccctgccggccaggctagatccacactttttgaacaataaggagatgtcagatgtgaccttcctggtggaaggaaagctgttttatgcacataaagtcctgctggtgacagcttctaacaggttcaagacactaatgaccaataaatcagaacaggatggggacagcagcaagaccatcgagatcagcgacatgaagtaccacatttttcagatgatgatgcagtatctgtactacggaggaacagaatccatggagatccccaccactgacatcctggagctgctgtcagctgccagcctgttccagctggatgccctgcagaggcactgcgagatcctgtgctcccagaccctcagcatggagagtgccgtgaacacctacaaatatgccaagatccacaatgccccagaactggccctgttctgtgagggcttcttcctcaagcacatgaaggccctactggagcaggatgccttccggcagctcatctacggccgcagcagcaaagtgcagggcctggatccactgcaggacctgcagaacacccgtcagcagctgatcctgatccacctccgcccaggccctccaagctctactcacccctagggcctcagtaaactcagaccatcccaactggggctcctgggggtacaggaatccttatgaatgtatagaatgcatactgcctaggcccccagtcgtctgcagtaattcaaaagctggtatttttcttcctaaatgtcacatagcaaaggctgcccaaatccccaaacttgttcttcaaaggtttgacaggcttaatgtgggcatccagtggcctgtggacccccccctgccaccacgactgctgccacccggagttcccccattgtctttggtgcctgggcttccagagtccctcccatcaggactaccagcttgctcagttagcagcagagggcagttccccagcttgatggtttctgagctaagtctggcatggaggggcaaggggtaggggatggggtgctgtgtaggaatggcctcagctcttgttttgctgctggttttaggggccaaagtaaatgggtggattctggaacctcaggcctagactaggttgcctttgtgggggcgatgaagcagagtcccctggtcaagtctctcggctcctttaatgtaggattgagagctgggcaaacaggtcccactggggactgtgactcttggagattaaaggacagggcattgatggaaggtaagggccaggagaagaggcctttctgctgtgtcccctcacggccttgccctcgaattctgcaggccctgggctcccctgacacctgtcatatttatggaccagacactggggcagcatcaggcacagtctgtctgggtgcaacttcttcagctgtctggccgcaccttaaaaactatttattcaccaaaagccccaggcatttcagaaggtggcactcaggtcaccctgaaaagcccccaggggcttgcaattctggaaaatattttgactagctgcttggctggatgtacaaagaaataggcattattttattgctgtaatattgtatgatactttaactgtacaataatgttgtcacttactgtaaatgtactatggttttattaacaataaacactcattaacaatgacct

SEQ ID NO: 316 - protein, 1014 aa, Homo sapiens
MAGTYSSTLKTLEDLTLDSGYGAGDSCRSLSLSSSKSNSQALNSSAQQHRGAAWWCGSMNSRHNSWDTVNTVLPEDPEVADLFSRCPRLPELEEFPWTEGDVARVLRKGAGGRRLPQFSAEAVRRLAGLLRRALIRVAREAQRLSVLHAKCTRFEVQSAVRLVHSWAESCAAVKALSKMSAGDGLRRGKSARCGLTFSVGRFFRWMVDTRISVRIHEYAAISLTACMENLVEEIRARVMASHSPDGGGAGGGEVSAEALEMVINNDAELWGVLQPYEHLICGKNANGVLSLPAYFSPYNGGSLGHDERADAYAQLELRTLEQSLLATCVGSISELSDLVSRAMHHMQGRHPLCPGDARQARQPPQPITWSPDALHTLYYFLRCPQMESMENPNLDPPRMTLNNERPFMLLPPLMEWMRVAITYAEHRRSLTVDSGDIRQAARLLLPGLDCEPRQLKPEHCFSSFRRLDARAATEKFNQDLGFRMLNCGRTDLINQAIEALGPDGVNTMDDQGMTPLMYACAAGDEAMVQMLIDAGANLDIQVPSNSPRHPSIHPDSRHWTSLTFAVLHGHVVQLLLDAGAHVEGSAVNGGEDSYAETPLQLASAAGNYELVSLLLSRGADPLLSMLEAHGMGSSLHEDMNCFSHSAAHGHRNVLRKLLTQPQQAKADVLSLEEILAEGVEESDASSQGSGSEGPVRLSRTRTKALQEAMYYSAEHGYVDITMELRALGVPWKLHIWIESLRTSFSQSRYSVVQSLLRDFSSIREEEYNEELVTEGLQLMFDILKTSKNDSVIQQLATIFTHCYGSSPIPSIPEIRKTLPARLDPHFLNNKEMSDVTFLVEGKLFYAHKVLLVTNRFKTLMTNKSEQDGDSSKTIEISDMKYHIFQMMMQYLYYGGTESMEIPTTDILLSAASLFQLDALQRHCEILCSQTLSMESAVNTYKYAKIHNAPELALFCEGFFLKHMKALLEQDAFRQLIYGRSSKVQGLDPLQDLQNTRQQLILIHLRPGPPSSTHP

SEQ ID NO: 317 - DNA, 57347 bp, Mus musculus
  misc_feature (1)...(57347): n = A,T,C or G
aagactagtttttttttttttttttgaacaaatgaaagactagttttgttgttgttgttgttattttttttccattttttattaggtatttagctcacttacatttccaatgctataccaaaagtcccccatacccacccaccccactcccctacccacccactccctctttttggccctggtgttcccctgtactggggcatataaagtttgcaagtccaatgggcctctctttgcagtgatggccgactaggccagaaaaactagttttcaaattgaaattgctagtgcccacaccagcacagggctgacctgttttctacagcctctacctgccacctctgaagccttctaaaaggagcctctgaattaatattgttatttgtgcttaagtttttacagatactctgggcagggaggtggggggatgtggaagtggaaatcaggtatttatctattgataccttttactagtaggagtattttgctaacatcttacaagaagaaaaagacttcctgaccccactgtactgttgacctttgatggttttgttcagcctacttctgtcgcttggaattaattttgttgcttgttcttaggggtttgtttgtttgtttgcttagacaggatcttaaacaactcctgctgcttttatactttatgtagttgagggtgaccttgaactcctgattttcttgcatctacctcccaagggctaagattacaggcctgagtgaccattcccagcttcagtttctaaataagaatctcttaacgtgttaactcactgatgaaatattagggcttagggactggaggatatttgataactgtctttatgtccattccctctaacaatagacttttatattttacgtataaaatatacaatgtaaacataaaatatacatttttatatataaactgtgaagagctctttgtaaccccaagctaagcacctgcacttatttcctctttcttcttcttcctctatctctaaaaaaagaaaagtcaaatcctcatttatcttttacataattttaagtataagctgtttctggtaaatttatatgattaaataagataatatgattaaaataagatgaacattttctttcttataaattcttatgttaaaatttgtttttcttaagcagttgccagttatatagcacaaaattataatgattaaattgattaatttctgcctggtgttaaaatgaaaaatcataaatatgaggaaaaaggagagatagaatgtgcacacaagtgcacggtttgagaagaatgcaagtgaataaaatggctgtgtcctcaggggtttagtgtggcattgtgtgtttctcaaaagtttccgttgaagtaacagatgctgctgccgaggttgggaatcctaagttcacttgtggctttttctgttgcttattagaagtgagaagctcccagagggaatctggtgtggtagcgttagctcagggaaggctgtgacgaacacgtgacagctttgtctttgtgacctctaatctacatgtaagcacaggcacagttatcttacaatttatgtagctcttgggtctatctcagtgttattattcaataatggtgattggtttttcaagttcttttgagttctttaaagtttttctctaaaaattctattctttcttagccataaaaaattatcttgctggggctggtgagatggctcagtgggtaagagcacccgactgctcttctgaaggtccagagttcaaatcccagcaaccacatggtggctcacaaccatccgtaacgagatctgattccctcttctggaatgtctgaagaagctacaatgtacttacatataataaataaataaatcttttaaaaaattatcttgctaaacatttactgtatatcagcaagcaaataaattatatattagctacatgtctcaactcaaaatagtgcttattcatacaatagtacttatgatttaatgtgatttatttttctaattttaattatacaagataatgtgatcagtggacacatagataaaacatgtagtctccatccacagacagctttgatatagaaaggaataaattatttcttagtagcacccttaatttaggcctttaaatgcatagtagcctaaaagatgcaggtaatgagggagaaaagactttacaaaagggatatcaatgggaatagaaatgttacttagtttacttactggttggtttttgaatttttatttttaccttagttaagtgtacgtgtgggtatgtgcacatttgagtggagatgccacaggagtccagaaggaagctatcagatcccttggtgctagagtcacaggcagtagtgaactacctggtgtgggtgctgagaatcatactccagaagaatagcaaatactctgcaccactgtgtcatctcaccagctcctttagttaagttaaggagatatcagtacccccgataactaggtagtcatactttggtgttaggaagctacaaagagaaatgccacagttcaagtccaaaatgttacagagttgtaattgatcctccctgatttgaagaagtaagaggtggcagtaagagagaactttcaaggctagtctaagaacccagtgaatgaaatggcggggagtcttgagagtttcagtcagggagagtaggtgacaactctttagctgttacttttctaatggagaaagtcttaccttatgccctgtaataggctaatgggcatgcacttaacctttacctgggttcttttagtttccttgacaatttaactgtgttctctctcagtggtggaagagtgctgtttcagagcagtcaaagttggctttataatgcaaataaaaaataaatattgtgaaaagactcagattttgcttctttgggaattacaggtttaggctaatcattagcttccccccccccccacacacacacacagaggcttactctatatagtatatgaattcatagttatgaagaggtttacaaacttagttgttcaagctactttacaaataaggattgggtgttgttgtcatacattagtcacttgtttgtagaaatcagtactttttgctaaatagcttattttcccaaataatattgggctctctttcgcccaggcgtgtgctctctctctctctctctctctctctctctgcttgtttgtttgtttgtttgtttgtttgaagcaaggtttctctgtctcaaaacaaccctagctgtcctggaactcactctgtaaaccaggttgaactcacagagatcagcctgtctctgcctcccaagtactgggatttaaagacgtatgccaccactgcctattgggctttctgccttcttaaaaaacttagttacccattatcgaggtacatgcctgtgatctcatcaatgggaggctgagacggaagaatcacaagttagaagccagctgtgtttattaatctcagttgtcaacttttgacaagatctagaatcacctggtggtctggtgaatctaggctactaggctccagtggttcctggtcacacacagatagtcctgattaaactcagtcacaaacaaaacaaaaagataagaataagggaaatggcctcatcatgggagccttgtcaaaaaagggcaggagatgagagtgggatgacagtaacctgtactacgtacaggtatgaaattgtcaaggaacaaatttaataaaagttataattaaaagaaacaaatgagactgctaaataatatgtagatgaaatttttttgctaaatgaactgaagtacaaattagataaagaaaaagaataagagaaaattattaaataagtcacaaattactaaaattggcccaatttttaaaaaaggaaatatagaaggatcatatctactcaagaaatagaataactttttttttttggtttttcgagacagggtttctctgtatagccttggctgtcctggaactcactctatagaccaggctggcctcgaactcagaaatccgcctgcctctgcctcccaagtactaggattaaaggcatgcgccaccacgcccggcttagaattactttttaaagactattctacaagtaaaattcctgacccacaaaaccaaaaccacatctggtgaattctatctattaaggaaggacacaatttttcccagttcttatgagtccagtcttataccactatcaaaaccacacaaagatattatgaggaaactctaaatcaacatccctgtgttagttacttttgcatcacgaagtacctaatagaaacaacttagaaaaagaaatacttattttgcctcatggttttgggatttatcagtccattacaattcagtgatggcccagaagttctgtccctggtggctcttcatgtgacattagacaggaaacagagagggagaacaagcctggactgagatatccataacttccaaaagcctgcccacagtgacccacttctgccccttcctcctaaagtcacagcctcccagtacagtgccaccagccagcttctaagtgttcaaaacatggcctccaggggtcatctcatatccaacctacgattcttcatgaatgcagttacaaacttctgacttatgtaaagtaagaagttcttgttctttaaagatactacatattaacccagttagttccaaaataaaggctcagcctgacatttgaaaccaaattactgtggctgttcaggaagaaataggaaaaatcatggacttctcaacttgttgcaaaaaatgccatttgataaaattcactatctgttttcagcaaactggaaatagaaagaaatttatttagctataaaattttcctaaaaacagtctatgtaagagaagagggagggcaagggggaaacagtgtatgcagttgtaaaagaaaacagtttatttcctaagactgggaactgaacagagatctgctgttcccgactacatttaacatccgtctgtaggaggcctgagtatcagtgacataagagaaagaaaggagagcatgggacttgccagggagagccagaacaaacaagacattccagaggtaaggcacttgctgccacgcctaccacagaacccgagtttagatccctgggacccacatgatggaaagaaagaaccaactttcacaagttgccctctgacctcctcatacatgtgtgtacaaacaaataaaaatgttaagaaaggaggaagtaaaactatctttacttacaggtggtatgaacatgtatattgaaaattggcagaagcatgcaacacaaactaagagaccacaacaagttacacagtgtaatatgagtatataaaaagtcacttatattttataaacataatcaaaaactggaaaagcattaccatgaaaacttaagctaaagtagattgagagatgtatcagtgtatatggagacttggtattacaatagcctgctatatggattcaatacaatatcaatcaaaatcccagcagactttttactgaaattaacatgtttattctaaaatatatacccacaatcaaaggtgctagaatagccaaaacattcttgaaaaaaatgaaagtcaagggtgtgtgtaccccatgtttcattttttgttgttgttgggttgggttgggttgggttggttgagacaggctcacagtgtagccttggctgcactgaaacgcacaaagatctgtctgtttctgctttccaagtgttgggattaattgcatgccccactatgcccagcctgcatttaattttttaagaataaaaataaatcagcgtgaggagttgagggaatggtttagtcagcaaagtgcttgctatacaaagtgtttgcataaggacctgagttcagtccctagcacccatgcaaaaatctggatgcagcctgcatctgcagtggggaggtgaagacagatgagacagatccctcagtttccatggtgaaactaatctagccaaatggtgagcccccagttcaatgagaaacacagtctcaaaaagtaatgtagagagatactgaagaagacaaaagatgtctacctcgggcctctgcacaagcatgtgtgcagacacacagcccccaaaaagaagaaaaaattaaatgagttttgcaattaaagtgattacaaggtgtcattaaattttagtgatgaatgtcactgggatacataaggtagctctgaaaatgacagcccatatgtcacttacctgcatattttgaatgaaagaataatatggtgggatgaagaaatgaggctgctgctatttaatatatcctcactcttcagtacatgtgtgcagcctccagactccacaaagaaaatcagcagcagcacagcgcctctgcttccctatgaattgacctttttgtaaagcagcctcataattttttttagtacaggtattttattttaaaatatgtttctagacacttaaccctggtaggcctgaaaaaatgtagattacttcatgtctcttcaaaattcttttcagagaagcgagtcaagcttgatttgtgtttttgagataggtggaagtagtaaggttagacggaggaggaaatcataactcggcttttagtcctttgttgacacctccttagcgtctgcattagtcataggtcccttccttctggtccggagagggactaaaggaataggaggtatttgcaggtttgtaaagagcaatgcaaagaaaaggaaatagctgacacagaaaaatgctgttagtcctcccgttttacagttgtatttttagattcatacttacaggtttatggatatttgggggtttggggtttgtttttattttgaggaaaggctttgcatctgtggctagcctgagctcacttgtgtaggctgtatgctcactatattggccaagctgcctttaggccagcagcagtcctgcctcctctgcctctgcatgcatcaccccacccagaaggaaaacaagttaggcctcttgttttgctcctatgtcactatttttgatgttgttaatgtaatacaaagttcctaacatacaaagtagaccagttttcaaggtctgttgttgtcagaatgtttcagtggaggcaagcaagatggaataagagctggtaaaggtgcttgcctgcaggcttgatgactcttgtgtgaaccctggaatgcagatggtggtcggagagaaccacctccctcaaactgtcctctgacctcgtgcacatagatgtcaacaaacaggccaaagaaataaatagataattctttcaaaggtttttgatgctgtagtggaagtcatctagaaaaaccagtagacattgttaatgctgatattgagataaagaatttctcttctaccaacttaggtggaaatgagattgtgtgactttccaccactggacagaataagtgaagacaagatgcagtcagttgacactgctgggaggactcattaatgagcaacttgttgaagagtttagatagatagtggtcacagtttatacaccaacttcacacaatagccaggttcagagaatcaaaagacaagattctgaggcttgtttataaaatattttggaatgtcccagtgtctagggtctagaaaaataaaaagggttgggatcattgaaacatctcctctctaagtaaagttctgcttggtcaggtaggaaattgacataaatttatttctacatctgctgttgagccctttgcttattttttctgtatttgtatttgagcttggtatacaaagccatttttcacaaatctcatttgattcttacaaaagattttaggtaggcagggcaaatactataaatactattatccctattttacaggcaaaaaatatgaggcacagggtgaataattatttgttgagagtcacacaactgatatgagtgcttttaagcaaagtgttgcatagatggctcaggtgggtgagagcagttgttgcaccagctaggacctgagttgggatccccagcacccatgtataaagtaggcatgggcacacatgtacctgtaaccttagctttgtgctaagcagaggcaaagttcactgccagtgagagaggctgtcacaaaggaataaggtagagtgctggcgagtaggatactgatatactccctgccctcatagatatcctctcacatgtgcagctgcacatacagacacacacaaaaccagtggtattagtgctttgtttggcatacttaaagcctactaccacaaaaaaataataaagaattttagggctagaaagaaggctcatcagttatgaacacttgctgcccttgcagaggttcaaagttcatttcccgggacccacatggagagagtccaggttcagggagatctgacaccctcttctggcatccataggcacatatactcatatgcatagacacacaattttaaataaataaaaagtctgaaaaatagtatttttcacttacatgagaattttagatgtttaacccttttcatttataccttctcttaaacttctcatttataccagtttgaatactaacacatttgaagtcccattgtctgtgtgtgacttaaggcactaaaagtaaatttgttttattttctagatgatgtaaattggttcatcagtgacaaagacatcgaggtaagatcaatttttttaagctaatattgtcctttgatctacatatttccatttgttattttccataatttgggggggggtataaacttttttaaaaagatgtagtcccataacttagaagagaaagtttggttttagtatgtatgtaatttaacttttcagaaatgtaactcaactttgatttttgtcagatgataagtagctataaatcacccttctgtttatatttcttctctgccttaatgattcctgttagcccctatggtctagtactactaagatcaacaccggaaataactgtttcttcagtgtaaggaaatggtcagtctatatttagaacatggcaggtgcttgtgtcaattattagccttattgtaacaaatacttaaaaataaaaaaaattaaaaggttgttttcaacttgatagtcaagttttaagatattactagattggagatagttgacaaccaattcaggagaataacaggtaaaaaaaaaatgaagctttttcaaaaatggaatttattttatttatttatgtatgtatttttctctttttgagacagggtctcctacatagcctaggctgtccttgaactcgagatcctcctgcccctacctcccaagtgttgggattataggcatgaaccaccatgcctgactttaaagacggaattctgccaaacaagataagcgcatggttgggatttcgtattcctctttaggtatttcatatgatgtactttgctcatgttctttcatatatagtagaatttgactagaataagagacaactagaattgggtcactatgtggctgatagtggaagaatattgtctcatattcttagaagttgtcattagttttataggcaatagaggtagccctgtgcttttcaaaaaaaggttatatttggtagttatatagttttgtaatgttttaaagcacaaaatcataaaaataccattccctaactaaaactttaagcaagcctctcattcagaactaaatggtgtatgtttagatgtagaagttagcagcagctgaatgtagcatagccatattcctgctagacctgatccctaatcgaatctggcaagtgggggcagtcacgtgggcaagagccaaagaaatagcgctatccctgcgctcacctctcggggctggagtctgcttctgggtgttaggttgaacagaggtgtctgttccttcttttgttgtaccaaagtattaaagctgacttaaaatttaatgtttctcactcagtagttttaagaggaagaataggtaggtttccttaaactgaaataattttaattcttaatttttttccttctactcttaggccaagatagataataacagatcatctggaaggtggaacaaccgatactattcagtcaacaaaaatgtcacctgtagaaattgtgataaacgtggccatttgtcaaaaaactgccccttaccacaagtacgtgagatgcatgatgcttcttcctgtgttaaaggcctcgagccctggctcctagactcagctctggctgaactcagcatgttggattacagggagctcatgagcatggcatgggtgtagtgtctgcaaccctgggctccatttcagctttcccattatgagcttagtggtggcagatacgtcatactctgtgcctagattttcttgtccacaagatgagaagactgagtgaaaggatttccttttaaaactttgtcctctgtagacagcacatttcattgtgcaataattctcactattagagatttgtacttctttttgtctatatgtgtgtagtaatggcaaagcaagcatatttatttgagttctgcgttatggtatgtagtggctctggacacacagtcctttcattacctaatgcctcctaaagcagctcgtggtaggcatacaactgcttctctgtctgttcctcctgtggcttgatatccagacacactcatcctattatcctagatatttctactttatgactgaataagtagaaatataagataagctaaggcatatgtccagactttgtggcaacaacatactgatagctgcgttcgatctctgagttcggacatttggctgattttataattctgctcaaggttggaccttccctgagtttcaagttagaaataacttgatataggaaagaaaaaccaatgttctaccatttgagaccgatatgtttttgctaaagagagtttgtgtttgtctgccatatagaaagtccgggcctgctgcctctgctcagagagaggacatctccagtatggctgtccagcccgttactgcttagactgctctttgcccatgtcttccaaccacagatgttttgaaagattgtcctggagaaaacgatgtgaccgatgtgatatgataggccaccatgctgacgtaagtatttttaatgaactaatttgtcaagactttggacagtgtagcagttcataaccatcagccatcctacttgaaagaatgtctgttggtaggtttgtttgttgttttcttgaaataggatttctctgtgtagctctggctgtccttgttctgtgaaacaggctggcctcaaactcagagatacaaatgtctctacctcctgcatgctgggatacaaggtgtgcactaccacagctggctttagaagaatgtacacttgatgttttgtacagatgtgcatatgaaaactgatctgaaattcttgttggtgattttactagtggtaaaatagtctgtgacaataagtacatgcttcccggtactttaaatatgcctgctttcttagttaggtcttgttatagatttcaaaagtaacttaggcattgtagtgtggcctctaattccagcacctcggagtcctaatccaaagggatttcaagttttgaaaccaattaaactctgtctcaaaaagtatgtatttgttaatattaagaaagtacaagaaatttagaaaacacttcagttacttaaaacaaaatcagaacggtgcattggacctgcccctcctgttgtaactctgtgtggggttgaagggttatcagttctaaccacagtgtcaaagcccaggaaggctaatggctttgataaggaatgtggagcttcctacagtcaatttactccttttatggaaggttctagaaccttgtcgaatttgagaattttaacattttataagtttaaaaatcaaatgggagccagcaagatgggtcagtggataaaatcacttgcacaccaaacctgattcataggttggatccccagaacttacatggcagaaaaggagaacagactctcataggttgtcttctgatctccataccacagcatgcactcatattcacactgaataaatattttttaagatttaaatagatcaccaaagtttctcttcccatggccatccttgaacgtctgctttgccagaaccagatacgtacgtgcaaagaaagttcataataaaaactgatgagttgtgttcagactcttgctatatttgaaatacctcaatagttaccaacaatgtaaaaaccatttgactgaaatccctgttttataatgtgaaggacagatagagtataagacctaagtcagcctgcaccagtggttatggccctccaaatgatgagactgtgtgaagagtaagaaaagatttcccatcctgaaactgccaatgactctgtcctcttcccaaaaactcttagaggaagagtcctcttaggtatttcaggctggccttgaactcccaatcctcctgctctttgaatgctgagataacttatgcacattatagatattctgtatctggttttaatagctttcttcctttgcttttaaatagggtcttactatgtaggctcagagacacaaaatcatatttgaaaaagtttagctgttctgaactgttgtgttgtgttttgttttctccttgctctgtcagttccagtcttgaaaggctatgatgttttatcagaagctgaactgttttagcagtgatgtgaaagaaccattcacagtatagagtcttaaccactgtcatcgtacttgttactatcctgcacagtctgtgaatattaactctggactattatgaacagttcccactttgcccttttctcttttctcagtaggcagctagtgtcatcagtcattcttgtttggggtttggtttggtttggtttggtttggtttggtttggtttggctttggtggttgttattcatgttggtggtggtggtagtggtagtggttgtatttctgtgtggcaagatatgcagctgggggtatataccagcataaccttctgcctcctaaatgctgggattaggccaccaagcctttctaaacatgtttcagcttacatcaacccaagtttgtatgactttgtttcagagtcataactcgggctcatacagtctgcatctgggctgtgtgtgctctaacttcttgaccatagggatccctgcagcttactttatttagatgatttccttgaaagaccaaataaacctttctctgtatcctctgttacttttccacttagttacccacaagaacttacttcctcatctttattgcatctccccaaatgtctccttttgcccaccctgggtacaatagcacatacatccctacaccctccactttccttgccctctttttctgattttcctcctttttttcaaagagttacttatttatgtatatgagtacaatgtagctgtcttcagacacacaagaagaaggcatcggattccattacagatggttgtgagtcaccatgtggtttctgggatttgaactcagaacctctagaagagccgtcagtgctcttaaccactgagatgtctctccagccccctctctaaactttggtttcttgttttattttagtcaacattgttgttgctacaaaacagtttaaatatacaatgataaagaaggaaggggcttattttgaaaataaaatcacctctgagctggtgcgatgggtccatgagtaaaagtatttaccaccaagcttggcaccctgagttcagttccctgttcccatatggtaggagagaaccaattcttgaaagttgtctaatgacttaaacacacacacacacacacatacttgtggtggtatgggcacactcacacatgtacagtaattaaagtaataaaataatttaaattatccaaaatgttccagaatttctgattgattgattgattgattgattgattgattgattgatttaaataaatgtgtggtccttgagatgatcatcacaccagtttggagaataaagaagacatatttgtttttttcttttttttttaattttttattaggtattttcctcatttacatttccaatgctatcccagaagtctcccataccctccctcccactcccctacctacccactcccactttttggccctggcattcccctgtactggggcatataaagtttacaagtccaatgggcctctccttccagtgatggccgactaggccatcttttgatacatatgcagctagagtcaagagctccggggtactggttagttcataatgttgttccacctatagggttgcagatccctttagctccttgggtactttctctagctcctccattggggaccctgtgatccatccaatagctgactgtgagcatccacttctgtgtttgctaggccccggcatcgtctcacaagaggcgatatcagggtcctttcagcaaaatcttgctagtgtatgcaatggtgtcagcgtttggaagctgattatgggatggatccctggatatggcaatcactagatggtccatcctttcgtcacagctccaaattttgtctctgtaactcctcatatttgtttttttaagcataatattggagctaagagacatgactgggatagattgatttacttaaaggtaatcattgaatggacttttgagtgcttctctagctgcgaggctcgggatactaatagaaaagtaagttgacctctgcactgtctttttgttagtcctaactaatttagggatcagaggtgtgggcacacatgccgtgatatttgagtggaggtcagaggacgattctgaggagtggctttgctccttgcaccctattgagggaagtctctcatgctgccgccgtgcatattccaggctgaccgatccttgagctttaggaatctcttgtctcctcactgagtcgaccacagaaattgccctactttgattctatgttgctgcaagaaaaactgaccaaaactgacttggggacattttctcagttgagatcccctctttccagatgagcatatgtcaagttgacaaaaatgacttagcacagcagtgatcagactgaagatacatgccattgcatctaactttttagataggcctaggcattgaacttgggtcctcaggttggtgcggctagcacgtttaccaactaagccgtctgcccagccctgcttctgtcctcacagtcatttcagtgaaactcatttatgtgttcatttaagagaataaatcccaagctaagaattaatcattcattaaaactgttcacaagccacttaactaataaataaatatctgaactgtttgggattgcatatacatagtctacattttaaattgaagctatgtaccttaacacatttaaactttgaaggagaatccagccttgttttgaaattgtgtaaaacagtttcctttctcaacatctctaatctgaattcccccaccctctcaagctgtcttagagcacatgcctcactgtccagcacttggccctagtagtgagcctagcagcttaatggaaagatttctttgttgaaactaagaatatgctagtagaggatagaaacagctctttctccagaagggagattgtcctcctctgagtctgtggtgtcattgagaattatgtggtccttagaaatggacttacccttaatccaggcctatgtgagactgacaaagtaaactggtgccagaagtgactgtcagactcattgaacatctcacctgcttttacaattcagctgtacatgtctacatagacttggatttcattcttagatctctaataaggacaaattctgatacaattgatctatgaaattaaggaagtcagatccacattaatgcctatgaggctacaaacataattaaatactgcaaaccaaggtcaactctcctaaacttcattgattctagatagcttctgaaccagattttgcaaatctccttcaaaccatacagttagatactaattcattcacttaaacatgcagtggtccaaccttgtctgcagaataactttgttttgagttaaaaagtggactcagagctgggcgtggtggtgcacgcctttaatcccagcactcgggaggcagaggcaggtggatctctgagttcgaggccagcctggtctacaaagtgagttccaggacagccagggctatacagagaaaccctgcctcggaaaaaaaaaaaaaccaaaaaaaagtggactcagttctgtgtaatatgtatatgtgctcatttatatatattactttatcctattaaataggataaaagattacataccaggttattagccttgattttcctctgcacactaagaatagagacaggctgagaaatgtaattagtttccctctactttttatcataattcagttttttaaaaaagagagaaaaggataattatttctgaaagacttcagtttaagccagacttgataccatagcctgtaatcccagctactcaggaggctgaagcagaaggatcaccaagttcaagatcagcctggtcagcttaatgagaacatatttcctaggaaaataccccagttaggattgctgacatggctcagtggtaagccacttacccagtctatgtggtgatgttactgtagttaggtcagaactcatagatgcatttgtatatgttgttctttatttccttttttatagtgacttgtatttatgttttatttatatattcaaggcataatatgccctattctattacttacaagtattatatgttataaattctttgtgaatagtatagtcaatagccacgtttcagtactgttggatggtttttagccattctaataactgcatagtatcactgtttttgtggttctaatttgtgtctggccagggactaaccctgctgaatatcctttcgtgtgctcatttttattcttgtgtcgttcctggtgatgtgtctagattccttcccatttttaactgtggtccttattttcttattatttcagatattactcaatatagtgagtgttctaacccaaaaatacaatatatttcttactacttattctgtgcttctttgctttatgtttcaagaattttgaagattacagtatatgcatttcttcatatttagatttacacatttttattggaattgtaccagttttttttaccaaattgcttttcagtcatttattgtttatgtatagaaaaatattttattaaatatttgcagtagttctccagtgttacaactatatttaacttatttttttggttgcctggattttttatatttaaaatgaatgttcagtacttgtaataatggtatgtgtctgtgtgcatgcacacatgcgtacatatgtaggccccagagattgatgtcaagtgtcttcttcaaacactttccccttattttttgagacagagtctctgactgaagctagagctccctggtctggatagactggccagctggcaagcagccacttgcctccacttcccaacactggcctttgaaggagtgtaaggccaccacaccctgctcttcacatgagtactggggatccagactcaccgagcacctccccaattcatatcatgattctttttaagatgagcttttaaattacaattgtgacagcatcaaatagcacaactctatacccaaagtttatctaatataccctggatactatgagcatcttgagagaaaaagaaaaggtaattccaaagaagaattaattccatgttacttacataactaaaactgaatgataaaacatgatcatgattagaagtagcttaatgtagttaccaagggaaataacttacatcattaggtgttggtcatttgagatgctgcttatatttttatatatgtaaatataaaataagtgtctgtcagtgtcagcactcagaaactcactgttcattgggcattatcaaagtgctcctgacaggattaaagaatactgtcaacctaaagttttgttattgttcagggataggaaggttagtatataagaaaggaagcctctaggctagtatgatggcttaacaagtaagggtgtttgccactaagccttattacttgagtttagtccccagaatctacatgatagcagggaaaaccaattccagcaagttgtcctttgacctccacatgcatgaacacttagagatgcacacacacaaaatcaatgtaaaaggttgttttaaaagaaatggaggcaatggagagatggggcagtgggtaagagagttactgcatggcacaagacccaaattcaattcccagcacccacatggtggctcaaaaacgtctataactgcagctacagaaggcatcaggcaccagctataaacagcgcacaatgcatgtaatgtaaaaaaagtttaattaaaagaaaagaaggggagctggagagatggttcagcggttaagagctccgactgcacttccgaaggtcctgagttcaaatcccagcaatcacatggtggttcactaccatctgaatgagatcagacgccctcttctggagtgtctgaagatagctaccgtgtacttacatataataataaataaatcctttaaaaaaaagaaagaaaagaacagaacagaaatggaggttcttggcacatgtaattgcagcatccaggaagctaagagcaggattacggcttcaagtccaggctgggctacatagggataacattccatttaccttccaaatttctctccttcaagagagagtttcctggaaggaaatctctggtaactgttaaaaaggaaatgctggaaaaaacgctgtgcccattattatttagacattctaggaaaaagaactgacctgagcttgagtaaacaagtccctttgagaatagggtggatcatcagtggccaaaatagcttaaaaattttgtagtcagaagttaactctaaatacaatctgatccagtatccttttctatgattgtaaacaactaaaaacattaagtagatctcatctgaatgtaaaactaaatggataacttaagtgctaatggttttggtctctcctcaactcccatgacgaagggagtcacaagcagcaatatctaaatgaaatgtcgtttgttctctccttttacatttgtttctgggagtctttgctttcctaccaagctcaaccactctccgatggagtctcagctaccttattgatgtccgtttgtccatgaccatagagctttgatagagtatagagagtgccactctcatgtgactgtagtcatgactaataacagttgagccttgctatttagcaggctttgttctaaagaattaatcttctcagctctaaccatcacagcagcacattgagagagttctgggagccctgtttcataaatacaaaagccgagacgcagcagtatgtaatttgcctaggacagtaagtagcagggccaggatttgaacccagccttttctttggttctgcatatctaatgttagctgttgtgctcgcatgactcattgtcttctttttctcctattgtttgacgtttcattttccttagctaaaagcagtgtcagagaattagcagctctttgtaaaataaacaaacatatgtcagtcatctagaatcagagtatctccagacattgtgattccttattaaaaaactctttttctaaagaaaatgttacataagagaactgagtgtgtgtgagtatattgagggtcttttgtgatcaattttaaatatttttctgtaaagtaggacaattgcatttccaataaaactgaaatataatttaacaaactttatgcccttataactacacttaacttaggagaatacaaaaaaagagaatattttctgcaaaaaaaaaaaatagcttgttagttttcctgattatagagaattttgagtataaacactgactaaaatttgactttaaatcaaaagttagttttatggagtctagttcatttgggaagcagctttgaggtagtgatcagtgaatggattttcatacttattgctgaaaaatatatagattctgtatacattgccacactataggtgttgaatatatgtctaaacctatttgtgtttatgtatttatctccttaccaagaatagccatttttatgcaaagtagaaatatagtaaacaatcttaaaacattttgaattttaattgtagatttctgtaatgttagaccttagagctgtctttatgtagaattttggtttaaggtaaatgttagaatattctcttaattttcttccctcctaagataaactccagctcacataaatatatcgggagaaccccatgcatacacggtggttaggcaagtgtttggacagttggatgacttgagagtctttgtgaagagtctgctgaccaggtttcagtgtagggctgtcccttgcaatggaaggtgcttaaaacagcatcagtgtgtggggagactcacactcacagtcattccagagatgggattatttttcttgccatcacttctcagtcaacagattttaaacaaaattattctctttattttttttaatttaagttattcagcattgataagcattgcttgttttattaaatcttttgttttgctgcagtgacttaaggggccagctcttaacagcagaggctttgacaaagcaccagaggattctgttaaaaagttgtgtttcgtaattgtagttgtcgtgtcagagcctaactgacttggagctgaaggatttttgtgagatgagtagctgtgccagcagggacccaagtctcctgggctggccgcgctctcattaagatttgccgctagcagtggcggtggtgagcatgtatgtgacgtgcattctgttattgtatgcttggcttgtcagcctgcagcttcctgacactcacttatgtcactctttattcagagaggaagaagcttttgataatttgacaagacaagctcttaaacgatctaggtcatggccttcactgtctgtgattgtgaacatatttcctgaaagccctgtcactcatcacagctacattttctcccggggagccacaggcctgtcctggtctcttgtcagctcatacattttggttattcatataccaaatacagtactgggggtttttttcttcccttttgcaaatgctcgcatgttagtaaggctaatcctttctcctgtgctgtgctcccagcagggctgcgttccaggctccctcagtacaaggcagacaactggccgaggggagctgaggaggaggaaaggccgcttagccttgttttgtgtttgttcattgttgtggaaatatgagaactggtggcaagggccttgtctgttgagcacttgagtcttggtctgctgtcaggggctgtttaagattgagtgttttattttctttgatgtacgcatttgagaatagggaagtgggaattaaacaacagatgcactaagccgttgttctcataaaacaataattagcacctgataaaattcaatatggttcaaaatgcacaatataaactctcaattcatctggcatggcaaagtatgttgattcatctttgaatgttatgaataataacactcagttattcatgtatgtttattatccaaagtacaatagacaggaaaactagttgggcaaaagttggcaagcagtgaaccacattgccgaaacagatgtacgagtgcgctgtgtgtgttctggtgttcatctacctaaatgccaggaaggtgggagccgtgggccaggactgcatgatgatgctgtgtgtgttttcacttcagctgactacccattcagtctaaatgttttaatcagaccaagttttcacttgcagtagttagcttctttctttagaagtttattctatctaaattttccatgcttagccattctgcttgctgagaatttttaaaatatctctgtgtacaatactcaggagtgttaaaaagaagtcaccaaagtttagcatgtaggaaaaataggattttaaattttgattaatgattgcggttacattttgtatttagaattaacatgtatgctctccaatgacctctgctttgaagtcttttttaattgtagtactgttatctaataaaagagaagaagtttcatatcatccactcccatatcagtcatcatcttcctgtacagggcaatcagatgattgttcaaaaactaaggaattctttattactaaattgctactacaccagaaaaggtcacatggtagagtagcattctgccagtctatgacaactcagtgattgtgatttttcaaccatattattctgaggatactgtggtaatcaagaactatccataactaatgtataaataactgcttgctatctctatagtaattgaactcaaattatatgtacatagcaaaagttttatgccagaaggcaggaagtgagtacttgaagatatatcgtacattaagttttgtatgtaagtatgtttgagtgtgtcatccttaacctgagaaccaaaaaagctacttttaattttataaaagtatttttctttcagttagcattactagtagagaaatcattgacttaagtaatgggttttccagatactacatatttgatgaatatgccgctagaactgggaggaagaccactggacattttaatttacatgctttcctatagaaaattgcacaggctagttaagcctaaagtatataatgtgtgctttttcacctgagttatatatctttgttctaactacatatgtggtattttcagtagagattttgctgtgcatagttactgttaaaacattcttcttctgtaaggatggttaactgatgagcgaaacagtgctgctagagacagtttcctctgggagagatcagtgtgtgactcaggaaaagggtctcttgctggtgtctgttcctggtgctgaggatttttgttatctattctgatttcagtaagttcatcttgaacagattttttgaggtttcattgttttgtttttagattatttctcgataaatatgaacatgtaaaattttgatgtataagagaaaggctatagattttagggattttgctttctttggtttggcttggctttccttttttattctctttttcattaagttttaagttagcaccaacagacattacagataagtacactgcacagttaaagcatcttaaaagtggtgctcttttaaaagacactctaggttagtcttacagatctagaccactgctcttgatttaccagtttaactgagttacggcccagcatcataccaaacttctaacctgtgaagaaagagaggaaaactttgtaactggcttcctgacaatggcagggagtgtgttaaagcagtgtaaaattcaattaaaccgtctagccaggtttttgaagctgaaatgcagaccctttctgttaagcttcttattttcctgtgaccgacaccggtggatgctgggttatgccaaaaccaacaggctgtaaagtaccttgtttcatgctcccagctgatcaatatttttattttccaggcttgcccagaaatctggaggcagtatcacctaacggtgagtaaaaacacctttttattttccccaagacccagcctatttacccttctctgaactgctgaccataaaatatagacaagcatcttctgcagcaagataataaacatctggagagtttgtactgagaaagcaataatgcacctctccctttctcctgcccactgcctgctctttattttcctgtttttaaaagatttcagctgatttttattactcatgtcattaaatgattctatcataataccctcaggcttagattatattcactaaattaaagggggaaagtattttagaggctataaaactgcgtctttagaacactgtgttaccacagtccataagcatacagcccacaatatcatccattatcactttctgcttttgctgaaatacattcttaactgcagctagaaaaagcttagtgtacctttcatataggacaattcaactctcctatccttaaaagtctatacttgtttgaattatagacatatatatttaatagtcaatttctgatttattattcaattctgatttattatgattttagtcttactgaaagcagaaaataactattgatgtataatccgtttgattaattctcaatataaagtcagctcactttgactttccagtttaaataatgtcagtaattcaatattgtcttactatttaatacatttttgatgtattaaatagtactgagagaccatttcttttaattatacagttatatagcacaatataattaatagttgttgaagtttagtatataaaagattttgtatgatacagttcagaaaagagaaaaggcagtttttttaaaacatatctttatactgctttcctcttacagagatataaagtgagccaacaggcagactcatctaccattgtctgcccgggccacagtgcaagggatagtagtatatctgcagggttatctaaaactttagtgttatattaaataaaagtcatatacatgtctatatattatatacatatatgtgacaaatgcagtcagtggattatattttggcattgtagcagctctttggtaacataataatggtaaagcccttatagcctaaacctgataagaacagaattattcttgtatctctcaaggtctcagagtctctgtatagtggtgtggcagtactcgttacttttattaagtaataccatcatacatttgactttgtagctcttttagcttttccactaatttaaagaatttttatgtgactgttattgaatgataaaaattagcttcaaatgtaacagaaggttaaaaggtttgttgagtatttttttagcttttcagaaacaaattataaaaagaatagagatctttaaaaatgaaaacaaaataaattcatctttattagaatataatatattctatctgtaagaataacaaattcaatttgaagttttctttatatggaaacctggttgattttctttcagaaaatgttgaagtaatcattgtaattcacaactatcaggttttaattaacagtgagttattatgcaagaataactacaacaatagtatgcttataaatgtgtaaatacttttatcaatccatctaaaatataatcattttccaattatttaaattgccttatcagtatatggacaatatttgaatgcctgtaattaagcagtattaaatattgagtgaaagcacactgcatgctgattttagccatcttcagcccttttactaggcgatggactgccatctattgactcagagtagccctcacatgtgaacagtggcatcagtcacagcagtggccacagaaggaaggaagtttgaattgcctcttatgtactcatttcaaccagcctgcttaaggctgtaaaggtcgagagatcattgtgatacattcacttctcctctgaccacaaagtatctatttctaactccaaaggcactggactttggggttacatttcttttagaacttgtgtttggaactgttgacatttgagtgcttttcacttgctgtgcctgattcccaactgataagatctggaggatcatttccagaacaagtacactttaagcagctacaaaatcgggtctaggaagcctctctcttataaacatgcaagaaagatgaagataagtaacatagacttaggaattttcaatttttccttacaatattgtgaaataagatttcaaaagagaagttttcattattttcggtaatatcaatggtaaaatgaggtttctaatagattatatctaaataaagagcttttaaacaaacttgacttgaatgcattaataaaaggcaaatccatcatttcaaaagacacacagtgatactgagactctaaagcacacccccagcacagcatgtggctctactgcttttctttatccatttcgatgactaatttaaaaaaaaaaatgtaccttttgatgtctttgttgatctggagacatatgtgagagaatttatttaaaaattacctatacttccttttaaaaaaaagaaaaagcaagccttttgatatctttgctgatctggagacaaacatgaggcgggaaaattaacaattatgtagtttcctccaatagctaacacttttacttcctcaaaaagttaaagtttttacatgtcttaatcatataaccctattctttacattgtaacttctgctttcagatttttagcaaagccttgtctttttcttcattcacatagttccttgtagattatttccctatgaaaaaagaaagtcctttctccatctcttcctttcttatgttatagcaaaaacactaggctaatatggcacccacagagttatatagcccatagtatttttctctgatagaaactataatttaacatgcattagacattcttatcgtgtttacttaaaaagtaatcagaaaattgcaattcaaaagctgtatatattaagaaccaaaaaggttaatgcatcttttatgtttaattttgtgcttgttttttaatgtatttaaaatgcattacaaccttactacttcttagtttaactaaaaatttcagaatatggaagaggatataatttttatatgaggttaagttttggaatgcttagaatttatacttcaaaaatggaaatttttattaactagggaagagaagaaaaatacatttccttgtcttcctttctggtcagtgttgactagcagtcaagagtacaaccctgaacccgctgaatggcggagtcttccagactgcagttcaagtgctccattcgttttcccggtccacattctctccttacctgggaacatcagcctacaagtatactgctgagttttcacagaatgatttttacagcaaatcagaattttatcatctaaaaaattctatgctttttgccacagaatggtgccccaaatatcagcagactaaagctaacttcagaactactgtttgacagtccagaagaagagaacaggagataggtgctaaagctacagccattcaaatatcttttaccttgggattgaggtgtaaggcagggtaaatataacatcccatgcttttctttaaaaaaaaaaaaaaaagttttttaaagtcaccaacaatggagacatttttctattcacgtttttcaaaaaaagaaacttccttttaatgtgttccgagcatgtgtttggagtcttgggtggctttgtcagctccccaagcagacctgccaaacgtgcgagcaccatccacatgctgctcacctgaggagtcctcatctttcctgtgtctgtttgcacgtgggagggagggaaacagcccaggcgtatatttaagaaaatagcattgattgggcattatcattagaattatatattccaaaatagggtgaggcctgcctcattttcactattaaaaaacaaaaatgttgtgccatctttaagggcctgacagaaactatcataaacaacaattttataaattcatttgatagtgcaatccacaatgccaactcccagaaccaagaatactcataactcataggcattttcctctgctgctgggtcagtgctgtgattgttatgttgctattaagacactagagctgttaaatttcaaagattcagctgtctttaaaatctccttaaatcctgaaactgctaaagttaatgtgctgtgacctggtgattgagaacgcatacaccttgtttgcagtccgtgaggatgtatttttttcttacaggactcggaagtaaagctttatttctttttcaagttgcttaatatctgaaaaacatgatttggttggttggtttttggtgctgggtctaaacgcagggcgttatgtttgctaactatgtactctgccactgagtataccccaagcaccaatgagattttttaaattagcattgatgacttctataataagaagaaatatatttgaacattaacatgacatcatttttgaagatttttcacttggaaatattatctaaaagagtttagtatttgtccttcccttaatgtcaaaatcatgatagattttttttatttcagtcttatcatttttaacttaatatataaaaagtgattactacatttaaagaattaaaattactgatgttttatagtaattcagttacattccagaattaatccttgaaatcaataagaaaatacactttcaaagagggtgaaacctggaattataaatctcaataaatgaacttcattttaaaataaatataatttgccaaatcaccaaaaagcagtttgctaaagtgctttctataaaagaaagtggaaaagtatagaagttgtgcatgttatttttatacatgttatttttcctttcatgtttcttcaggccatgtacatgtgcatataatatagaaattttcttttgaaggaatatgagttatcctttcagaaattttttagcatacatgatttttaatattttaattcaaaagtaatttggcctggacaggaaatcaatatggtatttttttctataggcttattcttgtataaatatatttgaatactatcaaggcttcctggcgatggtcctgatgtaaatacaagcatttgaggtagtgaaggcggaagtgtgcatcgcctgtgcagcttgtggatgacctaggaagccaagcctgtgctttgccacctcccggacgtctgcgctcacctcagcagcagctcccatgttagataggaacactgttcaataataagttagtttaatctgaagatctcctatagttggtaacttctgtctcataaagtctctctgcttttccacctctcatactggctggagagaatgacccgcacactcaggattcgcatagtcactagatgagcttctagtgtgagggctgctttaaatttgaaagaaattcttatagtcattaattttctaatctaacagaaaggtagaaagttacatttagacattttatcatcctttacccctccgcccctgttatgttcatttttagttacaaatgaactatgtttattcgttacagggaaaagtgattaataattaaatatgtagcagttaaattccatttctaggtgtttacattttaaaatatggcacactttgaatttttttgttttgtctctttagaaacatatatattagtcatgtcatcccagagaaaattgtatccctttttactagtgactctgtactttgaaagaattccattttaagtgaaaatgaatataattaaataaaacacttaaactaaattttctcagacttctagttgaccaccatatactatctaataccagaaattacagttttcacatctgaaatgtttagccattccaattttgtaagattacctacacatcagaacagaagaataaaatgcagtataattttagcacatttttcatatgttagataaatagggggcttatgccattccttaaagtgcattctaagtaactgactctgttgtatgcttttctggatatttcaatgcagcaataaatgtaaatagggtatacaaaaccagtgtcatttgcactagctaattacagttaggatcaatatagtcttagaagtcagctcagccatttgaaggcctctttccatgagcagtgtctgagccagagctgggttttgacgttacgcatgcttctgtaattaacaagttacgctggcagtaagatttcaaacactactctcacttaagtgactggaaatctgtgaatgacttaacagattgacctgactaggcttgaaattcattgatagtttaactccctcgtgtattagaaagtcaagagagttatatgtagacttgtacatctgtaaatatttctccaagctgtttgagaattggcctttcagtaatattagtaatttacatgaagaaaaatgctacaaagtttggaaggcattgaacaattaaaagaaagcttgaatagctattatgtaatccaaatatacatatatgtatgcatgcatgcatgcatacacacataaatgtatttgagattaagttatacattcactttagctggttttccaacatatgaattgattctttttcagaaataagaattattttaatgtgagagatcagaaatctattggtgaaaataattcatacatacaaacacattcatcaattacagtaaggctaccagaatcttttgttttgagacaggtagttcctcctgcctcagcctcatactgctgggcttgcaggcataaactaacatgcccagctttattttcattgcttgttttaaaaactgtgtatgtgtgtatgcatcatatatgctatgctgtatacatgcacacaaatttaactgaatctactagatataaatccatctttataattttgtaatgtctgatcttataaatacccacctgaggtttctgcatattagtttccttttatgaggctagtctgggctgaccttggattactggtgtcttgcttcagcctccaaagagctaggattacaggcatagactatcattcccagctaaatgccttcataggagtatgcttgtatgcagatatttgcagtcaggagcactaagtttggggctgtgttttttaatttcatttataaaatatgtctccatttttgtatgtcttagatctataatatttcttttgttttatagttatatatgtttttttaaagaaaaatatgctttgaaatttggacagaagggcaggcttgccaatgagttaatgttctgtattacaatataaggaaaagaatgccaacttaaggttgtgctctggtttcaagtttgattcctttgtgtagtatgtacacagaggttgtggttaaaatgtttaactcagaagagccttagttgtgtatctgaaaatgagtggtagtgcccacaggacttgtgagtatgcagtgagatggtcactgcagtgcctcacagctcctcataaagcaggttacaccaggtaagcactgccagcgcaagcccatgggcacctgcacaagaggtgcgctgggcaatgtctctgctcaaggtgaggctgtaatgacctcttgtagcctcctaacaatgtttcctccttacagttactgaagttaaatacagcgttcttcttttcttactatttatacttgtcttacttgtttcaaaaaatgtaggtgagtaacttcttttttttttttcttttttcccaagacagggtcttgctatgtagcccgggctggcctggaatcgctatattgcccaagctggcctggaactcaagatcctcctgcctcagcttcatgagtgctgagattacaggcgtgcgccaccacgcccggtttaggtgagtaactcttaattaagtactgcaacaagttattttcttaatttgatttaccttaacatcagcataaacatttaagattatatcacaaaagatttaagttacttcctttcctataaaaatgacaaagtaaagtacatttcataataaaagtgcagtgcacgtttagactggctttaatctccaccattaaaggaagcaaagaagcaagaaagggaggggggataagtaatgacatcactctaaaatacctgaattatgctattatgtgcataattttaacagataacttcaatgtcctatgactagttactgtaagcaaattatgtaaatctttataatgagaatagtatgaaatcaaacagctcacagtaattatagtgctttatgcaaggaagagagggatctttttaataagacaagaaaggaaaccaaataatataccagggatttgcacttcagataaaactagttgtgcctgcacatgaccgataccagaaatgagccagagagagtcacaaactagaatagcgtgagacctgggtgagcttcgtgtgtgcagtatgtacccttggaagagcattcctagtccatgttccttattttaagacaagcaggggctaagacagagtgtattataaaatcagagacctgagctgggagcactggccggtcctgggtttgattcccagcacccacgtggtgcctcagagctgtctgtaactccacttccaagggatccatcctcttcctgcttctgtgagcatcaggaagatatgcagacataagtgcaggcaaaacacccacacatataaaataaattttagaatttaagaaaggccattactttattttttaaaaaaagaccatttacttcctaccctgaaggtaggtccttgaagctgtgaacagtattctagtagaataagcaggcttgagagggaagttatatggggttctaatcaaaattaaaagcttggaatttatttgggtccccctgtattaactaataaatacaatagagctatggttctgatctgtaattatcaatggaggtttatgtaaacatctcatatggttggaagatatgtatttagcatgatttccatgccttacagtctaccccaataaacctgcagataaaatatctgtgagtttacacatgtgtgtatccttttctgtcccttcccttatatcctgtctccacaccctcctcagccctcccctacatcaaagcttgtggtccttttccatctgtgtactaaaaggttcctttgtaaagcaggccatttgtccgtcattgtttggggtgcaaacagtggtaagataccctgtcactgatccgtgtgctgtgaatggcagctcctctctggacagttggtggggggctgaggatattcctgagaggattatttaacctttcaatttagagggcacaaagcctcgctgattaatgaactttctgatggttgccgataagcggatctattgctttatttcctctaaaagtgattccttctcctgtccatattactataatctgaaacataaatgtggcaaatagattaaaaaactgcactaaagagtttatctggctggcaaactgaaggagctaaattaaaattggtaatgacagcagtggctcagcctcatatatggtttttaaatgcactgtgtattttgaagagacttattctccagcttgcctggtaatgactgcttttggtgcagtatggggctggcttctgttatccccacctcatgccccccccaaaaaaaaaatgagttgtgttatctggatggctgcagacacatacgcaccccctttctcactgcatgggcagacaaggtcgatagcattacaaggtatttgtggcagtgcttgtttcagttttcagagctgccagtttccaggcagatttgaattacaaaagaagaagctggcatgaaaattgaaaggttttatcggctggtctgaagcctcatagcacattgcttatttatgcagtccatttgcaccaggaaatataaaaaggaaatacatttttaaaataaggccataaagacccagatatgtttaagatggcaaataaaatatagatacctataatatctttccaggaaacgattttcacttaatgttacttcagaagagcagagcatttatgttgccgtcataaatgtgtgcgtctgtgtcactatgtaggtagtctctggggattaagaaggaagccctatgctaacttactttaaaattaaaatagacggagggatagctctgcagttgaagagctacattggaaatatttaaatagggtggtaaattaaacttaaactaacatttttgcattccatgtaaaattagctatgggccagtgaataaacgctgctacctttagagaaaattgggatgctttttaagcctagaagattgggagcatctggaagtgcagcgctgggctccttcctgtcttgcatatgctcattgttctccagttctgagcttttctttttgtttttgttgttggggtttttagtggcgtgtattgtttacagaaagattagaaagtggtcagtttaatagttccctcttacggaacttacgcttttattttagtctttagatatatgtcttttagatatagcctattgcttttttaatgtagtaaatatgtaattacactattaaaatttatgccagtaacatacatattcatctttaacagtctttttgcttaccaagaaacgatacgcccatgtaataaactcttgattacattaaatgaaggcataaatacgtaagcacttggtactgcaaggccttgaataattcctggatttaccaatggacatttgcaaccgttcaacccatgggtttgtaaaactcaagtatgtctaagagagagggagggagggaggaagctagctgtgtgttggaaatatcagatcaataaaacagcactcactctgctgcaattcaagttaacattgttcaagaatctgttttccagtaaagcaaattactctcagctaagccataagaagtgcagttttttgtaaatttcatttttgccagtgtctggggccattctcatattttcctgacctcaactaattacttcatgtagttttttttttttaagcagaaaactatcaaaaaacatacatgtctgctgcatgctaatgatgtgctgtacatttcttatgagttttcataaggatttttctatgtagcatgtgtggcttaatgatgtaatcacctgatagactggaaaatgcgccaaaacagacgttccggtctgttgtgtacataatacatatttcagaaatctgcctaattaaggaattacccaatgaattgggagtctgttgggtatatgacatagttttaatacattaaaaacatatgtatattattatatatggcacttagaagagttaatagcaatgtcccctggaatgcagtagagttgtttttctcagtaagaaaaaaagtaaagcttacaaccttcataaaggaagcattatcttagcttggggcaaaaatttcccccagtattcctcaaagaaaagtaatgctgtaaatatttatcagaacatggaccaagagaaggccttttccaaaaccatgatggacagacacaggcctggagttgaggtcacgggtggaggagacactgtccagagacaccaagagcagaaagcgttagcctgcacgctgccagtacctgaggtcccagctgttgttcatcacaaactcaaccttgatttctttttttaaaaaaattatatatatatatatgtatgtatgtatgtatacacacacatatgtatatgtgtgtgtgtgtgtgtgtgtggtctggatgctgatggtctagctattggtgtgtatgttctgaagatgtcagaggaaggctaaaggaagcacctgctcttccaagcctactcgctagaagctaaagaaaacacagagagctaacaaaactcaacatcactaccagtaaacaagtgtattttaaattcaaaccttttttgctcaaatatcaagtacatgccagaggatcactgcagctaatggaattcgaatatgagtgcccctttagtttgggataacattttcttgaggaaacctatttaattttgtgggttaggtttttaaaatatcagtattaaggaaggggttctgatactaatttgttgaaagagtaaaattatttgtaaatacttggaattaataaggtacttcttaaatataaatatcacatcaattttaagaagtatacatatgaaagattttagctaatctctgcttttctcaatgttatatttggttatgaatatacatttaccttagccatttaatatgctttttaaaatagttcatatgaaaactggcttgataagtaaaaacatatgttctgttctttgagcatatgtatgattataaaaataaatccatttttcagtcacaagagtagcaaattccccctaattagtaaaattgattacatatcctgtatagtaatgagcttcaactagatgttagccctcattggatcaaagtcagtttagctaagggcagcccaaggtcacagagggaggtgcccagcaggtttattagcataaaaaattactgttagaccgaggacactgaggcagcgctagcattttgatctcttggcctttgtcatggagattcttagtagtgaagggagtaaggccagcgtcccagataatgattaactgttttaatggcattcattcattcattccgcactaactattcatgcagaaaaagggttatgtaaagtgacattagaagaaaatcatctgtaatggttgcatcaggctgcactttgaggagacattaggagtaaatccatggcgtggtgggctcatgctttatcttctgatagttactgagttactggtgcatgaaaagctttcagcagtgccagcagatgggacggacctttcacaggtaatgctgtctaccaggttattactgctatctatcgatagtagagtcatctccaagatatcaccctacaatatagattatttaaatgtctgtcacacatacacacacacacacacacacacacacacagcctgctttcataaatagttcatttggtagccattgggtcaaagtctttagatatattttttacttccagaaagtcttaacaaagctatattcactccctcacctctatatctttgtcagtaataccagctcaaatgacagaacctggaacctagagtttatcagctgacatagtctactttaaattggacatttgctgttaactaaaaatagagaaataaatggaccaggaatggtagtgtacatctttaatcccagtactcagaaggcagagacaggcagatctctgtaagcctgaggctagcctggtctacatagtgagatccaggacaatcatggccacaaagtaaaaccctgtctcgaagagaaggggaataaaaaggacatgtataaggtagtactaatactaaggtataagttttgggtcaaaaatttctatttccaatacttgaaatagcttaaagatttttatttaatcttagtataaaaacgtgtccagtggaagtcattattgagtttctgctactgtattccaatacagtcttctctaattaggtacaatctaggctgatttcatttctattacgtcctagtacatgctagtttattagaatgagagcatgtagatagcgtttgtcaagtcatttactaattaattattgtgaaacagtgtagaatttcataacaatataaatactgctgctatttttattagtaataatggaagtttttaaatagtgacattattcagttgaatgaacatcaaatgtttatgctccatccagagcaataaatgaacactgaggctgtatttcagattattctctaaataaaataacaaccgttgatatgaaacatgctttgaaatcttgactaagaagtatctcttcatctcttggactgaagcctgagttcctcctctctctgcattaccatttccctcttggttttccaagtatgtaccatgtattctcaacatgaagtatgaaaaacaccaaggaaacaatattattattatattcaagttttttaacctttcatggcatgatttttataggtttgcttttgaggatataaaagccaatagtttctcaaacagtatctaaactgttattaacaatacccacaatgcaacagtttttctatgagctgtgtgctctacatctatagtacctcatccttcactcactgttgactgaactctcaccatatgaccggccctcttccaggaggcggggccacagggaacaactttctccttgcctggtgggtaggtgaggattgttggtaaggtaaactatttagtatatctggtgcggcatgtttggggtcggggcttgtttttcaaagggaaggggaatagggagcaccaagtggaggccttactaggataatgacctctttgtacctggagaactttcccagtgtggagtgcatggtattaaactctcaatagaagaaagtttgtgtagagtgtccagggaacatcgaagaggccagtgaggcgataagacacaaaaggcatgcagggaggaaggctgtgacccactgaaagactctaggacttagtgatgagaagagaagctgttacaggagtgataacgctctgtgtcacaaaccagaagaatcatcttgtattgaaaataggctgcaaagaaagaaacatccagaccaattataaggctctattaatcatataaatgtgaggtgaacggtcagatggtacaggtggagtgagagagaagaagtggatatagcctataataaagccagtataaacaagagagccacgtttaagcatagtagatgtgtgcctttttaagaggacatttttttctgggggttgactgttcgttcctcttatcatcacctacacactctgctaagttgccaactggttactgagtacctacctaccattagcttccaatcctttgctagctttccatgtcacttaaaatatggacagagcatctccaccttcggttttacaattttgggtgactgaccccctcctcgccttctaaaacctcttcttccactctttcatctactctgtctcaaggtactgaggttttcttgtttgtttgtttgggggtggggtgttttaatcctctaagagtgcaggcctgttgcacttgggactttgcaaagagtagttgtgttggtcagttagcacaattacatgcctgagtttttttttcagcattaggatctccatcagcaaaccagtctcaggcaccagctgtgacttattcactgtcttattccagtattttgtttatacaaacgtatatatgtatgtgggagaaaaggagtagacatggggagggagtgggttatctcttctctcactggaaatataagcagtgatttttgtgttgctgacttctcaaatatcagaccttaggacaatgtctgacatggattctgcagttactatttgtaatgaattgctgaaaatgtatgcatgcactcatgccatatgctcaggactctgacagacatcactgtagaaccatccgtggacttgtgttctgttctacctgctcccttccccttccattcatggccaagttcctttgctgtctttgtacttaagataaactcacagccaatgagtcaacagttttccattacctacaattccctgacttctaagtccactgtatttcataggctccatcttaggtaataatacatcattaacctttttcttcttcttcctggtttttttttttttttttgagatgggtcttctgtagctgggagcttgctgtgtaattgaagctggccttgaactcctgatcttcctgcctctacctcctgaatactgggatcacaggtgcgtgtcaccatgcccaaaccatgaatagcttttaacagctttgtccttaaaaaattacaatatctctttgattttgttttctttctgtatgttttgcagttgtatttcctattaaaacaacagccatttttttggataaggaaaaaatatttctgtgtaataatttaataacttctggaactctaccacccaaaggaaagccactgcagtgacacttgcctatacacatgcatctctgttaacgtctatttagtagttttgagaatagtcgtgtttttcttgtatcctagttggtgatagctgaggttgtaaatgctgttatatgtaccaggatcattttcagcagaaaaggctggtcaagttttatttttctcaaatgtaatgatgaatcttattaacttgattaaattaatagcaactaggagcttactaaggcatgcctttagttgtgtctgaggggcagatagttggggtttctaacctaaagaatggtttattcaattaatagagtcaaatctgaatagactgttgggaggtggagaaagtcagtaaagctgagaaagggtgtgtgtgctcctggaggttctgtgctgctctggcatcctccattactgctctgtttcctgtctgctgtgctgtgagcttctctagacaccttccctgctgtgatgcactgaagtctctgagactgagcaaagtacactgtctcccctaaggcctatgtcagtgctccatcacagcactgggcagggtaaccagcaatccagcttttcattctaagacataagagctacagtacggtttttttaaagattcttttcttatctatacactatttttctatatcaagaactcctctctcacctatgcctgcaaccccaaaccacctgattgcagcattagataaaatgttagtaagcagactagcgctctattacagaaactcagtaagcatgagagagaaatttaccaaagtgcatacagaaaagggaacaaataaagatggcattttcttcttctcggttaaatccactaccttcttgagggtctgctctggcccctgtctgtcctctcctttcaactctccctctcagctagcctcatctggctgctcccactaaaaatgccaccaaccaactcttcctcctaagcactgtccttttatcctgtccttccttgttggtgcttctcaataatctatgcctgctcccttttgtcagcttatattcagtgtagatgctgaaaatacttaagatataagtataatttaataaataagctgcatagctttctccacatcccttctgtccttaccctgctctctgccctcccaggttctcacagggaggccccatggatggtcgaatatgagatagctgtgcatcatgttgctaggtttctgttgtgcttggcagtgtaggtcagaccctccttgaaagtatcctttaagtcctgggctctgtcctgtgtctcctcagccctgaaccatcccttctctgtcctttcgtgagctctgtctgccccttacatgttgtttcctgggctctatcatgagcccaccctcactccactccactccactccactccactctaagaagcaatatccctaaggattttcttaccatagagttcttttagaaaggatgggcttttagcttttcctctaatatgtattaacttcttataaatatttatgttgcagaccaaacctggaccaccaaaaaagccaaagaccccttctggacaatcagcgttagtgtattgctacaactgtgcacagaaaggccattatggacatgtaagtttgagtagcatttgaacaaaatgcatcttgtcagggagtggttgctgcaaagatgatccccaaatggatgtaacttggaacacttacttgtttatccgctactatctggtagtaagacttgaattttcaactaatttacttccctgattcctaccaacaaaaactgacaaagcatagtcctatatgaaaactgacaaagcatagtcctatatgaaaacaaatttagctcctaaaggtagtgaggcagagtcagcagcagcatagaatgaggcctggcgccttgcgtggccttttactgaactatttattgggttttctgcttggttcttcagccttccctggtaccaccacactcacttaagtttttgttgttcacatgcgagtgtgacattcagtagaaacacagaaattgtacagctgtggctcatacacctactctccaattcccttccggccaatactgtgcaagtcgagactgaaaggaccaggccgtgtgatgggtataagaagagaggctccctactgtaaggtggtgaatctgctctagctagttgccacagtaagcatgaaacagcagctcatccgagctgagacctagtagaaataggcttcacacccatacactgggaaccgcaaagttgacgaggaaagcagtggctcagggagtagaaatccttgtgcaggggattcctgttctccacagaagctctaacagcctagaaaccaaggcaaacatcaaccagatcccatggagtgaggacgaaaccctgcagaggctcaggacagtggtagcagaggcagagtggccagtgtttcagactacccctgaattccagctgtggtgcctttctagtacaggccttgggagtcctacagaaagagggaagaagcagaaacgctgagacaagaaaaagtgctgagtttatcttctgtgctcaggtagcaggaaccaggacgtgctgggtaaaatataaatgctaggaatcggaatgcgcaggtccttagtgtaatctttactctgtccgtggcagctagatgacctaactactgtcttcccctttggcattcagtctttgtcttcaaagctaagaagttgtacagcactgacatgcagatgctgtccccagtgtggtaacctcactgtaggtagcgaggtcctaccggatacttggcattgcctttgtagaatcctcactgaaaacctacctagagaagagtcttgcaggaaattaccgtccccaggcttctgttgtcctgtgcacgcctcctgttgccaacgccttttaggaaacacacatattagcaatccactgccacacacattacacaggtgcgtaatttatatgcttgcttctctccttaaagcaaaagagtatactttagcatttgtgttcaattaaagaaaaacagttacagttggatgcttcctgcttactagtcactgccgttaatgtagatgggatatcaagagcatttagaatttattcctgaaatctagagttagacaaatttcaatttacagtaaaacaaatttggcagccatagttgaaggagctctagattatccaacactaatgaagaagatcattggtgtggctaatccagaacagaagataaattatatagccagctatcaattatctgtgttaatggaggagaccagtgatgtggataatcaaaatataatttacatgtagctttggaaaacatttgtgatacgatatagctctgtgtagttacatccttctagatagaacagtatccaaataggaggctaccccagtagtgaaagatgtccaagctctcctccctgtcagtctcagagattcagccctcagatgttgttattgaatcacttcatattgccttgcctaactccactcactctggctagagaagcaaggatagcagtaggcactgagagaaataagatgttcaggaggatgtgaagggtgaaggtgctgagagaatcaaaagggtctgttgtcatgggtaccaacttagcatagcaagatttctaggattctgatataatcataacttaataatttattgatgagtcagctaaattctatgtggttatttcacatgcttcctaaaagcattctgattttcttaagtacttagttaagaaatgctgaacattaggaaagaagtctcaggcaagacattagaaggcagataaggtcgtagagaaagtctgaaaagggtgtttccggctcccttgccacatctgttggtgtcacccagtgtatggggggatagttagagccaaagggcagagattgggaaagtcagtcacaggagaaacgggtgaaagaagtgacctcagagtggctnnnnnnnnnnnnnnnnnnnnnnnnnnnnnnnnnnnnnnnnnnnnnnnnnnnnnnnnnnnnnnnnnnnnnnnnnnnnnnnnnnnnnnnnnnnnnnnnnnnnnnnnnnnnnnnnnnnnnnnnnnnnnnnnnnnnnnnnnnnnnnnnnnnnnnnnnnnnnnnnnnnnnnnnnnnnnnnnnnnnnaagggaatgggcagagggaacaaagaatattctcaatacacagtatgtaccataagacaaccttagtttaaaaaaaaaagtcactgtcccagtaactaatgaacgtggagttaaaataaactggtgtatgtgtatagagaaaaaaacagcagctcccagccacagtttgaggctagggaggataagggcaggaaggagcatttgctgtgaagactactgaaggcaacagacaagaaaggacaaagaattcacataatgctaaaaactccagctgagtacaggaaaagtcagggtggcacccacccctccatgctgttaactcaagactgggagcgggccttggcaaaagaaaagggagaaatccagggcctgaaagatagtataaggacatagtagggcttttggattggctagtccctttccatggtaacaaggactaattcagcagccactgcatgccatgtttgtgggtgggactcactgctaatcagcacagaccagaagttcatgaaaaggtttattgatcaatgcaaacttgtgatgtcattctttcaaatacaattgcaggaatgtacagagagacgaatgtttaaccagacgtttccaacatctccattcatatattgctatgatggcaaatatgacatccagcaaagggatcggagaataaagcgaaaagtcaaaggtttgtcattaaacttctgcttacatcacttttgcagcagctccaaaaagatctttttatactatctttgcctactttggaagtcactggttagcacagaaaacacttaaaaaaaaaaaaaacattcattcattcattcatttattatatatactgtgaatcaccatgtggttgctgggaattgaattcaggtcttctggaagagcaggcagtgctcttaactgctgagccatctctccagcccctgaaaacagttttaataattataaaaactaaaactttcttgagctccagaaaacaaacctctactttaaaactaactcctatactgtaatctattcacagttgatatttttctcagagagagcatttcggaaacctaagaatgtttcatctgtctatgcagagaggtaaagactcctttgaaatgtttctacttgacaaataattatctcccctttgtatatcaaatattttccacggagcatgggtttctggtgactcctggggcttaggctctcacggttcaccactgcaagtggggctccaggtccattgccccctctgtgcctcacctagcctcagaggttcagagcactgctcctccagaagacctgcacccacatggtggctcccagttgtctgtaatgccaacttcaggggatctgatgtctgtggcctccacaggcaaacacactcaagtgcatgtacctgcatgcagacatacacgcctacagataattaaaaataataacctaagctaataaatgaatgattttttaattttaaatccattttctctgcctttgctctttcttggtaaaatcaagatgtgttcccaaggtttccttcaccgttgatgataaaattgttatgtattttttaagcttttctctgaaatctttactgaatcttaccatttttaactttttttcttttggcttgttttctcttgagtttaggcccttttaaatggtgctactcatctgtgtggcacatattcctagtacagcagagaaatgagaggacatgactgacgagcgggctcaatgtaagattgccagaaaagctgagctgtctgctctgaggtccagggcctggctgtgtgctgacagtgagcattgataaagtatagtatgagaaaagtagttgttttctttttagctaggtttgacactttgaggctaagtttctcccgaccacttctgtgatattccaaggctccgttagtctccacacctcaccttagcccgactgcttctgtcagatgctcagaacaacttaccaggtcccaccaagatgcaccacagcagcaggtggcactgaaacctctgagctatgcacacaggagtgcacgcatacagagaacgccccacccagcagccacctctctgtaggaataatatcctgggtgctacgttatcacatcagaggagaaggccaggctcagcctcagagggtgatggaaatgtcatatgaaaccgtgcaaaggccatttctacatcttgcttcacctcattttctcaggctaactcttccctggaggaacttgaataggtcagacatccctgctgctctggtcttcattgtctaacattgtaaaaaatattttgaatagaagaaattataataatattaataacggatttggaatgtgtccccatttttagcagtatggattataaggagtaccatttgtccacgtgcctgaatgtctgctgcctctctctgctaagttatttccaagaatgcaagaactctgcatgggctaaataggcaaaatacttttatatcttacagatctcaagaaaaatggagactttccaaggcagttcaaaagaccacatgtagaagagacagataagaggcgccaccacgatatgagaaaaagccgttccccaagaaaatacaggaggtggcctcgagaaaataaagaaacacagaaagaaaagaccaggagtagagaaggcaagacgcacaggaggggtcaccagcctcggggtgaggatgaagacttccccaggggctcaaaacccaacgcctctggctgcgctaacaaccagaagccttctaagtccctccaccatgcatcccattaccacaggctgagagaagagcggcttctcagggagagcaagcggagcaagccaaagaaaaggaagagtacagaggacggcagccatgatgatttgtttcttattaagcaaaagaagaagaagcctaagccgagtggtctctgacctggtctccgcgcttcagtgtcctggaagtgcttaagtacctgttaatgagacgctgggattgaatgctgagttccggccatgcctggagtggctgtacagagaccacaaagagttcaggtctgtgtccacaggctgttcctaggtaggaaggcaaacttgaggtagaaaattgtcttttcatgaaaacctttttaaatgctttggaaaaattacaagctcatcagatgattttatctccaatgtttgaggacttaaaagctcattggaagaaagtttattgttaagaaaagtcatcacttttttagctttttttttaagaacactggaaaaatcaatgaaaatccaagcccggctttgcttgcatcagaggctgttggaatctctctctgtacagaacagcatgtaaaatgaagctgtcaccattgaattctggaggaggtggaggagaggacatagcaaatacacaaacaaaatgtgcgcagtgtgggcttgcaggacggaggtgtgaaaggcatcctcaaacttgagtgcaatggcagggacattttgttcgcactgttaacagccatagttcaagagacagggatacataccatcaacctaacttgtcctcgtggatccttttaaacacttcaacgctctttagaatcttttgtacttgtgagccttttttacccttgtgaaagcctaatgttagaataagaaaaataaaatgcctgaaaccatgtgtaaataaatgtgtttattgttacaaaagacaaagagagctcgggtaccagagagcatagttgagtagacaggtcgccacagtcacgccttcttcacctgtgggcatagagataagtctgttttctgttaagggaagaaaagaaaaagaagccagttcctgggtctttatacccaagagtcaggtgaaaattgtcactagttcagtttatcaacacaagggctctttgcatacaaggatgaagaagtcaccagagggaaaacccaaagtctaaaacaaaacggctctgtatgatcacctaagatatggcagactaagctcttcttgcctctggtccacttggatcacagcagcctgcagagcctgaaccaccaccattagtgtctggcagtctcagtatggagacaagccagtctcctcctgccttggggcaagactgccagtggaccatgctactagctatgcctacattagtttgcagcccttttttgtctgtctgcttgcttggtagaccaacattacataatcattttaagggggaaaaggttacaggcgaaaattaaaaaataagtgattttacccacagacgtaaaattcttaatgaccaaccctccagacttctgagtgctttgttatttcctcatttcctgttgagcattctgtaggtctctgattttactatttttaaatctatatcttctccatctattcacctgtaataaaaatggaacttacagatgagaacatgaatttatttaatgaaagtttatacattgccagaatgcttgccccgttttcctagtcattaacatggtatgttatcattcctttttcactttgccactctgaggggcaaagaatcatcctacagggctgctgtggactctgtaattagacaggggtagcaacatgacagaccgtctactgctgagaagaagataaaacccatctcaaagaaggggggagcctgggggtaggaagctattctgatgagcacttttaatataaagcaagtcaagtctttccagataagcaacccccagacacaaagctggagaatgttaaaaggactacgagaatatctggcacccaatacagtaactcacaatggaatactactgaaaataccactcatctatcaacaaaaaacccacgcgcactaaggagtcttggtctgtagctggatcccatagcctcctcgcagggttttctgttgcaatgttggtgaaggcagccattgaggagaattttaaagtgttacctcacatctgtctcccatgtgcagaacagccccatagtgtctgaccagatgtagccttgtctactatgcttggcctttcattacattaccagtgtttgagacatgtgctgagcacatcttactcagctgaaacaagcagtggtcctatgacatgaagatctgtaggtaggcctctgtgtgccactcagccatgtaaaggtatacccataaataatagctacaaaagctactggggatgggagggtttacagataagtgctgagccgggagtgttctcggggtttaaagagcacttgttcttgcacaggacccaggatcagttcccagcacatacatgtccactcacagccatctgtaactccagtctcaggagatctgatgctgtcttctcacctctgagagcaccaggtgtgcacatggtgcacatacatacatgcaggcaaaacactcctccacatacgatattttaatgaaagacaaactgcaaaatcaggtattggggataagtgaacacagaattgtgaggtgggaacgaagtctgctggtggaagaaggaaaggtgaagactgtcctgggacatggataaggtccctgggatctagacatgatggtaagtgcctggaatcccagtacccttaaacctaaaggaggaggaattgtggactggatgctgacctaggctacacagctaggtgctatcaaaaaaagtgactaggttatggcaccatcaccaggagaaaagtctagctcagacccaggtcttagagtaggtatcaccattttaaagaagcagccagcggttggaagacaaggtctgttggtcatgccatgctgagccctgataaagctgctggtttgtaatttgggccaaacattttcattctcttcccagagagaacagtgctgctcatgcccaccatgacaattaccaagtcagaggctttttaaaattgtgcgttggtattttgcctgcatgtatgagggtgtccgatccccctggaattggagttttaaacagttacgagctgccacatgggtgctgagaattgatcccctagaaagacgacaattaagaatagcttaactgagcctggtgagatggctcagaggttaagaatactgactgctcttcaagaggtcctgagttccattcccagcaaccatgtcatggcttccaaccatctgtaaagaaatcttaagccctctcctggcatgtaggcatacatgcagacagtgcactcctacatcaaatttatatatacacatgtatatatatttcattacatatatattatgtattttttattatgtgtgtgtgtatgcttaattgttctccaacccaaagacttttaaaaagggatggagcagacatttccaagaaaacctagtgaagtagggagagtgagagctggagtccagccaagccgaagtagctgcaggtggcttaccagaagagaaggctgcagagccaacctcagccatccacaccgtgtgtgaggagctccttttcccacctgcgtgggagccatgggcaggggctacagcactcaggagagctttgcttcagtggaaagggaaatatagctaaaggtttaaagtattctgtttcttgtttaaaagcaaaaccgggaaggactggggatgtaactgagttggtagagggcttgcctaacatgcacaatgtccctggttcaagcccgggttcagtcacaattggtgcacagctataaacccagcacttgggagggtaaggcaggaggatgtagagctgtagaccagaacttggactacacagtaaggtcccatctcaaaaaggaatgggagacagctgccccgcccgacgagcaatgcaataataaatcaagtcagatctttacagttgcagttaaaaacaccagaatctcagggtttctattgctgcaatgaaacaccataaccaaaaagcaagttgggcagtaaagggtttatttggattacatttccccagcgctgtacatcattgaagaaagtcagggcaggaacgagaatggcaggaacctggaggcaggagctgacacaggccatggaggatgctgtttatggctcactccccatggcttgctcagcctgctttcttatagaacccgggaccaccagctcaggggtagcaaaacccaaaatgggcctccatatcaatcaataattagtaaaatgccctacaggcttgcctacatgttctcagttgatgtcccttttttttttttttttcagataattctaacgtgtcaaactgacataagaccagccagcatgactagttaccagtaaggcaactcacaatcaaatactactgaaaatgttaattacagtagcaggaagcagagcagcagctgccaggagccaggaatgcttggtagaggcaggagaagggattacataatctgtgtgtgcgtgcgtgtgtgtgtgtgtgtgtgtgtgtgtgtgtgtgtgtgtgtgtgtgtgtgtgcgcgcgctcgtgcggggatgtgtgtgtaatagcttcaaaacccgaagtttaaaaaaaaaaagtcactttcacagattcaatctattgaaaacaatctggaaaatctggttgaggtcaaggttcattcagtggcccatgagccatcttcatttttgtttcttcctttgctgtatagagccagagggaagctaggattacaaggccggtgtccaccaggggtctggaagtctgctcactggcctcaagcctcagcagcaggctccttccacaggtctcgtcttcagcctctgcttattcacataatgcttattatgtgaataaacccatgagatgacagtgccacagatgaggtcttaaatgacagtcttggctcagtgccggtgaacagtgaccccgtaagcactcagcactcctcaaaagtgggttttggttgccagggcaagccattactttcttatccacccatacagcacccagaaaggacttctcattccctgttaactcaagcctccaacagatgcaccttcctctggcctcagcataaccctttacggctgacagggctctcttggccatttttgctatcttctttgccctcgagagacagccctggctgtttggataactcttccttctactcacggagcaaactactttgctggtctcactacaccctggcttatgcatacaaatgaggaaaaatagatagtgagagccagagagtcctggtgccaaggcaccagagaacccacaaagaactgaaaatttacaccatagcctgggcaccaatgagaatggcctatattggatttctcggaaaccaaggccatttagccaacactggagctgtgacaggtcaagagagtgcagaagttccaacaccttggttttgggggtttgagttttggttttggtgctttgaggtttttttggggggtggggggttcatttaattttgtttgtttttcaagacagggtttctctgtgtagctctggctgtcctggaactcactttgtagaccaagctggcctccaattcagagatttgcctgcctctgcctctcgagtgctgggattaagggtgtgcgccaccaccgatcagcaccatcttatattctagctgaggccatttcacgtttaactagaatttgatctccttgatggagaatcccatggaaaatttctgaactctagtctagaaacccaaggtcaagatgctacaactcgacaggcggtgttggcccacgcctttaatcccatcccttgggaggcagaggcagacagatttctgagttcaaggccagcctggcctacaaagtgagttccgggacagccagggctatatagagaaaccctgtctcaaaaaacaaaacaaaacaaaacaagaaacaaaaacaacaacaacaacaaaagctgctgcagctaacttagcttttgctaaactgcctgcttgtgcagacctcccactgtagctgcccagcaagatacaagatggggttttttgccttcacaaaccccctcacactgggctacacttgggtccctaatacctgagtgtagttccagcctgctggagtagactttcagttggctgtaaactatctgagtgaccatctctggtaggctccctgtaacacatgtaagactgaagagctctggctttctccttctggattgcaacagttgcaaatctcattactttctgcaactcggaataggggcaggcactactacaatgtactcatcaatacaccgatgaggcagattatgtcgtgccatcaggggctagagcttgtgtagaagacactgcacaagtgagcccagtgctgaaagaacagggttctaggtgtagagagggggtgaaacagctgctcacagactcaagtctctgcccttagcccttgttcatcacagaggccaacacagctaacccccagcaagcgaattaactggctggccccaccctgttctgtgtgtgacattaccaaaatggggttaactaaaacggggagatgggggaagtacttccaaacggaaaggtttgctatggtgggcctttcagaaagaaggctggaggagagaatgacgatacacttaaaagagctgtgtaaggaaataagagggtaccaataaaatgccccaggaaagacagatcacagcacaccatattccttccaagctccaagtctatatagctctgtgttgaaggagggagagacagatggagacagggaaagagaggatgcaggaaactgcttcccagtcagaaaccactgctcattggagaagcccctgttccaatgagctgtcattacctgtcagcttggttccctgccctcagatgaaatcacatctcagaacacctgctcagcagcctcaatattttgactaaacaacttcagcctagcctcaatgacaaggaaacttagaggacagtgagactgtcatcctcgtggtagcaaggggctgtggaggagagccagcttccagggagagtggaccaggagccagaaggaacctcccctgggtcttctgtggatacttataaccctggggaccagaagtgttacccatgcttagccaaacatttcagaaaagtcctccccatcaccacagtgccctggggaggggggtggagcaggactacctaaaactgaagctgtctgaatatcccctcgttcttcccagtagccgtcacctggccaggcttgccggctttcacctttctgggaagatgccagacttgtctctacctcagcctccttacatacccccatgttcttcctccacacccagtggagcctcagagacttgggaacccacaggcttcctggacaagtcatgggtcaccagccacttgtcttctgtgcctataaccagttaatcatctcccctggggggttgtgtgacagtcctcctgcacttaactgctcagggacttttctggtttctcacctcaattaaccctggcttcctgggtgactctggatccccacagcagaaccagacttgaaatcccgcctgccaggctgcatgaggcccatcttttcttgatcctttctctccatcttaataaggatgggcgagctctcagctacatcagtatttgtgacattctggctgctaacaaagctgcaaaagacagcctggtctactctgttctcttctccatgttcacacatcaagtgaggcgtggagaccttcccaccggccctcctgcctctctctgctgagcctcatcaacagaaaatggtttttgaaaaatttgacaggccaggagtatggaaaaggtttagtattgagcctcaacagcttgatccctccaaacacccactcaggtggcagatacctgtagcatccacagcacaggcagcatgaactgggctatagcgtaggggacatggaaaaagaatcagcccctggccctaacgaggctccaaactttccctctctcagtgaggtacatgagcactgccctggagtgacaattcccagagttgccgtacagaaccaaggagcagatgagcacaagggtcatgtaccagacctccagtgggaggcaagccggagggaatacagaccaaagaaacaggatacctgcaagacttcaaatttgggggccagcatccaacacttggcacctactgaggtctccagtcttaagaaactgccccaacacagcatcctggagtttggaggattttcagagattatcatcagttccagaaacttccttagtacatatgggaaccccaccccatactcagatgcagcctcttatcccacactgagtcagaggcaggtccaggcccttgactctcagtgtgggactttttctgtggctgggaagtcggctgtgggagcaggctcatcgatggctgagtgctgagctttgggaggccggcctagaagccggtgatacagaaacatcacagtaccgagtttagactgcgacatcaggctcgagacaccaaaatgaatccagtgtaaggagaaagaaagactgtgaaagtgaaatttgccatttgtgagaggaggaaactgaaaatgtgctctcagacccatgcaaatcacccgtggtcttttgtctgcacctgcgactgctcacacacacagatcacccgggggcctaggttcccacgcattctgcactggggctatgcggcaggtgggaggaacggcatctccctccacagtgggcaatcctcagatctaagcagtatttgcaggggctctgcccttccaaaggatgctgggttcgcagcagccccttctgtgggctggccaagacaacccttattaggaacaacccctgtttaagacatcattgcaggctctgtccgctcccacctcccgtctgctatcctcctgcctctctgccttgggttccgcctctagaaacctaccctcgtgtgggaatttgctcgtccctatggttcctgctggaaatacctcctccccttactctccaccaccctgctagaagctcagtgttatgctttggaggccgagcttagaggatgatgacatcagagagcacaggattacccagacactgtcctgtctctcggctgggcctcctgcctctgcactacctcgctctaggcctttgacaggtttataactgttggcttgcattcatccagcactatctcctttacctagaccagcccctacatctggacctctattctgtagacccatcccgatgccctccctggagctaaggactatacttgcagaccccagccagccaaagaaggcatccctaaagagtcgccggaaatcatacatctgcccttcttgtctcagatgtcattgggaaaagatgggtgactgtaacagaatgtctcttcacaaatcttcatttgctaagctaaacaactcaataagaccacttttttttttttttaagttcctacctcggtgccagaccttaccaggcaaggccaacacagatctactacccatgacagagataagccagtagcagacaagaggagaaactgtggtgcacagagggtgtgcttcactcgtactgaactggaagcagggaacagagcttatgctgacacaggaaaggccatccgtgtccctaggctttgtcatgtgtgggtagagcatcgagtgagtggctcagcagacaggaaggggccagagcaagcaagggctgggcagggggcagggcttcatcgtgctggccagcatggcacagctgggaaacaagttcactctcacaagcatcctcagagctgggtgagtcacaggcacccctctttcctcgaggtctcacaggaatattgattcaggatctgtccctcctgcgaagacatgagcgtatcagaggctgttcctaggccgccattactatagactggccgcactgttcttggactccatcatggccgtagcagccactgcgtggtgctcttctgtctctgggttctttagctctgaatgtctgaggctcacccacggatacaatggtttttaacttgctttgttgcaaacattgcaaatcgaggtgctaaacttggaagagtctgaactcaacaatagtttcctaatcgccccaccacagaagcaggcttctcaataaaatgagcttttatccccttcttgagaaggcttacccagaacataagcgtggaggaccacagtgtacagcaagcgccccacaccttactcagtcctcggcttaagaggccctattaaacctggggtggattttctatgccccatggtttttccattttgtcttttaatttttactttaaggacttaattttaacaaaagagccaaattaccacccagcttaaaatgaacttgtttagggaagttaaaaacaggctttagagtatggagctgtaattgactttggaaggggataattacatggcccctgtgccctctgcctcacactttgcaaagagtgaggcccagagagatcagcgggcaatggtgtgatccactgtgagcctggactcccagcctgagcacaggaccagggacatcagggcccatcagcctaggtctcggacacggcagtgccaatcagtaggcgatgggttggttgatgggatgaaaacacagacagggaggcatgagtgggcacaagagacaacggtcctcagaccacactggggtccagacttagaagtccagtgggctgcactcaagcccagcgacagcagaggacaggctggggctctcaggacttgctttgttatggggtaaagtgtgttcctgaagatgctatgttga

SEQ ID NO: 318 - DNA, 1728 bp, Mus musculus
gccaagatagataataacagatcatctggaaggtggaacaaccgatactattcagtcaacaaaaatgtcacctgtagaaattgtgataaacgtggccatttgtcaaaaaactgccccttaccacaaaaagtccgggcctgctgcctctgctcagagagaggacatctccagtatggctgtccagcccgttactgcttagactgctctttgcccatgtcttccaaccacagatgttttgaaagattgtcctggagaaaacgatgtgaccgatgtgatatgataggccaccatgctgacgcttgcccagaaatctggaggcagtatcacctaacgaccaaacctggaccaccaaaaaagccaaagaccccttctggacaatcagcgttagtgtattgctacaactgtgcacagaaaggccattatggacatgaatgtacagagagacgaatgtttaaccagacgtttccaacatctccattcatatattgctatgatggcaaatatgacatccagcaaagggatcggagaataaagcgaaaagtcaaagatctcaagaaaaatggagactttccaaggcagttcaaaagaccacatgtagaagagacagataagaggcgccaccacgatatgagaaaaagccgttccccaagaaaatacaggaggtggcctcgagaaaataaagaaacacagaaagaaaagaccaggagtagagaaggcaagacgcacaggaggggtcaccagcctcggggtgaggatgaagacttccccaggggctcaaaacccaacgcctctggctgcgctaacaaccagaagccttctaagtccctccaccatgcatcccattaccacaggctgagagaagagcggcttctcagggagagcaagcggagcaagccaaagaaaaggaagagtacagaggacggcagccatgatgatttgtttcttattaagcaaaagaagaagaagcctaagccgagtggtctctgacctggtctccgcgcttcagtgtcctggaagtgcttaagtacctgttaatgagacgctgggattgaatgctgagttccggccatgcctggagtggctgtacagagaccacaaagagttcaggtctgtgtccacaggctgttcctaggtaggaaggcaaacttgaggtagaaaattgtcttttcatgaaaacctttttaaatgctttggaaaaattacaagctcatcagatgattttatctccaatgtttgaggacttaaaagctcattggaagaaagtttattgttaagaaaagtcatcacttttttagctttttttttaagaacactggaaaaatcaatgaaaatccaagcccggctttgcttgcatcagaggctgttggaatctctctctgtacagaacagcatgtaaaatgaagctgtcaccattgaattctggaggaggtggaggagaggacatagcaaatacacaaacaaaatgtgcgcagtgtgggcttgcaggacggaggtgtgaaaggcatcctcaaacttgagtgcaatggcagggacattttgttcgcactgttaacagccatagttcaagagacagggatacataccatcaacctaacttgtcctcgtggatccttttaaacacttcaacgctctttagaatcttttgtacttgtgagccttttttacccttgtgaaagcctaatgttagaataagaaaaataaaatgcctgaaaccatgtgtaaataaat

SEQ ID NO: 319 - protein, 324 aa, Mus musculus
AKIDNNRSSGRWNNRYYSVNKNVTCRNCDKRGHLSKNCPLPQKVRACCLCSGHLQYGCPARYCLDCSLPMSSNHRCFERLSWRKRCDRCDMIGHHADACPEIWRQYHLTTKPGPPKKPKTPSGQSALVYCYNCAQKGHYGHECTERRMFNQTFPTSPFIYCYDGKYDIQQRDRRIKRKVKDLKKNGDFPRQFKRPHVEETDKRRHHDMRKSRSPRKYRRWPRENKETQKEKTRSREGKTRGHQPRGEDEDFPRGSKPNASGCANNQKPSKSLHHASHYHRLREERLLRESKRSKPKKRKSTEDGSHDDLFLIKQKKKKPKPSGL

SEQ ID NO: 320 - DNA, 256190 bp, Homo sapiens
  misc_feature (1)...(256190): n = A,T,C or G
aagtaaaataattcatggtagcattgccgcaaagacatgtcgaaactgaaaactgtagacataattcccgggtccgggacgggcagctgaagagagcagcccctctatagatgacacctaaataagccctgtttgagcatgcgtgatccttcatgtctcataatctgtggatccagggctcatggacatttaaaagaaaggcatgcctttttagacagcttctccacatgttactgatgacatgcttcaagatttcttgtgcagaatctgatgattcttaaattagaatcccaatagttttgccagtcagtattcattatatagtcacttagagctaagccttgaggaataaaattccaactaggaataataataaaaaacgggaatggtgcccttgcaatactagttccttatccctaggattttattataatgagaatagtaagtatatagtttaatttataatacatatttttaaatttcattatttcataaggaaaggcagtctccaagaaaaattaaaagccatctctatgaatgtccacattttcaagaacgatttcatagcctggttgaaaattgtgtgctctctccatcatcttgcaatttgaagaactgcaaaatcatgaataatacaaaaggatgttaaacttttcaacaaatccagatgggtaccaatgtcattgagaattcctgagaatcaccttgattgctgcttcagacctaggagcctgaattgaatatcacttaccagttggaagctattggcttcagtgacgacagtttctacaataacattggtatctatatcgtttacttttaaaattgtatagacactaagtttgtaattttggcaaataaaaaacgtccaaactttaacattcagtcatttcccttgctagccttctatttcttctcccttattatttagactttggtgcaacagaaagaatgatggactgggaactagaggccagttttaacactaacctttgctgggaccttgcaaatctcttcttcattttgcatcttagttgtcccttctgcaaaatgagagagttggactagatgtccctttcagccatgattctcgggtttccattgttccacacagtcactggatgaagagacactgccaatgcaaagactgagccgccatgagaactcatgttatgtcttgcaactcttgaggctgggtataatgtaggcctaaagtctttacttctaatcttaggtagcagggaaatgtgtccatttgtgggttatgctgctcgttatccctctaatccccgtctccccacaccatgctagtcctggatattcagagtcagggcttgtttgtcaacacagaagactcgcacacttgtgatgcttttgcttatcctgttcctttaccagaagatccccctgcttctctacctagcaaactctcattcattcttttaattttgccttttaattttatattttgacataatttcacatttggagaaaaattgcaaaatctgtacaaagaatcctcatatacctttacgcagatccccaaaatgttaactttttaccacactcctctgtctctctctccctctagctcccagaattttttttctgagccacttaagcatcagtttcagacatgatgcccctttactccaggtagttcagtgtgctcgacctgaaaaataaaaccaagacattctcttacataaccataatgtaaatataaaaattggggaaataatgttaatgcagtactgtcctctaacctagatctggatgttgccaattgttcctttaatgcggtacagttcctcggtctttctttgcatttcctgccactgacagttttgaagagataagtgccagtatttttagagtgtacctcatggttatattcaagttacgcacttttgatgtgaatgccatagaagtaatgtgctgtttttctcaatgaatcacatctcactttttaaagtgaaagtcattcttcaatctcctccattcctactcccctcctaagaggtaaataaccactgttaacgattggtattcatctagtattttgtctatgcacttatatacacacatatctatacacaggcacacttgtaccctttaaaaacataataaaatgagaacactatatccttactgctctgcaatttaccttttttcatttaagtgtannnnnnnnnnnnnnnnnnnnatgaagagacactgccaatgcaaagaactgagccgccatgagaactcatgttatgtcttgcaactcttgaggctgggtataatgtaggcctaaagtctttacttctaatcttaggtagcagggaaatgtgtccatttgtgggttatgctgctcgttatccctctaatccccgtctccccacaccatgctagtcctggatattcagagtcagggcttgtttgtcaacacagaagactcgcacacttgtgatgcttttgcttatcctgttcctttaccagaagatccttctgcttctctacctagtaaactctcactcattcttttaattttgccttttaattttatattttgacataatttcagactgggagaaaagttgcaaaatccgtacaaagaatcctcatataccttttacgcagaccccccaaatgataactttttaccacactcctctgtctctctctccctctagctcccagaattttttttctgagccacttaagcatcagtttcagacatgatgcccctttactccaggtagttcagtgtgctcgacctgaaaaataaaaccaagacgttctcctacataatgtaaatataaaaatcgaggaaataacgttaatgcagtgctgtcctctaacctagatctggatgttgccaattgttcctttaatgtggtacagctcctcggtctttctttgcatttcctgccactgacagttttggagagataagtccagtattttgtagaatgtccctcaatatgtgtttgatagttttctcatgtttatattcaagttatgtacttttgatgggaataccacagaagttacatgctgtttttctcaatgaataatgtctcacatttttttgtttagatgaaagtccttcaatctcttactcccactcccctcctaagatgtaaataaccactgttaacaattggcatccatgcagtattttgtctatgtatctatgtacacacatatctacatacagacacacaggtaccctttaaaaacataaaaatgggctgggttcggtggctcctgcctgtaatcccagcactttgggtggctggggtgggtggatcacttgaggccaggagttcaagaccagcctggccaacatggtgaaaccctgtctttactaaaaatacaaaaattaactgggcgtggttgcaggtgcctgtagtacctgctacttgggaagctgaggcaggagaatcacttgagccggggaggtggaggttgcagtgagctgagatcatgccatttcactccagcctgggcaacagagtgagactctgtcacaaaaaataaaaaaataaaaaaaagatttcacaatacacctactgctctgcaatgtgcctttttttcactgaactgtatgtctttgtgaatctttctatatctttttgttgaagctgcgtctacaggcgtgtgccaccgtgcacggctaatttctgtatttttagtagacgggggttttgccatgttggccaggctggtctccacctactgggctcaagtgatcctcccacctcagcctcccgagtagctgggactactgatgcatatcaccattcccagctaatttttgtatttttgttgagacagggtttcgccatgttacccaggctggtctggaacttctgggctcaagaagtctgccttccttagcctaccaaagtgctaggattacaggtgtgagccactgtgccaggccaaaagtggcattttttttaatagtataagtatgtccttgtttagatcgttccctactaatgaatatttgtttccatttttttctatcacaatgtttgtacatacatttaagaacatacctcataatagcgatagatgctattaaatagctctcctaacacacttttccagtttgtattctcatctactgtgcatgagataatttgcatttttctgactgttagtgatgcagagcacctattcacggcctttgggtttcttgttctgtgaattgcctgttagtggtctttgctgtgagaatgctgaattgtccgtctttgtctgactacttatttctccaggcctcactcaattctgttcctctgcagaggcttccccatgtcccctaatcagccaccaccccctcctctgctgtcccataacactgttcacaccatgcccaggccttcatttaccaaccattccatacaaaatctactcattccaaaagtgtccactgtgagccttctctgtgcttggccttgggctaggtgttgggtggagagacatgagccagtcatcatagactccatgctaaagttcaattttgaaatgcagctttgagcatagaaaagagcatgagttttagatctagacataacttgagttgaattccagcttcaccacttcccagctgtgtaattcagagcaagtcacttgattactccaagtctccatttccatactagtgaggtgaggctaatccctccctaagagagtcacttgaagctggacaagagacaataatatctgaaatggctaaaaagggcctgttacacagtaggcttgcagtggatgaatggtagttgaaaggcaactgttaagaggtcaaaatcagttagttctcagaggttctaggagccaccaataaactggaaaataaaaaggaaggaagtagctcctctctttgcaatgcaaaggatatggatgagtgccacttgcccagatcctgctgcagaatatcctttatctttcctgctctctgcagcagatttctgctttgtcttggcccctcatcccaattcagctgtgcactgttgatgtcctactgccactttcgtgggaagaacaggtgcttcccttctcaaataaatgttggtctaggcagggcgtggtggctcacgcccgtaatgccagcactttgggaggcagaggcgggtggatcacgaggtcaggagatcgagaccatcctggctaacacagtgaaaccctgtctctactaaaaatacaaaaaaataagctgggcgttgtggcgggtgcctgtagtcctagctactcaggaggctgaggcaggagaatggcgtgaacccgggaggcggaggagtttgcagtgagccgagatcgcgccactgctctccagcctgggtgatagagtgagactccatctcaaataaataaataaataaataaataaataaataaataaataaaataaacgttggtctctttagaagatactctgtaagaaagacttcaggatatttgtgcatgctgtcacccatgatttcaagaagtaggggctgagcactgtggttcacactgaggcgggaggactgcttgagacagttcaagaccagcctggtcaacatggcgagatcccatctctacaaaatgtatatagttttaaattagccaggtgcagtgtggtgatgcacgcctgtagtcccagcttcttgggaggctcaggtgggaggatctcttgagcccaggaggttgaggctccagtgagctgtgtttacaccactgcactccagcctgagtgacagagtgagaccctgcgtcaaaaaaaaaataaaataaaataaaaaggagaaatggggagtagagacagcttcaattagaaagagaaatgctgtgtatgtggagagaggctaaggtggaaagtttccctgaagacccaaaacttcagcagagtagggtgagtgggtatatgttagaaggacagggagaagggctttacaggcagtggagtgttctctgcaaaggcacaggtgtgggagggcatggtgtgttctggcaactgcccaggattcagcgtcaacagtaggcagatgtcagctcatgaagtgccttttatgccatccaaaggactctaggtttgaagacataaactaaaggggtaggctgaagcattctgagcatgggaaagcagtaaatctttgttgaatgcatgtgtgacagtgggaagatgggacatggtaattaggagtacagtcgtgtcatttaatgatggggataagttttgagaagtgcattgttaggtgattttttcattgtgcaaacttcatcgagcatatttacacaaacctagatggtatagtcaagtaaacacctaggccacatgatgtagcctattgctcccagattacaaactgctacatgttactgtactgaatactgtaggtgactataacacaataagtatttgtgcatctaaacatggaagaggtacagtaaaaatatgataaaataatcatcatatatgcagtctggttttgagtggaatgtcattatgaagcacataactattatttcctatacttgtggccttctataagttttacttagcctttctacgcctcttttctttttttgtgtgtgtgaaattggaacttaaaacatcaacttgaaagtattggtggggctgagtgtctcatgcctgtaatcctaggactttgggaggctgaggtggggggatcacttgaggcctggagcccagaagctggagaccagcctgggcaatacggggagaccctatctctacaaaaaagttttaaaaatttaaaaaataattaactcagcatggtggtgtgtgcctttagtcccagctacttgggaggttaatgcgggagcatcatttgggagataggtttcagtgagctgtgattacaccactgcactccagcctgggtgacagagcaagaccctttctcaaaaaaaaaaaaaaatccacaaagtgttgtcgaaatttaaaatattataatagatggacaggagtaatcctggcaatatatttttaaatttttaaaaaggtgacatttgttttacacaatacatattaccaaaacaaacaatctagtcatctgtgatgtgcttctatgcctgttttcttttctggaaagtggttctccaattttaccttttcatagtaccttgtccttctccttcccagcacttaccccataatgttaattaaatgttctaattcttttctggccaaactcctagactataactgttttcctagctagatgcctatctctatgagatcagtgacttaaaaatttacaacttttctgcactttctaacaccgtcttttaacagatagatgttcaataaacgttggtgaaaacaatcaaactcacacttgtcttgaggagaattgaaataggccaatgaattggcagtgtgtcattatgagaggagaaaaatagttcagagcagtctaagttacgttaaaggtatgcaaaaataatttttttaaaaattaaagatatggggtctctcatccaggctggagtgcagtggtgtgatcacagctcactatgaccttgaactctcaggctcaagcaatcttctcaccttggcctccttagtagctaggaatacagttgtgtgccaccacgcctggctaatttttactatttaaaatttcttatttatttttatttttataaaaagatttgtttttttaaatttatttttatataattttttaattaagaaaaggatcttattttaaatatagatggggtcttcttatgttgcccaggctggtctccaactcctgagctcaagcgatccacctgcctcaacctcccaaagtgctgggattacagccatgaggcaccttgcttgagctttaaacatttttgttcagacggtctcattctggagtgcaatggtgcgatctcggctcactgcagcctagacctccgcagttcaaacctcagccaggaacagctgggactccaggtgtgggccaccacgccctgttattattattatttttttgacacggagtttctctcttgctgcccagggtggagtgcaatggcgcaatctcggctcactgcaacctccgcctgccgggttaaagcgattctcctgccttaacctcaggagtggctaggattacaggcatgcgccatcacgcccggctaattttgtatttttactagagacggggtttcgccatgttggtcaggctggtctccaactcctgacctcaggtgatccgcccgcctcggcctcccaaagtgctgggattacaggcgtgagccactgcgcccagtcgcccagttaatttttaaatttttaaatttttttgtagagacagcgtcttgctatattaccccggctggtttcgaattctcggccttaagctatcctcccacttcgggctcccaaacaggtgagagctaccccattagccaggcaggcattcaaactttatcaggcccagagggacttgagtatggtacttcagttagcaccatcccatgtaggtggtggtgggggtgggggtggggggtaggggtgtgtggcaattgtttaaaggcattttgttcttttcttcccagtacctgcatcaccctttatcttcgtgttcctaaaatttgtgatagaaagaacaatgtgtagccaatggatagcttatgttattttagtgtcaattcttggtatgtagtttagcaaaagcctcttcttttttcctttaaaaattcactcgtggccgggcgcggtggctcacgcctctaatcccagcactttggcaggtcgaggccaggagttcgagaccagcctggccaacatggtgaaaccccgactctactaaaaatacaaaaattagctgggcgtggtggcaggcgcctgtaatcccagctacttcggaggctgaggcaggaggatggcttgaatctgggaggcggaggttgcagtgagccgagaccgcgccattgcactccagcctgggcaacaactgcgaaactccgtctcaggaaaaaaaaaaaaaaaaaaaaaaaaaaccccttaaggaaggaaaaaatttcactcgtagctgctacaagaagtgtaatggctcatgcctgtgatcccagtgctttgggagacagaggtgggaggatcgatacctttaagcctggagcttcacaagacaaagaactcagttgaaactgctgcttatcggatcacatattaagggcaacttgaattgatgatcccaggttgccctcatcaaacttggcccaaataaattctccacttatattaactttgcctcagtttttcctttaggtcgacagttatttctaaagttctacagatgggtttaccttgtattaaaataaggtgtgagaagggcaaatgaagccagaggctcccagcacaatcttgcaaccttcagagacttccaaaggatcagcattaactccaatatttagcaggagtgcagctcttcgagattcacaaagtgttaatctgttgcctagaattccagagagttggaggcgcccagtgtgaactgtgttccgcctaaaagaaaaagcgaccagcctaagatcatgagcgcaagggagaagcttgaagccatgcgctctcaagtacgcgtttcccgctgcccaggtctgcgggccaagcagccagccacgctggccctcgtcatgcacgcgatcagctaggctcccgcgccacgtggcactgagaaggcgtccaccgagcgccagggagaaggaggcggagcccggcctcaacctcgcccgtgtcctcatgggggttgtagttttcctcgcgggggtagagggcacgaactccccggcttttgcccggtaaatagcatctccttcgtacgagtcattcaaataatagatgcagcctaggtagcttcaagagaagttgggaaggggaagggggaaagcaaggaaggcaaacctaataattatgggcggggcagagaacggttcgcacccactacgcatgcgcacatcaggcgcggcaggtgggcggggacggaaaggcggtgactagagctgtgttgtccccggaagtgccttccctcccgggtctgcgcggacgcggcctccttacctcatttgtcctcgcccctccccgtccctctacgcgttttggttcccggttggtgcttcctgttcgcagctgcggcagtgagtatgtgtgtgacggacccccgccgcccgcggctcgggacccctgcctaccctccttcttgcccgccgggctgtggaactagcgcgtgccccctcgccggcctcgacgtctcccgtccgcccctcactcgtggcagggcgcagctcctggtccgtcacctgcgcgccgccccacgcggccgggctgcgggtctagggggtccgcgtctccctggctttccaagggctaatgccgtgattctagagcggctgggcgtctagggcctcggtgagggtggcgtgtctgccctttttatttccccgcaaggcccccagtcttctagggaagccagtcagtgaagcgcggaggtcccggcgcgccgagagagagtccagtctttgaggaccgagtagtcctgggccacctcccgcctctgctgtcagaagcagcagctgcagcagtagaatccaaaatttcgggagctgtgaccctttcctcatgtaaaacgagtagacttggactgtgtttactaaggcgccctttatccctcccatcctgtgagcggacagttgccttcaacttttgggaagagctgctggttcggtggaaaagctgtggctgggaatcaggaggcctgggttctagccgtggctcccccacggattcgctggcgattccagaaagctcttattgaagctgaatttaagattatttcagattgcacagttgaattacgggctgcattagtagggcctttttagctcagtgaataagtttctctgagctcctttctccaactataaaacgagagcgttcaatttgatgacttttcaggtcccctcagaagctcttgactttgtggttttctttttctttttaaaattttttctaggaccgttagagaaatgacttcgtgtttgaatagttaggctgtcgcatacaaagacttttaaatggattgtgtgtatacttaggaaagcgttatgctttcaggagaatctgagcatggggaataaagtcaggaaggatcgcaagtgaggattatattaatatgataattagcacggtaagagactgcatgaccgaaggaaaagggctaagggaaaggtgaaggaaatgtttccggataggattagttctcgtaaaaatcatatatatatcccaagaagagctgggacttaagtgactaaatttagcttattttttttcccccactgaaatactgtgctctgtttgtcttttgtgacttttgttttacacatttggattctccatcccaatcagatttgattcagagtggccatcgcatttgaaaaatggacagacattttaaccctttagacaattgtgtttcaactgtcctgtcagggcagcttactaagagtaagaaaaattttactttgaaagtaaagtgtattcatcacattccaatgaaaattggactgaaaatgaggctgtggatttgatttaaatcggccggagatggatgcgtgtgtcatcaagaaggaacatctagggaggctaaagatatttggaagtaaataagagcaaaaggtcagaatgaccagtaggtagactgtgagagcagaaggattgattaaagactgtgttaagtaaatgctgaaagcttaaataagccttaagttgtctagtttaaaacaattcagtcaatgaatactgctccctcttttgaatggtaatagcctttgcagttattctatagctgttttatatttgttaaggtattttaattcttagataagtttcatttgcatgatattttaagatgttatataggaaacatcttttctggtcatgggattgatagtttttgagtaccaacttgggagattcttaaatggcaaactgacaaacgtgtgttttccttacacctaaaatgtctcatttagtttttaaactctgctgggacataaaatggatatttgtgaggtaaatttaggtgttagaaccaatgcaaatattgcaatgaaggaaggtttttcttcaaaaaatcttaatttgaagttaacttatttgaaaattttattttgggccatgtgcggtggctcacgcctgtaatccaggcactttgggagtccgagtggggcggatcacgaggtcaggagttcgagaccagcctggccaacatggtgaaacccgtctctgctaagaatacaaaaattacccaggcgtggtggcgcgtgcctgtaatcccagctacttgggaggcggaggcaggagaatttcttgaacccaggaggaggaggttgcagtgagccgagattgcgccactgcactctcacctgggggacagaacgagactccgtctcaagggggaaaaaaagaaatttgtttaaaaattttagtaaacagttggctgagaatcacagaaatgtgaatcacttctagccgtgttcttaaccagctgcataaccttgaataggcttcctatctctttgtatttcagtttcctgatgggaagattgaggagtctgtatgagataatctgattttgttacctagttagtatacttgggaatcatgtacagggataaaaaagctgagaaagccttctgagtcaagggtgtgtgtgtgtgtgtgtgtgtgtgcgtgtgcgtgtgtgtgtaaaaaacatatattgtcttccaagacactttttaaaagggtaaattaaattcatttgaacgtaattaaagcagtaacattaacgaaaacaaccttaggcagaccttaaccctggcatacataaactacctaaataagagagcacgttatgcccagcacaattttcaagtacagacggtacaaaatcctcttaaaggccataggggctaaattgttaaattcatttttctacatttcagggaaagagataaatcctttgacccaaggaagtcagtttttattatggttctgtagtttatttttggcatacattcacaggtgtgcctatggctctattcttaatccctttcctttgggatggctgcaagagtagtacaaacttgtaactttgtaatttggctttttaattttttctgtgctgcactggaattatgttttgtcttaagtccacactggatcctcaggatggatccagtgaggattttgaaagaagcataattcctttgacttcttttagaattaatttacctattaaataaaaaggaaaggattcatcttttattcgaattcctctgaggctaacaattcaatataaactgatgaatgctgtgagcattattcagacaatcacattcaatttgtgtgacagtaacagcatagccacctgaaggacagtgcaacaagggcacaggtatatgataccctttagaagaaaagcattacaggtgggtttatttgtttctggaaaacaaacaactccagtaggaatgtagtacatttttggctcttgtccatttggtttttgggattaaggtggttctattaccagaactaccaccacaacaccctggtatttttgggcagaaatttgggacactaagaaaacaactattttttattttatgtgtatagctgttagtggaagaaagaataaataggcatcattattgctctttaggctgtccctgattttggacacacacttattttttcagggctctcattttaatcagtagtccatcagtacctaatggaaacatctactgtgtagagttttggttgctgatgctagaatttaagactttggagtagtcgaaagacaacagagaaattcatctcataatttttgtattttaagcacatactagatttatcagggctgaagaacaaatgcccgatggtgtagttcatttattcatttatgaattcagcaaacgtttgtagctgaccccgaaaataccagttaccctgtttggctttggtgattcattgtttagcagagtgcatatagttcctgccctcctgggatttgtgatctgcgtttcttggaaatttatattgaataagtaattataaatgtgatgagtgttttgacatgtaaagtacttatggaagcccataaaaggggctcttaatttagcctggttgcaagtgattttgagctgagtttaaaagatgaaggctgaggaggatttaatatgctcacagtagaaagtaaagtgtttcactttacacatttattcccaaagctgggagttttgtctcaatattgggtcattattaagtttgtatttatacattataaatatacattgtaaaaatatacatttttgtaactagtacagagtttttagacagtctgctctgttgcccagggtgaagtgcagtggcatgatctcgactcactgcagcctgtgcctcccaggttcaagctattcttgtgcctccacctcctgagtagctgggattataggcgcacaccaccacacccagctgatttctttatttttagcagatatgtagtttcaccatcttggctaggctggtctcgaactcctgactaaagtgatccacccgccttggcctcccaaagtcctgggattacaggcgtgagccactgcactggcccacccttgttttatttttgagttgggttcttgctttgtcacccaggctggagtacaatggtatgagcatagctcactgtaactttgaactcctgagctcaagcggttctcccacctcaacctcctgagtagtagctgggactacaggtttgcactgccatgcctggctaagtttttagttttaatttttatggagatggggtcttactgtgttgcccaggctgttctcaaacttctaacctcaacgtgatcctcctgccttggcctcccaaagtgttgggattacaggcatgagccactgccagctcaggcatttttatttattcttttggccaatgatcagagggccgtgcgattaatttgttaattgagaatatacatttacacccaaacagtaaacaaaattgtttcctgttatagattttagtcataattgaagtaatattcctgtatatgcttgaaaatatgagctatagaaccagaaccaaggaaaagatgaagaatggataggatagtgagagctgctttaagttttgttttaacattttggaaagcaagggttttgtatcctgcggtagatctcaatttgtttttcgtttacaatatacctgtgaaatcttacatatcatgtgctgcataatagcattttggttaaagacagacagtgtgactgtggtcccataggatttgtatacgtttttgctatatcttttgtatgtttagatacccaaataccattgtgttacagttacttacagtatttggcaccgttacatgctgtattggtttgtatcctaggagcaatagaccataccatgtagcctagttgtgtagttgactacaccatctagtttgtgaaaatcatcctatgaagtttgcacgatgaaatcacagaacaaagcatttcttagagtgttgactgtgtttccatcaataactataactcaatttgtcagtagtaattctcgttggggagtggtgggacttacaggagtgggtcctaacaggacttagaaatccttggaaaaaaaggtattttaatatgtctgagaatagtgatggccttcatattagcagttgtcactgacaggtgatattgttacttaaactggcatgatctgaacttttaaagtatattctgtgtacaactttctcttttgcagcttcaaggttactgactttttatgatgtttggtggctatgagactatagaagcatacgaagatgatctttatcgagatgagtcatctagtgaactgagtgttgatagtgaggtggaatttcaactctatagccaaattcattatgcccaagatcttgatgatgtcatcagggaggaagagcatgaagaaaagaactctgggaattcggaatcttcgagtagtaaaccaaatcagaagaagctaatcgtcctttcagatagtgaggtcatccagctgtcagatgggtcagaggtcatcactttgtctgatgaagacagtatttatagatgtaaaggaaagaatgttagagttcaagcacaagaaaatgcccatggtctttcttcttctcttcaatctaatgagctggttgataagaaatgcaagagtgatattgagaagcctaaatctgaagagagatcaggtgtaatccgagaggtcatgattatagaggtcagttcaagtgaagaggaagagagcaccatttcagaaggtgataatgtggaaagctggatgctactgggatgtgaagtagatgataaagatgatgatatccttctcaaccttgtgggatgtgaaaactctgttactgaaggttagtatcatattggccattttgaaagtagtatcatctttcataaggaggactgcttttcctagagaaaagaccaatagggtctactccgtttaattcctcactttttggtcttgttttttggtttgtttctcatgcgactctcttaccagtggctactctaatggtggtttgtctgaacgtcagaaagagtatgtcagaataccaaagacactctgcttctgctgtaagcagattcatagctgcttcttcctgtttggctagagccagttctggacctgaaatcttacttcccccctctctctctgcttggtaccacaggtgagtactccatccacctctggcattagccctgtgcactcattcagccaactctgttgggactgtctcttcctatgggatttgcttacccaggagttagatggcaagcatagggaatgtctggcacacagaatatatggaattagtgttaggattaggattttaggtactccacagtcagaaagacaggaaaatatgaagagctgtaagtctagggcaggttataggggagaatgcaaattttgatagctacatcatcaaggattaaaattttggtgttagttttgtctctgtgacatgtagtcatctagtcttaatgcttatgccttcaagaagttccttttcatttccctccctttatgcctaatgctcagtctcttgcactagtttcctaagtagtcttcttttatatctaccttgtacactgttgttaaaactggtattgaaatgctcttttactcatagtactttattgctgctccaaaatttttaatggcagcctgcttccctagaaatgatgacattgaatgtagattgtgcttggagcccctgggattggcaaatgtttttttaagaagccagatagaaaatattttaggattccaagccatgtgatatcttaactactcaacttggcccttgtgggaaagcagccttaaataatacctatagaaatgggggtggctgttctcagtaaagccctacttacaaaaacaggtggccggctcaggctgtagtttgcaaaccctgagaacttgacagcaaaacgaaaagagagaatagtagttaggacagaacagaatcgcgtaaagttttttccatataggtgagctctgataatgtttgtaggtagaaagaaagaaacttgtgaaggagagactaaacctgtttgatggattgggttgggggccaggttagagataggatcaggtgtatgtgttgttgaattattcctaaaaaggaagagagacactagtaattgctaaatcatcaaatatttgtagaggtagaggagaaagaataaattcagatggattgaggcagatgagagaacatatggggatgtgtttgattttcttaggaaaatgaaagcagaagtgggagagggcgggggataattggaagcttagaatgtggaagggatgtttaagtgctgtggggaatactttgaggcagtggttaccagtattttgaagatgacaacctgtgtaactttgaaacaatttgtggaccacccatggttgtagttatgattttagtattcaattgagaaaatgcatattagaaagaagctactactcttacatgactttgtgttttattaatcacaacattgatatgtgagaaatagtgtttataatgcgttgctctaggtacccattaaggtaactaattctgcagtttcccaggaggctgaaggctcttaagttggaaatcattgcacttgagtgaatcaacagtaagagaataaaggattgtttagaagtagtattcagtcaaaattaaaatgatgtgaacttgtagtgaactcactttgaaggattccataactttatccagtaatacttgtcagcttggagcaagatgacagaaacaaaatgatcttgggttaggcgtaacactatagaaggccaaaataagcatttagcttattctttctctaaattaccttttcctgagatcacacctagtttcattaatcacttctgtatttatggtcatcaaattgtcatctccttaaccattttgttgatttcaaattctctgtgtacatctacagaatatttccatttgggtatcttactgtctcacatttgacatactgaaaagaaagcttgataacttgaaaaaaaagcttattatctttcctttgaaacaactccctgctgctttctgtttgcactagagaatctacagacatgctaaagttgatggcacaatgtggataggttgggaaaaacatgaattaggtgctggatttagtgaagaaatcgaactgtgccatatttggcaaatgatggtgatgagaaagtagagagaaccttggatttgttttctgttttagccaaatagaattaaattctgaatttttgaaaattaatttacttgactcttataaactcttacaaatactcaaatatatattctccattttatttccttgatccactaatgctgtaatcctatttccaattaataaacaacatatttagtactgatgcccatttaagtgtggtgttactctgtaatcactatccctctcataaaactatctggggatagattggttcatataatctttagagagaagatttttctcatttctgtaaaagtgtagagaaaatctcaagtactttagaaatgcctattgttaaacagtatccataattattttgtgttctgtttccttgacctcactcaagaaaaaaacaaaatatctcccagaattatggcatactgaaaactgcagtatgacataaaagaaaagactacaggctccttgaggttgggtcttttccatactcataaacctgcttataataatatttagagtaatttcttggcacatacattacctgctttctcatcaattgctaaatcatcaaacatttattgagcatctcctctatgtagggtataagtaatgctgaggtagtactcgtgacttacagtggtaaaagacttaagttttaggccgagagcagtggctcacgcctgtaatcccaacactttgagaggccgaggcgggtggatcacctgaggtcaggagttcgagaccagcctggccaacatggcgaaaccccatctctactaaaaataaataaattagctgggagtggtggcaggcacctgtaatcccagctacttgggaggctaaggcaggagaattgcttgacccaggaggtggaggttgcagtgagctgagattgcaccattgcactccagcctgggtgatggagtgagactgtctcaaaaaaaaaaaaaaaaagataagttttagccttgaatgacatagtgtttcnnnnnnnnnnnnnnnnnnnngattagtgaatttgagataattcataagtctgtgaaagacaataaatacatacatattttacatttactattactaaatttgtagtaaatttgagtacagcactacctctttatctgtgaaaacttcagactctcccctattactttaatttcagtgagacattattatattaaaaaaatggccaggcctggtggctcacgcctgtaatcccagcactttgggaggccgaggcaggtggatcacgaggtcgggagatcgagaccagcctggctaacacggtgaaaccccgtctctactaaaaatacaaaaaattagccgggtgtggtggcggacgcctgtagtcccagctactcaggaggctgaggcaggagaatggtgtgaacctgggaggcagagtttgcagtgagccgagatagcgccactgcactccagcctgggtgatagagcgagactctgtcaaaaaaaaaaagaaaaaaaaaatacaggccgggcatggtggctcacacctgtaatcccagcactttgggaggctgaggtgggtggatcacttgaggtcaggagttcgagaccagcctggccaacatggtgaaaccccgtctctactaaaaatgcaaaattagccgggcattctggcaagcatctgtaatcccagctacttgggaggctgaggaaggagaattgcttcaacctgggaggcggaggttgcagtgagccgagattgtgcaactgcactcaagcctaggcgacagagtgagactcttgtctcaaaaagaaaaagaaaaaaaagaaaatgggcgtacacatttgttttgctctactgacagttaataccacaactcagaggcatttttttttcctttctattcttcttctaaatgttcaacacttttctgattttgtgatttgaggttgttgattagcttcctgaggctccattgagactgtatatacgtgacacttaacagtctagccttcctcggtgcatatagatatatgatggtggttttgcctgtagtaaattcatgtcaaaacataggctttcagtgcctattacatatgactttcagctctctctactgagggatgtaggagtttatttctgaggtctgagcctcttttcctttacttcctttattctttcctaagccttctttataaaaactatgcatgttctatcgtttgttttccttcttgattcccgccccttcctttttttttaattatccccagcaggagtgacttgtaattctcatatattagaaaggcagatctcctggtggaagaaaagatgcaccgaaggaagtcagcatatttagtaatttgtgagggggatctcaagtttggaaaggattgttatgtaagacaaccaaatgatgacatgtgacaataaagccataatagctacttattttcctggttagggaagggatattactagttctaggagtaactgctagctctttcttgtactttttttattgtggaaatataaaaatatacaaaaataaaatgttataattgacttcagtgtcccataaaccagcttcaacagttaccaatttatgtctaatctttcctatctatagctctgtgcccctctgttattttgaagctcatcagacatcaagtcattcatatatgtatgtatgtgtatgtgtgtgtatacacatcatgtgtgcacatgtgtgtatgcatgtatacacatttgtatacaagtgtgcactcatgtttgtccctcagtgtctgtgggggattggttctaggacttcccatggataccaaaatctatggatgctcaagtccctgatataaaattgtggaatatttgcatataacctatttacatcctctcgtatacttttaagtccggggtgtccaatcttttggcttccatgggccacattggaagaattgtcttgggccacacataaaaaacactaatactgacagtagccgatgagctaaaaaaaaattaccagctggacatggtggctcacgcctgtaatcccggcactttgggaggccgaggcgggcggatcacgaggtctggagttcgagactagcctgaccaacatggtgaaaccccgtctcttctaaaaatacaaaaattagcccagtgtggtggtgtgcacctgtaatcccagcctcagaggctgaggcaggagaatcgcttgaacctgggagacggaggttgcagtgagccgagatcgtgccactgcattctagcctgggcgacagagtgagagagactctgtctcagaaaaaaattaacaaaacaatctcatattgttttaagaaagtttacgaatttgtgttgggccacattcaaaagccttcatggctgtgagttggacaagtcatctctggattacttaacatacccatacaatgtaaataccatgtaaataactgttatattgtatttaaggagtcataatgagaagaaaaatatacacgttaagtagacatgcaattttttttggtctggaatattttcttttttttttttttttgagacacagtcttgctcttgtcacccagggtggattgcagtggtgcagtcttggctcactgcaacctctgccacctgggttcaagcagttcttccacctcagcttcctgaatagctgcgaatgcaggtacctgccaccatgcttggctaatttttgtatttttattttttatttttttaaaatttaaaaattttaaaatttttatttattttctgagacggagtctcgctgtgtcacccagcctggagtgcggtggcgttatcttggctcactgcaacctccgcctcccaggttcaagtgattcttccacctcagccttccgagtagctgggattacaggcacgagccaccacgcccagctaatttttgtatttttagtagaaacggggtttcaccatgttggccaggctggtcttgaactcctgacctcaggtgatctgcccaccttggcctcccaaagtgccagaattataggcgtgagccaccgtgcctggccagttattgtatttttagtagagttggggtttcagcatgttggctagactggtcttgaactcctggcctcaagtgatccaccggccttggcctcccaaagtggtaggattacaggtgtgagccaccgtgcccgactgaaacgtactatatatatatatgtatatatttaatcatattaccataggtaaacaaattcccggtaattctttcatcatcacatacccagctagtgttcagatttcctacactggctcctaatttttttttcttacagattatttgaattcgatccaatccaggtattgtaattggctgttaaacttaagtatcctttaatgtataggttccccttaatctcttcctttttttaatttcttgtaatttgttgtaatacctagattctttgtcttctagaatttccaatggtctgaattttatagtattgcttaacatgttctactgtcctctgtctttcctgtgaattggtagttagatctagaagcttgattaaattcagattttctctctgttgttacatcatcagtttgacacacaggttcatttgtttcactttgcttttgatatgttattttttggaattatcttttaaaaatttggttttcttttataatcatgtaaaatgtgtataaggttccagattcaaatcagcaaaacatgataaaatctatccagagaaggcaaaccttctgtccagtcgccatcctgttcctgcccttccccttatgagtaatcattaagagaaaattgttggtttgtccttacatgtgtatatctttgtacactcttgcccttgttttttgttggttgttttttgttgttgttgttttattttttgagacggaatttcgctcttgttgcccaggctggagtgcaacagtgcagtctcagctcaccgcaacttccgcctcccgggttcaagtgattcttctgcctcagcctcccgagtagctaggattacaggcatgtgccaccatgcccagctaatttttgtatttttagtagagatgggggtttctccatgctggtcaggctggcctcaaactcccgacctcaggtgatccacccacctcggcctcccaaagtgctaggattacaggcatgagccaccacacccggccctctttcttaataaatagtggcatactatctactcttttctctaaccttatttttttctcttagccgtatatcctggcgatcaatccatagtcctatgtaaagatatttaatatttcttatttctaggactatgaactatttttgtatcttctacactaatctgagctgggcacattaggcatgtaataaatactttttgaaagtgaatgaatagtaatttaaaatagttgatgactaatgcacttgttacagtcttaaaatatattttaaacaaataaataattgtctaattccactttcagaagaaataagaagttcttattcctgtttgtaattttttttatcatttggtaattttgaaatatttaggtttagcaaaaaattaataggctcaggttttaaaaagaaaaatgccttctgcaaaaggaacaatatggtatttttaagagttgaagaaaccatattagttcctggtttatgactgttatggtatagaattttgtgtcaatgtagagctccttcagtatgtgtaatttggcacacaacccctttagttcgtcagcatttggcacatcggggatacctaacaaattgtaggtaaatttgtttatttatttattttttcccttaggtaaatttatttgcagttctgcctttgtgtatagagtagagctctttacatagtattatttaaagtgaaataattgcttgactaaggtaaatggcttttgaaactgaagtaaaattatggcttcaacacttatggcagaaagtgttttaactattttgtgttaaatccctttttctcccaaaactatacacacagaagttttggatataatttcaaaggatgaagaactcatctagaggccattgttgaattcctggcattcattaggcactcaaccaagactggatatctaattaaaatttgaatagagtgggttacctatttgaattttaggttttctagtaaatcattttgtttgatctaggtctttacatatgtgtttttttgtttgtttttcttttcctgtgtggattagtttctaccttgcctggctgatatatctacttatctctcagttcttagtttgaaaggtcacttctgaatgaggtgtaatggtcataggttctcaattagtggttgttattgggtctgttacagctgtgcagttggccaactttgactttgggtaacttaatttctttattggtaaaaaatactttttattttattaaagtcataaagaaaaatgagatattgggtaggcttaatgtcacaggaaaatattttgataaaagtcttcatagttacacgataggttcatgatgattgtggcaaacatgagcttatagcttccacttttttgttgttgtttgttgttgttgttgtttttcagacagggtgtctctctcccaccccacccctgccccacctgcaatctctctctctctgtcttgctctcacccaggcaggagtacagtattgcagtcatggctcactgtagccttgacctcccgggctgaagtgatcctcctacctcaacctcccaggtagctgagactgcagatgtgggccaccatgccctgctaattttttgtatggagttagatggagtttcaccattttgcccatgttcaccatgttgctcatgttgctggtcttgaactcttggctcaagcgagctgcccacctcagcctcccaaagtgctgggatttacaggtgtgagtcaccgccctggccccacttgatttttttgttttgtgttgttttgttttgtagagacagtgtctcaccatgttgcctacccttgtcttgaactcctgagctcaagctcccaccttggcctcccaaagtgttgtgcttacaggcatgagccaccgagcctggccccaagttgcttttgaacaacatgtctctagtatggtgctatccttaaagaaatttaatttggtgacattttatgatctgctagtttatgacattgaacttaattctgaaatcttaaaatctttccaaatattatttactgggtgctgacaacgtacaagccactgtaccattaaggtattgggattcaaaaattgccatgtactttttgcctttagaaatcctaaaatgcatgacagtatggaaagttcactgtaaaaccagagttaaatgcatttctacaaatatatgagatgctccagcagaatacgtaatcattccaggtgaatgcagtagattttttaaaaagattaaaaagtagataggcaaagtacaagactgaattgaaaaggaaccctttgaatttgagtttcgaaaaatgggtaggacttgaagttcaggttaaatgcagctaaaaatagaaggtgaagcccttagtagaaactgaagactgtatgtgccattcatgtttatatgtggctggatgtgatgaaatgttttaatagtatatctttttagaagccacctctgcctaaacaagaaaggattatttatgttttgtatatgttcagaatactgttggaagatttcttagtcataattttatttcattgctttctccctgttttttgcgtacatacctccttttttcttttaaaattaattggaccagaggttagtcaaaggacctgaccagctgtttaacgtgtattttgtgcagggctgttcaaagtagagcaggtcttaaggtacaactttcactcctcatagttatgttcttccttataatcttttaacataggaaaggatcattattttgttagtttggaaacaatacattaaactttgccttcagtaacttctcagatcattaaggtggtgttttttcccctcctttggcattcatcgtcttaatgtcagtagtttcttgagacattttataccctaacaggtcataagagtgtattgccatgtgacatacttctcattaatgtatagtttaatttctgccttataactgaagaatggccacatgctagaattccagtcaccaggagcatcaaggagctccctctctgatgttttcagcttttgtaagcctgtactgcacagttcctaaagctgcttttgaactgtgtctttagttgtagcatgtcaccttacacttaactattgttagggcatctttttatttaatttctaattagcataatgacttgagctgtgttattcactgttccatggtgaagttgtcatagggagagaagaaataaaaatgttcagtttcagctttacttgtgaatggagcgaggtttgaagaaagctttttatggccattgttcagcagaatgaaaatctcattagaaaccccagaaatcccatgcagctttgggttggattttaataacattttggaatgttgatattgtatatcactaatttctgtgatttcactgtagatcagcaacatagggaggcagtcttccaaagttaatttatgacttttaatctaaattcatttacagttttcttttcaacaatgttaagtacccagggagagaattaaattttactttaaaaaaatacatttcttctagtaactgatttgatcttcatgtaagatatactaaattcattggaaactgcttaaacagaaataccatgatatgtatttattgaactaatgacttagtttagttgccattaaaatgttactcaccttatctacaggtttgtattttttttttttttttttagaatggaaaagcataaaattagatgggcaacattttcttccttgtcagaagagcttgaatcctgatgtctttttaagtgaagagtgtttatatataattttcttgtagcttttgtttattataaaaataattattgcatatagtgatcacttatctaagaagataagtatgatttatatagacagtatatttttatggtcagaaagtaaatttgatgtgagctacatatgattagacagtaaaacttttttccaaagaaatatagaatggagaacatttaatcattatttccccttcttagagtagaggctgttcagataattcatattctgtaagtaggagatcctgtttttaagactttactaaatttaatttcaaagtaataatctcttataaatgcttccttggtggttaagacttattaatgaagcaaaagtatggacttcatggaagttttcagcctaacgttttaaatctcttcattattatttatctttgttttgttataaattaaagatactggcatggttaacttttggcattttgagttacttgccagatatttgttgattgtgcaaatagttaagaaataaatattttaattgggcatccaccatgtattatgtcacattttctttttaaatcatatgcttaagaatacttaaaggagtatgacttgctttttagtttgaatcttgatctaacagcattggttctggatggagatgtaattctagagataaaaattatttctgttgtgtagatttggattctaaatgtaataattattttaaagtggatcttgtctgctaaatgtatagcttttatttctataacaaattcttaccttagaattccaacttttgtcagttttgaaaattagtttattgtggacttgagagcatctgttcttaatctcgtgttttgcaaacacgttttaagggaagacagcataaatctgtgatagtgaaaatcatttgtacttcccctccctcgcttttgcttaaatatacaattaacttataaccacctcagtgtgaaagaatggatgttaagtagcttaagaggtatttattaagggaaaatatttttattggcagttcccttaagtcatatttgttttgtaactaaatagtgcttgcaacagaattatctatcatagggagggaaagctccaactcttgaaaacttttcaatactttttctatattggtagttaatgagaattcttaagataggaaatagactggttatgactggtaatatgatattgctaatgtaatacaaattatgctttaaaaaagccaggtgaggaattcaggatttggaagaatatgacatacatatacatttaactaaagaaaggagattttctttaaagagaagatgtgcaaccacaatcaatcctgtaagttagtccttaatcctgtactagccagtttttagtattaaatggtctgatttaacacaaatgaacttttgtcaatggttttatttagaaatagcattacttcctacttttaaggaggattttaatagctaataaaaattcgttgttctgataagaacttgaaagacatccttactcccatataattgagtattttgctcttcattcaacacctcagcccttttggtttgcttaaaaaatgatacaaattttgtgggagaataaatataacttaaatattgctgtaaatgtgttgtataatcatattttagcctggtattattggttcttctgtgtatgaaatacttttaaacattcaaaatattcaatttaaaagtttctggataggtgagtggtagagatccatcaggtacttacttggttgtggaatatttgtgttcttgatgccatgacattttaaagttgtattaatccctttatttttctgtttgagatgattcagtttgggaggttttattatcagatctaacagaagaaacgtaagtgttgtaccacaggtcatctaattttcaaaccatgttggttagttaaactgactttggtgtataattatgtacccggtagtcagaggagttcaagtcgattgcaattcaactctgtgattgtgccaccagttaggttaacatcagcagtgaagggccttcattgtgttaaatttttaaattccgttaagattatttaaacatagaaggagataggtttgtgaagcaaatttctaaagcagtattaagcaaagagaatcttttcttcctcttcttttagatatatcacatacatgtgtattttgattaaaaggaaaaaaatttaatgcttatagtataatgcgcatacttatttcttatttttagaatttattaaaactaataaaatttgtttggaaatctcaaaagatctttagtagtatacctgcaacctcagcagtccctttttatccatacagattctctgcctattgtggccgtttgctctaatttaaatttcccatggctttcggttgcagacttggttttctgcaagagtgcccatgcttacatggtcatatattcttggtgacttttccactttttcttttttgttattttgttgattgctaaagaaaaaggggaatttttttttttaaatttgtttctttgttttgatctttcttccttagcccatctatttgtgtgttctttgttttgcagattggaaagaattattgtgtggtacttagatccatggggactagcaggggaaaactaattttgttcttggttttgttttcttaataacagaagcaatttaatttttgagccattgagaagctgaaaagatatgttagtgttatgcatgaaattgatgggaaattattaatcctgaaaatttgtattcatggtcactttactgttggaataaaaatgttattttatagtgtaaccaagttaatactagaaatactaattaacagtaagtggtactgttataaatctttaatttaaatattattgtatattaagtagttgtttacaagaaatctgttgtaatctgataatgtgatttctcttacattcaattttgtggtccacagtgtgtatatattcaaataagcatatgaacatgcctttgacggtggacacatttttactttgaccagatcttaagagtttgctttttcttggcaaaacttgcatactttcaaatgtgaggaattttgttttataacataactttgtactgctgaatttaagtccttgaagtgctatggcaatttagttattgttagaagtcaaaagtagaggtctctgttcccaacatctccccaaaatattttttcattaatattcacaggctttaaaatatcaaattattgtgatcaaagctacttctgttttacagttgttttgtgaggctggtgtcatacagtaacatttaactgaattttgtatttgctaaattaacataaaataataaagagatcctttttaccatttaaaaaattctaataatttcctaatcaggaaaactgatgttatgatatactgttaataggctaaaaaaaaccttgtaatgttgatacatagggaaaagagtaattttgataattaataattttagatttttttcctttgattgtacctcatggttgtgaggtgtctaaaatgctctttctgcatatctgttaaggactttgggaattggggtaagggcaagccttctttctgtgtctgttaattacaggttttttcttgtggatgtagtgctcttagaatatgaaactgatttatagaatttgtaattaccaagaaataaatagcatcattgaattttgttttctttatttttgctattattttctagttactgtgcttcacattttgatttctatcaaatgacttctcaaaaagcaatttcttttaaatcagtgagtttcaaactaagaagaaaatgtatcctgatagtctaattagctgttgtttgtccatgccaattaaaataatcttttgaatttctagtctttgattatagttatataggcttcatgagtttgtaaaactattcctccttttaaagtattttaaaaggtgtattgtaattttataattgatattcatatgtaattattgagaaacttgaataacctaaaatatatttctagtattcagcacatcaaatcaaggtataacctgtgatataaaagtggtccaacagaagtatacagctttaaaaataacaaggaattaattctgttagcatgttttactagcaaatgttcgtggaaaatgttattaattcttaaagctcagtgcctgggttttattgtgtgtggccttactaggagaacactgtagagccgaacttgaaatttattaaggaaagaagaaactggtgaagtgcttttatgctgttaaaaaaacttcacagacaattgtcagacaattttttttttaaaggtcatgattgcttgatgccttttccagtctttatttgaaactctcgttttgtaggatttcttttttgttcttcctcttccttttttcttttggcagtgggtggaagattcttttaaaactgaatggctaaacctgtatggtaactattgaagtatgatcgaaatacttttattcatgatttttttaggccaaaaaatgctatgaaggtaagccaatgatggtaaaattacattgtgttgcgtggaaactgttttagctttagcgttttctgttcagaaaagtaggctctgcattagagttttaaattgggatttgtttgtgaaatattttgtaattctcatattgctgattgcctttatgtctcggtgttctagtagatagttcgtagttcctgaaaaataatattctgtgtatgaaagaaaataggaggtgagaacagaatgagaattgggaaagaaaaccccctacccaaaatgccgccacctaacaggtggaaatatctatgccattacagattttcaaaacgtagagtgcttgaactctttttttctaagagattacttcaaatttgacagatttcacaaaattttgttatgataaatattaaaattttaactcttatttttatcctaaatttaagcccttacaaattaagaaaagagtgcctcgaggctgattgctaatgttcaattaagttatgtgttcagtgaagtaattttttgattatgatattttgattttattaatatgtaaactaaaaattataaaaggattatgagtacagaaattaaattatgtgaaattaattttgatattttgcggcagacagtttagaattaaaatatccttggtgtgtaataattttatttcttgtaaggacatctgttggctttcagtattcagaaaatttagactttttaattttaaatgttgacgtaaattaactggagccatactttaaattgaaagaacttaagggaaatacataaaatatgctagtgattggcttacttacattttcagtgattagactttgtgaaataagagtaaggcctagcattttattttatttaagaaaatatacttaatttaaaagtactaatacaagaatgagagaaatctggtcaagtatagtaaatccatatccataattattttcaatcactagttacagaggaaggtgtgaatgctaatatcttctttgttgaaaatcataagttgtattttgaaaagggatgaaagggaacaagtaactgctttcaggcagatttatatcatcctaacatcatatgttatttgtgggttcatgtcacaaaagcttgcaaaacttcacaaaataatttaatgtattttaatttagtaagcttgctgaaaactcttttgtgataaatctagaaaaatttatacatgatatttttcttttttaaagtttagtgatccatcttggtactttgtctcaatttcagtcttgttgatttagataatattcttattgttttataaatttcctttcaggaatgtgttactgccttgatacgttctcacctttccagttatatatgatccatctatgacattctatcatccaggtgttactattttattgttctttcttgtacttttgttgtaaggtacagacttcaagtctaaagtaagagctagtgtatattacagtgtatatgaccatttctaatttgacctgttactgtaaagaaggctaacaagtgtgtatgcctagcccaccccttctggagcagttgaaaacaggcctcagaagactcaaaggaattcttttaactcctagcagggccacggggtcaatgtcagatttagtcatgctgttattttagcccagtggtccagagagatgactgaaaagtgagtctttcatttctttttttgtgtggttattaacaggattaaatgtaagccattgtgtacttagtaccaattagtttctcatctgagaggttcattatgattttttgtcagccttcgtcttgtaatatttgtttctttgtttgattagttaaggggctgaatgggctaaagggaagttttaacagcagtacttttaaattcattaagaattttaatagtcaacttttcaaatatgtagaccttgattaaaaaagggaccatgttgaaaattggcaaaattaagtaaattgtttaaaattttccttttcctgttgtatttttttaatctgaaaaacagactgtctttattatatcaaataatacttttatgtttctagaagtctacttcagattcttgtacatacttcttaagattgtatttagtttgctgtgaatatgtaattatcgttcagaaggggcacataccaaaaagctccaaaattaaaaaaccttttcagtttctaggatagaaacatagattgagctattaaaagcagaacattagagttctgggataaagatagttgtcaggtgtaaacaagccttaattgaaaaggaggcagcctaaaagttgattctttatgctattataaataagtaaaaatgcaaacttgcttgagttcagaaaataggagcatacccaacttttaaaactacttattagattggtagttgctttagatccttaacttaaaaaaattcttattaaaatcagtgttcaattgagtaatattcctcgtttaatagattgagatgcctcagttaaattttgaacaaaaattgttcctataaattgaattggagatgctgatctgttaaaagcaaggaatataacccaaaattaaaataggaattattttgctagtggataattatcttggacagtaggtcttatatcttgttgaagtgtgtagaacacacattttcacattcattcatctttaagtgaatatacctgtaggctgattcagacttggtattttatttattttaaacattagaaatgataaatactaatttaagcaagtgcgattactattttaactcattcttcgagagttgcttcatttatctcagagtttttggtgtaccttatttaccttatttagattatatcattgtattaagtcctttgcttactgctgtagttttttggtacctagaataatttattatggaattgaatattaaaaatttgacgatcccaatagttatgaagcttacagattctgtatgtaggcttttttcctcctttggtttcaggcataatgaatggatggcccttgctttctgatatttgtgtatccaattttctgaggaaacacttttctacaaagtctgcatgtttgattgttctacatttttctttcattataatttgaaaaggacttagatcctccaaatgaaaaatggctgtcttggccatatggtaaattaggcctgctttattattgtctaataattaagcctccctttacttatcccaccctcgttttaaaaactaaaaacgtgtggtagctgtattagttagaacattttcaagtaacaggaagtaattcagtggtaacttcctcatgtggtttactgtttgtcaaaaaggaaagtagtttcttttgagagaataatgcagtttttgctgctcaacattttctcaagctctttggaaaataagagagaagtctttaatgtgcttgtaatatgataaggacagatttaaaaattttgtttctcttctcattacttggtgtttgacttcagtggaagctgaaagaagtaaatagatgttaagttgaaaatctgcctcagtgtcagatgctcatataatttaaataatttaaaatttgtgggtacttatattgattgaccttatattttaaaaacatagggaataacatcaactatttgtatcttctctcttaacttaaagttgaattaattaactttagctatctaatagagtaggtccagaaattaacattcaaataacagtagtaagtataggtgaagaccaggctatcccaaagataattcattaggacttctgtttctatagtatctttcatatgatagtaactgttgtaaacaattgaattatatatatcaatttaataaataattgcaatattaaaaagttagccccgataatttctacccaaacacctccaaattatgctacttcaaaaacagttgaagggaagtttaggaatataatatagtttcattttaagaccactaggataatagacattgtaatgtaatggaaaaacattttgtcccataaaaaccactttcatttaatgctttgtttttctgtctaaccaggtaatacctagcaaatacagaaagagagataaagcaagcaagctgttttgaaagtgtctaatattggctgatgtagagctataggtgggtgtatcttattattccataaaattaaaaataagagtggggggaaaaaacaaatcccaagaaaataaatggaaggtgagtgaagagtgaatagaataaaaatagagatctagtatttcagtcagtctgctagttaaattttatattcagagctttaacattttgggcttttaaatttcctgcagtgcacatgactttctttcataaaagatatgtcaatcatattaggaataaaagtaatagctcatatagtgctttattattagcatctaagaaaccactggtatttgagtaaattgtaagttagaattgattttttaatagctttttaatgcagatcaaacatttgtggcttttgaatgaaaaatacttatcaactaatttttattagcattgcatttttaaaaaaatctacattataacatattggaggttgattgaaagggagtttttgcctccattttataaagatgctctgtaagagcactggtgataatgatgtctattcctgtattttttgctgacttttacctggtatcctgtcagtaattgttttttcatgttgaggaagaaaaaagaatctatacttgcatctgtcagtattattgttgttttaactttataggtatattgtagacattgaattgaaagatttgtaaacttttggttttctgtgatactgattgggaacaaaggcatagataatcagagacagcaaataatagccaaaaatatatatttgatatgtattcatttagccaacaataactagggccttttgtgaatcactgtgcaagatgtgctggtacttacaaagatgaatcaggtatagaccctgaccccacggatcctatggcttaatagaagaggtaagaggtgagtggcataatagagtcatggggtgcaggagaggaaagatactgctttcatgaggggtagaggtgtgtgtcaggggagataaggatatatcatgtttagaggaacaacagacttttaaaattctattttgaattaggtcggtttttcttagactgagttcctcattctcctagggtccatttgtagggaaaggttttttagttcttaaattatttcttaaatttgtatttttattttgatgttaaaaagtgatcgtacctgttataaaggtaacactttgcagtgataactcatagatgaaagacatttgttataggatgagacttcagtttcttaagtcagtgtttctcattgggatttttggacagatatgatgttcaagagaactttttttttaaggggtttatatattttctaagtttgagaaacaaaggcttaggctcatttcatgttactttgcactgtctaaactacattctaattggtggcagaaagtaggtggcctagaaatgtaagtagcaaatttttttcaggaggtaaggcaattcagcaaggtagtggagagttcactgtcagttaccactatttaggagttaagttggtggcagtgctgctgaatgggcacagtttgtttgattttaaatggtaatgaactgtgagtttattaaatagagggtaaaagttctaaatacattctgaacataaactagacccgttaaagtggtttgtgttacaacctactctatagtgtcctatacagtagtcaaagcttttgtgtaattgattacttctgtggtcccaatgttaatttctgcttatagttttgtaatagcttaatttcattaaagttaattaaacatagattatcttgtacagtatggtatagaattttgttccataaattgggagaaactcataaggaataaataagtactctttaatttatagttcggtgtttccaaagaaatttgggcttcacattgggtgaattcatcacgatagatttaagaatatctgtattgaatatcccaaacattgtacacttttgggggaacatcactgaacaatattttcctttcccacttatttttttttagcagaaaaaaatacccccctgtccccaacaaacaaaactgatcaaagtaagaattagatcatggctttcaattccttagacattttttgaagtctctccaggcttttaagatgaggaattcctaggaattactattcttactggggaaaaagactattttgattacagagagaaaattaggtgacatttgctcacattatacatagaatagaatgattctagttcatctgtagattcttattatagtgtttcgcatgtaatatatgctactttaggataatattttattactgtttgaggttcttaatagttcatgtgtcagcttgcctttatataaaagtctatgtaagttgctttgacagactttaaataaaaatgggaaacacataaatgcagtgttgccatgttctcttttgttttgagcaattacaagcatttctcatttcctgtgcacagaaattccctgaaaaatcaagacgctgctaaaagagtcaaactctgaaagaaatcccaaagatacatcactgcttgacgcaaacatttttaagaagtcactgattataatgaacacagcctttaatggcagtttttcatctccttttcacaagaatgtgacagagtgtcattaaggttttagaaatgaatgctcctaaggaaaggaggatcactaggactacaatgatgctcagtatgtggccatgggattctctgttgggctctttttaggtttttaatcaggttggagaagggagttagagaggaaaggaataggaacagacaagagctttaggacacctgtacaccacagtattttactttctcattgatcttctagatgttgaatccgtaaggtttaatatagaaagtcaaacaaggttccaaatattttgaggaccagtaaacaaaatcagctctaactatatatatgtggaagcacataatttttgcatttaacttaaagtgtttggatatattaaatctgaaatttcatttaaatagtaattccagttctgctctaaggatattgttttaacccattgttcttttctatggtgacagtgattgcccttgatgtattctgcaggtcagtcagattgtatcacagaagagggcacataataaatgtgagccagaaacagctatgtctcagtacaggaacagaaaagcatatttttgcatcacacattaaaataacacccagaaggcattgcatcacatataaatgtaaatcttttctagaggggtgtagcatggaaagaagggttcagccaaaatgtcctcttaagttttttaacaataacaaacactataaagctcatatttaatgagtaataattaatgtctatgaagtttgttttatgagtttttaaaattacagaatattgtaataaataatgtaaaatattacaaaatatgctgtgcttgagaagatatttttccaggttagaaagttacagtttttctgagcaggtgttttctgtgaatctctgtagcattggaatttatagagatataacttttctatttctgtggggtttttttgttttttttttttttttgagacggagtcttgctctgttgctctggctggagtgcagtggagccatctcagctcactgcaagctccgcctcccgggtttacgccattctcctgcctaagcctcccgagtagctgggactacaggcgcctgccaccacgcccggctaattttttttgtatttttagcagagacggggtttcaccgtgttagccaggatagtctcgatctcctgacctcgtgatccacccgcctcggcctcccaaagtgctgggattacaggcgtgagccaccgtgcccgaccgatttatctatttcttttttccatttgaagtcagaaagaaattgctagaatccttcaagtctttctcagtgagagtaaaccttttctgtatataaaacgatcattctgtatacttcattttactttgagttttttagacattaaagctgacactggaaagggtagcttttattttactttttgacttagctacttaggttgtatgaacaattataaaatcatcttcatatgttaaatctgtaacaaattctttttctggctgggtgtggtggctcacgcctgtaattccagcactttgggagcctgaggcaggtggatcacctgaggtcaggagcttgagaccagcctggcaaacatggtgaaaccctgtttctactaaaaatacaaaaattagcctgacgtggtggtgcacacctgtaatctcagctacttgggagcctggggcaggagaatcacttgaacctgggaggcggaggttgcagtgagccgagattgtgccactgcactccagcctggacaacagggtgagactccatctcaaagaaaaaaaaaatcttttttcttcgactctaagatgatgttgaggcttttttgagctctgaatgtaaacttagatcctgtgggttgtttcttagtatactttctggtagctcagtgctacattagcagttctttattttggcattgtatttcctcacacaaagtaaaaagtctcataaatcttcctccttttaaaaaaatgaattgagaccaacagttttctaatctgatctggcaacctgggcttcagtaagggcagactaacagtaatggtagtatgtagtagaaagagattgaaagaatttctctccctggagtgctctaaagaaagatttccaaatagctatagaaaattaaataacttgctttgaattaggtaggaaaataaacttgaacttccccctttcttcatttgtgttttgtttgctgttttttgttttttttttaattttagaaaaattggtttacagaaaaattgcaaagatagtgcagggagttgtcatgtgccctgtattcagtttttcccattagtagcatcttatattaattggctacatttgtcaaaattaatgcatcaatattaacgacttattaactaaagtccatacattattcagatttctttagtttttacctaatgttctttttcttttctaggatcctgttcaggacaccacattacatttagttgtcatgtctccttaggcttctcttggctgtggcagtttctcagactttccttttttttgatgaccatgtcagttttgaggaatgttaggtattttatagaatgtccccaaattaggatttgtttgatgtttttattatcattagactgcatgtatgggttttgggaggaagacagaaataaagtagcattcttatcacatcaagtataaaatgctatcagcatgatttgtcattgatgttagccttgattaccttgctgaggtcgtgtttgtctggtttctctactgtgaaggtattcttttttccccccttcttcccaaacagtattctttggaaggaagtcactatacacagcccatacttaaggaagagagtgttatgctctaccttcttgagggtgaaatatctataaaaattatttggaattcttcctatgggtgatttgtctgttcttgcccattcattcattcttatttgtatcaacttgtggatatttactttacattttgggttataatttaatagtactttattgtgttgcttaaattgttctagctttgacctttgggagtgctttcagttggctcctatgtttctttaatatactcctatcttttttccttaattttattttttaaaattttatttttatttactattattattgattgattgattgattgattgatttagagatggagtcttgctcttttgcccaggctggagtgcactggtgtgatctcggttcactgcaacctccgcctcccaggttcaagcaattctcctgcctcagcctcccaagtagctgggatcataggtgcccgccaccatgcctggctaattttggtatttttagtagacacagggtttcaccatgttggccaggctggtctcgaactcccaacctcaggtgatccgccagtctcagcctaccaaagtgctgggattacaggtgtgagccaccacaccctgcctgttgttattatttgtggttattttttagggtcagggttcactctgtttcccaggctggtctcgaactcctaagctcaagtgattctcctgcctcggcctcccaaaatgttgggattaaggtatgagccactgcacctggcctttctttctttcttttttttttttttaaacatcagatagtggagcaataatattggtcatcagtgtttcttttcttttttaaagcacttcgttacttcctggcactgcaagatgctaccgctcatcttgtttctttctttccccagacctagaatcagctatttctgaaaggagtcctggtttctttaattggagaatgatattagaaaccaaaatctgggtgctcagtgtttgtcttaatatagtttgactcaatggattgagtcaaatcataggtaatttttgtttgcttttggagacaaggtcttgctctgtcatccaggctagagtgcagtggtacaatcacggttcattgcagcctcaatcttcaagttctaagtgatcctcacacctcagcctcccaagtagatgagaccacaggcatgcaccatcatgcccaactaattttttgattttttgtagagatgaggtctcactctgttgcccaggctggtctagaactcctggcctcaagtgtcctcccgcctcagcctcccaaagtagctggaattacaggatgagccactccgcctggctctttggggatcttgattactcttgagagtggaggggtgtcaactcttctttccttctttattacctgtaatgaaaataacagtgcttaccttggggtttgtgagtatgaaatgaaataatgcatgtgatgaacttaaccaccatcttgcattgactgtattattgctaacccattttgagagatgaactgtttgaatatcaaggtgtcatgtaggcaagaatattgtataaatataagcttgtttagaattctgtgtcattaattgcatttactctatcagttaattagagattcttttttgttggctttttttgagacagtgtcacttcgtcacctaggttggagtgcaggggtgccatcacagctcactatagccccgacctcctgggcttaagaaatcctctcaccttatcccccaagaggctgggactaagggtgcacaccaccatgcctgggtgatttttctgttttttgttttttttttaaaatagggacgaggttttgccatgttgcccaggcttgtcttgaactcctaggctcaagccatctatctgcctctgcctccccaatgctgggattacaggtgtgagccactgcacccggtcgttaattagagagtcctgatctcagttggattgtttaaaagtgaaagtgaatgatgataatatttagtaaaatcatcttaatgcattttgacttttaacttcttcagatttttattaaagtatagagaatttagatgttttagaaaatcagtgcaatatgtttggattttggaaaacatgaaatttacataatttgaagacaaacctcattgcatttaatattctgtttccacatttgtgggtgttctggctacactggttattggaagacatttaaagatggcgggcggggtgtagtggctcacacctgtaatcccagcactttgggaggccaaggcgggcggatcatgaggtcaggagatcgagaccatcctggctaacacagtgaaaccctgtctctactaaaaatacaaaaatattagccgggcgtggtggtgggcgcacgtagtcccggctactcgggaggctgaggcaggagaatggtgtgaacccgggaggcagaggtttcagtgagccaccactgcactccatccagcctggtgacagagcgagactccgtctcaaaaaaaaaaaacggcaattaagatgacatttaaataattcacttagtaataaccaagtcaaccaaattgatattattaatatgtagtagttgtgcttttaatattacatttgacaataattttttaattaaatatattctagtaaatggttttgaattctaattctttctttaaaataattctttcatataaatacttttacatttaagtccagtgattagatatctcatgctgttgactaagaacattcaatcttcgtaaactggccattggtgttctgagaaattgaatcttacagagttctttaattttgaaagtttcttgttctcagataatagccttgtaaatgtctccaaatttcagagtcctattcatcttacctaaaatacactaagcctttgttctctttaagtagtacagatatcttagcagccggtaatggttaagggtgtgagtacaaggaacattctgttttggccctctctgttgtgcattgtagatgcctcatcacttcataaatatttattgagtgtttttcttgttaagcactagataaacctacaaaggtaaataagactagagttcctgacctgtcaaggatatcaccacctggtctaccatccatctgtagcaaagtgaccccagcgttcctatgcttacactctcctttttggcagcttggccatgttagttcatgtgtgttagctgttattttttatttttgcttttgccaaaaatctcagtaagctaaacattgggatcagataggtttcattcttagatttcttgatagatttctttggtttaagttatggtttgagtttgtttccctttttcgttagtaaggccacatttttgtgaacatttatttgaattaaatttctgttttctttgatttaagccattttcatgaattttctccagatgcgtgaattgacattagatatcacatttcttttttaatggccattatggtttaatatgttgctattaaaaggttgttttagctgtttttcaactcgtttcatgatctatgtgtaagttcccaaagggagagatcatattttatcttttcccgtaaacgccacagcatataatagagtgccctgtatatggcggttgtcagtaaatgtttgactggattctctgaatggagtaaaacggtttttaaattcttttcatagcaggatagcccaaatggctataaaagaggtcaaaaattctttgtataaatgtttttgacttttggctgaaactattaaattctttataaaataaatcatcgttaaaaagatacccacatttatgttataagccaaactctgttattctggtaactgaaagtttgtgagctttttagatggttaatgggaatgttcagatagatacgactttgtcatctattgtctctgcatttgttaaaatagtaatgctatcactttctttagcctctaagttagttgatatttatttacccttgttaccaatgttcttatgttaaaacattcattcattcaatattaacaccttattgtagctaggtattttaataagtaaattaacttcctgatgcaaggagttggtagcatagtacagtgtagtgtttcacaaatataacctgttgatcctataaggtcaaaactattttcatcatagtaggatgtggcgactcagataaattaacagggatcagatttcccgtcccacctgaaaccatcaaaaaataaacaaaaaatagacaaaacacatgaaaaagcgtttaaaacacgagacattaagaaacaggacaataatccatgaaagacatctaggtgaattctagcannnnnnnnnnnnnnnnnnnnaaaaaaaaaggcggccgggtgctgtggctcattcctgtagtgccagcacatgggaagataaggagggaggatgacttgagcccaggcgtttgaaactagcctgggcaacgtaatgagaccctgtctctaaaaaaagaaaattatccaggtgtggtgcttgcctgtagtcccagctacttggggaaactgaggcaggcagattcccttgagcccaggaggtcaaggctatagtgagccatgattgtgccactgcactgcagcctgggtgacagagtgagaccttgtctcaaaaaaaagaagttaacctacagaatgagagaaaatatttataacccacgtatctgataggggactaatatctaaaatgtataaggaactcataatacatatttgtagcaaaccaagtaacccaattaaaaaatggggtaatggacctgaacaggcatttttccaaaggcatacaaataactaacagatatgtgaaaaggtgctcaatatcacttttcagggaaatgcaaatcaaaccacaatgaggtatcacctcacacctgttgttagaatggctattatcaaaaagtaaaatgataacaaatagtggtgaagatgtggagattgggaacctgtgtacactgttggtgggattgcaaattgctatagctgttacaggaaacagtatggaggttcctcaaaaaactaaaactagaactactgtctgatccagcagttctgcttctgcctgtatattcaaaggaaatgcaactacggtcttgaggagatatttgcactgccatgttacgttagagtatatacagaatatacttggtaaggatgtacttcaactggttgaagcagaagtgaatgggtgaacttgagtgtggcctgccactcttgattatttaatatcctgtagcatcggtatgttttataaaacaaattgagagcattagtcatttttagtcagtgggttatgtagagatttgttaagagagcatttattgtgacagtttgagtctgtacaacatccttgcttagaaaccaattaaaatgcctcaaggaatggatacgtatgtagttacttcttccctttctagatcccaaatgttaaagggtattatatagacccaaggaagttgtttggttttaagcacttagccccatgttgaacaacgactctaggcagacatacttgatgagtgaagcaaaaggaggaaaagcaaaagtcaaaaatggattttgattatgggtagtgatcaaggaatggatgatgtgggaacagtgtgtaaggagtatctggagggaacatgaaggggagtaattgtgtcagacaagtttgagagagtcatttatatgacatttcccccttgagattttcccttttatcttgaattttgtattactgaagataataaatgcatatatttagctaatgtgaaacaagtgttttctctggtggattgacttttttttttaacaaagatatgtgtattatatataaaattaatgtggtaaccttttcatcttattctccttagaatccatcagtagaagaattattttgtacactatgtgtgaaagatcaaagaatatggggcagtcaccagttgtttacaacctggtttgcaagtggcataaaaaaatattagtttgtctgctgaataaaattaaacttatttttctctctgtagcatattaattgtattatagtatgccacagccacttccagtgcaatcctcctagtcttggaacagcagccaattccaggaattaagagaattaggttactttgcctagtggcacaaaaaataccaaggtattaaatcattggcttgtctgtttggggcacaatcagaaataaagtttagagataaaagttgatttgcatgctgttcacatttgttcatactttaacaggtatgtttttctatttctctccgatttatataatccttttgaaacagattttcagttgctgttaggtccagaggaacagaatgttaataaaattttaggttaaagactaaattcagaattcaactacagtaacttgatgctactggctgtgacaacattttaatctatctttggaatatttaagcaaatattaaaatatgtggttacctaacatggctatatattaaaatataaatgttatattaccctgtaacattttaaatgatttactaatctattatgtaaagtaatataagaagccagtttagtggtagaaatgttaattttattttaactttagtatttcaaaacaaagatgttatttttgaactcaaagtggtagaagcagagaggaggtgacaaactgagaaccttttgattttgttggggtggaacttggtctgctgttatagctgacattattactgtatctcaatgatttttgagattttgggaaaattgttttaatgtttcactcccaagcgctgaagatactccagaaatctttgccgttctgttcctataacatttgctcttccattttgaagctacaacagtgtaggatattttcagctttctagaattcctgtagaacctctgtattctaaaatctcccaggattaaggaggagaaaaataagcagaaagacatcagaaaaactaatcagtcattaggttctctggcaagtgaaaaatggaataaagataaagaatgtagtggttaatcaagagtaacctgtttataacatagactaggctcaaaacttaaacttgaaacttaacacaataaattaaaccatctttgtaaacagtagaatttaaagagattcccttaaacattaaacattaggaccttctgtggtgtcaccttattcaaactaccactgtgttacctctttttgactcttaaggctgccagacaccctacttgaaggatcctgttggaacctgtggaaataatacttacaagaacgttgcagctaagctggtccgggtgcagtggtgttacaactaatggatcacaaccagtcacggatttctttgttccatctccattcccacttcttcacttgactagccttaaaaaggctcatgcctgtaatcccagcactaagggaggctcagacagaaggatcatttgagcccaggagtttgagatcagcccaggcaacatagcgagacttcatctctactaaaaataaaataaaaaaattagccaggcgtggtggggtgtgcctgtattcccagctacttgggaggctgaggcaggagagtcacttgagtaataatggggtttgaggctgcattaagctaggattgcaccatggcactcaagcctgggcaacagagtgagaccctgtctcaaaaataataatgttgcagctaaaaggtcctaaagcattatgtgggccagaatatcccaaatctagttgtatgtcacatttaacatgggctgggggcagtggctcacgcctataatcccagcactttgggaggcgaggcaggtggatcacttgaggtcaggagttcaagaccagcccggccaatgtgttgaaaccccgtctgtactcaaaatacaaaaattagccgggtgtagtagctggtgccggtaatcccaactactcgggaggctgaggaaggagaattgcttgaacctgggaggccgaggttgcagtgaaccaagatggcgtcactgcactccagcctgagggacagagcaagactctgtctcaaaaaaaaaagaaaaaaaagtggcacagatcaattataaatcactgcttcaaggccagtgctctcactttgtacattaataatctcaggcccaaataagataagtgatatgtcaacgtatgttcactttggtctttacatggcagctatagtatacggaatattataagctcagatcgtcatagctacataactcctttagttggaagatcacgcgtaaatgcccatcaagagctagcagttctgcatttgactcttgaagaccgtggcatggcagacaacacttcttgagctgtaacaggtggacattaaatccatgacaggaggtagagacggccagattacttgagcccaagagtttgagaccagcctaggcaacatggtgagacctcatctctactgaaaaaggaggataatccaactctcttctacttcacattaatatccttttaatgagcatggtcagatactttggaaagttgtggagataacttcagaaactaaatctgaataaaaacctatgtgtaaacgatcatatagatggctgttagcaaagtggtacttttgtaaactttatagttgacatactatagtatatactacatatatacttatatactacatataatacatagaattatacataatatactatagtatgtcaactatagtatagtatatttgacacgtttaaaatgtacagtttcatagattttaagatacatatatacacaggaagccatcatcacaatcaagatagtgaacataacctaaatctccagaagtccctcatgttcctttgtgatcttgtctcctgccccttcataccgtccatccccagggaaccattgcattctgtcatgagagattagttttgcactttctaaaattttgcataagtggaatcatacagtagggacccttcaggagtggaggagggctggcttatttcagtcagcataattgagattcatccataaagtagcaagtatcaatactttttattatatattgattgtggttatcccacagtttatccattcacttattgatggacatttgaattccagtttttagaaattacaaagctgctaagaacattttagtacaactcttggtatggatagatgctttcttcttgagtaaatacctcggagtggaatggctgaattgtaatggatatgtgtgtttatctttcgaaggaaacaacagttccaggccaggtgcgatggctcatgcctgtcatctcaacactttgggaggctgaggtggttggaccacctgaggtcaggagttcaagaccagcctggccaacatggcaaaactctgtctctactaaaaaatacaggccgggtactgtggctcatgcctgtaatgccagcactttgggaggctggggcaggcaaatcatgaggtcaaaagattgagaccatcctggccaacatggtgaaacctcgtctctactaaaaatacaaaaattagccaggcatggtagtgtgcgcctgtagtcccagccactcgggaggctgaggcagaagaatcacttgaacccgggaggtggaggttgctgtgagccgagatcgcaccactgcagttcagcctggcaacagagtgagactctgtctcaaaaacaaacaaacaaacaaacaaaaaaaaacaaaaagtatttttacgtgtggtggcatgtgcctataatcccagctacttgggaggctgaggcacaagaattgcttgaacctaggaggcggaggttgcagtgagccaagatcatgccactgcaccccgtcctgggtgacagcaagactccatctcaaaaaaaaaaaaaaaaaaagaaaagaaaaaaatagcagttttctaaagtgtttttacctttttatgtttgcactcatactgcagcagatgagattttcagttcctccaaatccttgctaaccctacgaacagtcttgataattttgtcgttctgatatttgtgcagtgggtgcacattgtgattaaggactaatgatgttgagcatcttttcatgtgtttatttgcaaactgtccagtctttgctttggctttgtattcacttaatagtgtcttttgaagagcaaaagttattaattttgaagcccagtgtgtcagtttgttctttaatggatcatgcttttggggttgaatctcaaaaatctttgcctaactaaaggtcatagataatttctgtatgttctcttatagaaatcttacagttttaggcttaatatttaggtttttgcttcattttgagttaatttttatatgatgtgaggtgtaaatcagagtcctttatttttatatggagatatctaacttctagcaccatttgttgaacaattatcctttctctattgaattattttttcagttttgttgaaaatcagttgtctgttgtattctgtttatttgtctttcatgatgcctatactatactctgttgattctgtagctttataattagtattgaagttagatagtgttaatcctccaacttttttttttcaaagttgttttggttattttaggtcctttgcatttctttttctttttttgaaagaggatcttctggccagtcatggtagctcacgcctgtaatcccaacactttgggaggccgaactgggcagatcacttgaggtcaggagttcgagaccagcctggccaaaatggcaaaaccccatctctgtaactaaaaatacaaaaattagccaggcatgatactgtgtgcctgtaatcccagctccttgggaggctgaggcacaagaatcacttgaacccaggaggcggaagttgcagtgagccgagatcacaccactgcactccagccggggtgacggagtgagactgtcttagatagatagatagatagatagatagatagatagatagatagatagatagatagacagacaagatagatagactctgtctcagaaggaagggagggagggaaaggagagaaagaaaagaaaagagagaagagaaagaaaagaaaagaagaaaagaaacagggtctccctctattgcccaggctggagtacattggcatgatcatggcttactgcagccttgacctgggcttacttgattctcttacctcagactcttgtgtaggtcaaactataggcattcaccatcacatctaagttttttttaggtatttattcactctgtggtccaggctggtcccaaactcctgggttcaagagatctacttgccttggccttccaaagtgttgacattacagtcatgagccactgcacccagatgcatttctgtatagattttaagtgtagtccgtttcttccagaaagtgtggtggggggtgaattgggattgtgttcaatctgtatatccattgagaattgacatattaaaaatatttagtattccagatcgtgaacacggtatatctgtctatttaggtcttcttttatttctgtcaacaatataactttagtttataaatcttctgtcaaatttatccctgagtgttttatattttttgatgctattgtgaaatgataccagtttaaaattacagtttccagtattactggtatatattgatcttgattcctataactttgctgaaatcacttactagttctagaattttttttcttttttggtagattcttttggatttttaagttgtggaacttatcacctgggaataaaaaaggcagttttacttctttccaatgcagatgacttttttgttttttttttcttgccatattggatggaagggaaccttaagtatagggcgagagtgaacatccttgtcttgttcctgtttttgagggaaagtatacagtctttcattattatgtaaatattagctgtaggttttttgtagataccctttattggtttgaggaaattttctttggtttgctgtttttaccaggagtagatgttggattttgtcaaatgctttttgtgggtctgatcgagataatcacacaattttaatatagtgaattacatgacttgaattttcaaatattaaagtggtcttgtatttctgggttaaatcacattttggtcatgcaatattatttttttaaccctttttgcatttagaaaaaaagctgcagcttgctgccagttctcatgtaatttcacataaacacactctttgaggctgaagcaaatctgattttcagtgtgaaaataaaatataaaaactgttcttggagttatttctaaacagaactaacatcagaatcatctgactcatcagaatcatctgttttggaaaattcagattcatcaaattagtcttcggccaactgagaacaatgttaacatcacctttaggaatgttatgcaggtgagtttataattgcaaatttaattttttaaatagacatagctaatcaggctatcagtttcttcagaaagcttcactggttcatgtgtttggaggacttaagaaaaatctcatctaagttgctgattttattggcacaaagctgtttataatattccctcagttatgtgtagaatctcggctgggtggggtggctcacgcctgtaatcccagcactttgggaggctgaggtgggcggatcacgaggtcaggagttcgagaccagcctggccagcatggtgaaaccccgtctctactaaaaatacaaaaaattagccaggcagggtggtgcacacctgtagtcccaggtactcgggaggctgaggcaggagaattgcttgaacctggcaggcagaggtttgcagtgagccgagatcgcgccactgcactccagcctgggtgacagagcaagactccatctcaaaaactaataataatatgtgtagaatctctagtgataccacttttctcattttttttcctggtatgtctgtcttgagattagtaaattttaatgactttctcaaggaaccaacttttggtttcactgatttttctctatttttttttaactttttaaactttttttatttttaactttttaaaaattacattctttttaatgtttacagtggattttatttgctcttatttttctgttttcttaaggtggaagctcaggttgttgatttgagatcattcttttagtgctatcaatttcccactaagtacttctttagggcatcccacaaattttgctatgttgtgtctttattttctctttgttcaaaatacgttctgatttcctttgtgatttctcctttgacccaggggttatttagaagtgtgttatttaatttctgtacgtaatttgggattgtccagagatctttctgtggttaatttctaatttaatgtattgtgttcaaataaaatactttgtaaaacttcaatccttttaagtttgttgaaatgtattttatagcccagaatatggctctcttgataaatatcctgcgtaagaatgccatttaaaggtcagattttggaaaatttcaaaaaatttctttcagttttttggccctctttggagattggaattatatgtgtactaggctgcttgaagttgtctcacatatcagtgatgctttttatgggttattttttatttttttctctctgttttattatagatagttccttgttttgtcttcaaggtcatttttttcttctgcagtgtctgttctgtccaatgtgtttttaataccagatattgtagctttcctttttttttttttcttttttccttttagagatgggatcttgctttgtttccaggctggtcttgaactcctggcctcagcttccatatgtgctgggattataggcatgagccaccatgcctggccaaatattgtaactttcatctctaaagttttattttggtctttctaatatcttccatgtctgtactatttgaatgtaaggaatatagttgtaacaatggttttaatgttcttgtcccctaattttaacatctttttcaagtctgggttagtattaattgatttttctccttacaatgagtcatactttcctgcttttttgcatgccttggaatctttgattagaagccagacattaattttaacttgttttatgctggttatttttatattcctactaatattcttgacctttgttctaggataaaattaaattaccaagaaatggcttaatccttttgggccttgcgtttaagatttgctaggtggaaacaagaatgtttggggctaactaatcctactacacaacccttcttactgctctatgcaacatcatgtaaattgatgagattttgcagtctgactggtggaaatagacactattcccatccctgtgtgaatgcctggtactattctctgtaatccttttgggtgattctttccccagcctcacatgttttctttacacattttgaacactttgccgaatattcagaaatattctcctttggagatctgtgggagtatttctctgtgtagcattctctcctttattactagatctttcaaatttatttgtctttagtcttcctgggttctcatccctttctgctaaactccaggagtttgtcaagagtctacctgggttcttgctgtctgttctggggcctggaaaatctgaaggcaataaactttgggcagtgctagaattcacctagatgtctttcatggattattgtcctgtttcttaatgtctcgtgttttaaacgctttttcatgtgttttgtctattttttgtttattttttgatggtttcaggtgggacgggaaatctgatccctgttaatttatctgagttggaagtggaagtctgctactcactcttgatttctgtgtaataatttgaggtttgacttaatgctttagagcacattagactgtttcacctatccctctaaaggtttatgtatttatatgtcaaaaaggttataaaaacaaaacaaaaaaagcatagttttaaaactgcttattgggaagataagaattcactttacatttacgatctcatattttggcatattcggtatttcctccataacgcctactaaaattaaattatgtaaacaaagtacccaggccaggcgtgctggctcatgcctgtaatcccagtgcttttgagagccgaggcaggaggattgcttgagcccaggagttcaagactagccctagcaacataacaagaccccatctctacaaaaacaaagtacccagtacatatttgaggagtagaaaattagcatctactgaggtttatcaaatacccagccttgggccagatgctggagggacacagccaaatctgacagggacccgccctcaggagcccacattctagtaggggagacagagtcacagccgtaatgacagaaaccagtgcattagataagcaatactttatcttaagtctaattaataatttaattttaaaagttccaggacccttcctacatcccgagacattctaattctctgccgtttgtgtagcaattctttgaactgttgaaagatctcctgacaaattgttactgatattgtgttaagcaataatcttaaccttcccagtaaatgaactggaatgcccaattttaagtttctctatttatgaagaaacaaaatacaggggtcatagtcaggatactgcctatggtacattttaaaatttctgggtctactaggatataatctttcttaacctcttttgagatttgatgtcagttcaagggaagcattccattgatgtcaggaaggcagctatttgttgactgaaattctggtactctggcataagctcgttctaaaaatccacaaatatgttgttaatagaatgggaccatacttttcacttgggggcctacccgctagaggtgagatgtcatccttgagatgtttggaagactttgtgagatttttttttcttttgcaaactagacgtgcgccagcttctctgacctaaatgtagctccagtgggaatttcactatggatactttatcttaagtctaattcccctggtaacccaacattgctggttttagaatttaatagtcttcagaaattttttaagataaatttgctattttctttattatcttttaattacttttataacatggggtttttattgtgtgtatatactagcattcctttggacacaaagtagactataaagaaaatttctaaattctgaatgcagtttctcattgattttaattattgctatgttccttttgaaaattttttggctggctctggcaacttatgcctgcagtcccacccagcacattttgaggccaaggcaagtggtttgcttgagcccagcagttcaagaccagcctgggtaacatggcgaaaccatgtctctacaaaaaatacaaaagatagggcttggtggcatgcatttgtagtcccagctactcaagaggctgaggctggagggatcgcttgagcccaggaagttgagactgtaatgagctatgattgtgccactgcaatccttggctgcaaagtgagatcctatctcttaaaaaaaaaaaaaattagaaaaagaataaaaaagtctaccctaaccattttatatttaaaacaagtttgttcttttcagtgtccttacttttaaaatagttgaactgatttttctgggaatctttctcaaatacaaccttaaacagaatatatggatgtgtttctgatgtcttagaattattctaatattaattatttggtgccatagacatattgtagttctcagaggctattcatatgtatgagaaatttttcttaattgaaattttccaaagattgctacactcaagagttttttgaattctgtttgtaagctacctaagagtagcaaataggtttcattctcacataccaattccaatcttttgaaacagagtgttgaggagagttctgagagcttttggacttaggaaggataactaagacaggatcagccaaaattgtctgtttgtttgggaaaaggggatagagtgatgggactggtacgcatttttgttctctagggttggtaagaggaatttgggtgtaatttgtgtacatcatgaaaacatgccaatgaaaccaaatggtctgagttcagatgcatttaatccctatattgtctttttcttggatctcattgacacatatttctattctactcatcgacacgtttcttctctaagtctactctaatgacacaatttctgctctaatccacaaatacttggacattctagctcttctcattgtcccaaccttttaaaacaacttcagtaatagcacctttcttaacctctggggtgataaaatggtgctacttccaatgactgtttgaggccttatctatagggtaacacacagccatcaaagtatagatcaaaagctcaaaaggtttaagttcatcagtagaaaaaccagggagtttttttctcctgttctagagaaaaaagctcacagattgcaggactgtagttaactagtatttatacttgtcctgggttgaagcaattgtaatagtatggttgacagtaggtttataaaatacacttttgtagttttgtatgatttttagattttacttggggtaaaattggaagcgacaccttaaaaagaactttgtgggaagaaatgtgtacaattgagtttccctgttaagttcttttacttatttgctctttcattggcccttgtatgtgtagttgttagaagtggggtgaaggtaaattgtgtagtggagagaaccaaggtggcagaattccagctatagcattgtttcttgctggtgagttgttagcttgtttgtgagtgctgttttcatgttctgtcagtttcattaatagacaaaacagtgaaattaatgaaagtctactggcatcttcttttttattttttatttttattttttggttaagatacaggcggaagtgcagtggtgcgatcataagctcactgcagcctcgaattcctgggcttgaggaatcctcctccctcagcctcctgagtagctgggactacaggtgcatgccaccatgcccagctaattttaaaaagttttttttagagatggtgtcttgtcatcttgctcaggctggtctctaactcctaggctcaggcaatcctccctcagcctcccatatttgacatcttcttgaacctctgtttagggactcttcttccctgcagataccattcagtgcctcaaccatagtttttagaggaccttgagttctacaaactagttactaataaaattccaagaccttagcttataatgacttaacatggttaccttttctaatattgcttatatttgagtaagaggaatggatgtttttcagatggaaaaaattattttggtagatgtattcttctgttatttcttaaatcttaccaataagtagcagtttactctattcatgggtgatcttgacctggttgatttttttctatcaaattcattaaataagagaatttttgtacacttggtttaataaatgaggcgagtttttatgggacctgtgtctcttaaagttctaatgtactttcttcagctaccaaattgtcattttaaaaacaaagtgaagatcagaggcaaaattcataagggattatttgcaaattacatgttatttcgtttagattctttatgcacaccttgactaagttttaaaatttgctgggcaggttcaacagctaggaaaatctgttaaaattgtaaatttgttgcttttgttactctaaaattatcatttgtactgttttcttaaaatggtctttagcatcttttataccttcacttttgataattttctgaactttgccggatattttgacattacagactgacttttaaacattcactttccccccattgtcttacgcattaatagaagggaatgtcatctggtgttttgagtgtgcaaaataatatttatggaccattcatagataagttatttttaaaggcatttcttcttaaaaatttgaatatacacggtgtcttgcagtggttcataaagtacttccagcattggtattttaatttgagcaacagtttttgtgtgagcaacgacatgagtgagcaatatgggcattgcattatggacttgattgagcaatgtgggcattccaatagggacttgagtgaacaatgtgggcattccaatagagagacttcagtgagcatcgtgggcattccagttgttacttgagtgagcaatgtgggcattgcaatagggacttgagtgagcagtgtgggcattccagttgtgacttgagtgagcaatgtgggcattgcagtagggacttgagcgagcaacatgggcattgcaatagggacttgagtgagccatgtgggcattccaatagggacttgagtgagcaacgtgggcattccaatagggactttagtgagcaacgtgggcattccaattgtgacttgagtgagcaacgtgggcattccagtagggacttgagtgagcaacgtggccattccaatagggactcgagtgagcaacgtgggcattccaatagggacttgagtgagcaacgtggccattccaatagggactcgagtgaacaacgtgggcattccagttgtgacttgagtgagcaacgtgggcatgcactagggacttgagttagcaatgtcggcattccagtagtgtgacagatattcttttggttggtgtctcattgttcattttgaagatttaacatgttttttctgagttccttctctttcaacctcttatgaccctgcagactgattatgaagtttccattaaccagaataagaaaatgtacttgcagactactgtagttaactgttcatatagcattttatcttatgcatactataaaactgttatatgggtatgtaatacagaacagacaaaataaggaaaacattcttttccaaaggactcaccgtagaattcctttaacagagatctctgatggtatgttttgaaatttaatacctataaaacttcagttagattctgcatttcagaagcaaatctattgtatagagccaaatacaactatatatttttacagcacgtttgtttttttgggggagatcattaaagaatatttaccttctaatcagattaaaaacttttctttgatcttttatgtgttcgatttgttaatggtacagttggtatcagattcttctgattaacagcaactggcctgaatctactataaacttgtgagagaaacttaaaattggcccttgttattacttaataaacctattatttttcttattaatttttttaatgaccatcatgtttactcttctaggcagaaattatggtttattgtgtaatgggaataaacatgatttgtggaattatacctcgttcatatactcactgtatttcttgtgaaagccgtaacatctctaagcatagtttcttcaattgtacaatgtagaaaattactttgtagaattattacaaaaattcgatgagttaggctgggtgtggtggctcacatctgtaattccagcactttgggaggctgaggcgggcagatcagtttaggtcaggagttcgagaccagcctggccgatatggtgaaaccccatctctacgaaaaatacaaaaaattagccaggcatggtggcacctgtaatctcagctccttgggaggctgaggcacgagaatcgcttgaacctgggaggcggaggttgcggtgagctgagatcacaccactgcactccagcctctagtctgggtgacagagcaaggccctgtctcaaaaaagaaaaaaaggaaactgctaaagttccagagtagctgtattttacattcctatcaataccgtgtgagtgcaaagtatgttttttaaaaaaggaaataacatgaatgtccaggaaaaatggagtaattgttgattgtacagctgtatcttggaagactgtgtgagtcatcagaaatgttatgtagtgttttcattaagtagaaaagcagaatctaaaacactattatctcaataaaggcatagaaaatagaagttgttcataatggataatttgaataagaatgttataatatgacaagtttatgttgaaggatatttatatctaacttcttatgtcattcctagtagctgatggtacccttcagtagaaaaggagggagagggaatattcttccctaattcttgtttgtgtcactatttaagggtttggagtattcactgtctaggaaaataaattacttttactaagtgtcttgctatgtgctaggtgctttatgggaaagttaccctaacagccttaagaatattcgatcctggccgggcatggtggcacacgtctgtaatcccagcactttgggaggccgaggcaggcagatcacttaaggtcaggagttcaagaccagcctggccaatatggtgaaaccctgtctctactaaaaatacaaaaattagccgggcatggtggtacatgcccgtgattccagctaccagaaggctgaggcacgagaattgcgtgaacccgggaggtggatcgtgccactgcactccaacctggatgacagtgagactgtctcaaagaaaaaaaaaaaaggaatatttgatcctgtggtttattgggtatagtcaaggtacctgatacagcctgtttttcttaccatcctactatgagaatatataaataccttaattatttaaagttcttatcttcattccttttaagcatgcaaaactatatgtataaaccgtatcgcagaatagcacctccaaactgaggactgatgttcattgtttttgttctggcagctctagcttcgattttctgtgattcctaatatttcttcctctgctagctcatctctaatagaagttctctcccattttaggccaggcgtggtggctcatgcctgtaatcccagcactttgggaggccgagataggcgggtcacttgagtccaggagtttgaggccagtctgaccaacatggtgatacccttcctccaaacccctccccgcacaccgcagcccatctctactaaaaatacaaaatattagctgggtgtggtggtgctcgcctgtaatcccatctactcaaggaggctgaggcacgagaatcgattaaacccccgaggaggctgacgctgcagtgagccaaaatcatgctactgtactccagcctggacaacagagtgagactctgtttcagtaaaattttttctcccattttatagtccattgcctcattccccacaaaatgattttgtctcttttattatggtagaattgtctgtcttgcagaccatatgatctgaccagcctttctctcacatactagtatttaagattaaataaattaaaataatttcttagttttgttttgtttaaatactgttgtggtaaaggctgttttttgtcttttatcaaaaatgtaagaggttgaacaacaagaaattagtgtaatggttgaatatggcaatttcatatgcttctgacaaatatttcttaagcctcatttgtttttgtttgtttgtttgtttgtttgttttgttttgtttttgagatggagtcttgctgtcacccaggctggagtccagtggctcgatcttggctcactgcaagtgccgcctcctgggttcatgccattctcctgcctcagcctcaaggagtagctgggactacaggcgcctgccaccatgcctggctaatttttgtatttttagtagagacggggtttcaccgtgttagccaggatggtctcgatctcctgacctcgtgatccgcctgcctcggcctcccaaagtgctgggattacaggcgtgagccaccgcgcccagtctagcctcatttgttaaatacgctttcattaaggtagcctaggaactcagccaccctatagattgttgcttcagtacagaaatgagtcccacatttaaaagaacattttatcactgtttgtggtgttttaatatccagacttttgtggtcttcatgttggaatcaataatatatgtcaatatattttggtatatattaatatgtaattatattttaatatatggaagcatacatcatatattaaaatatatgcataactgaattaaatatatacatttaatgtatatattttaaaaattagtaatgcttctaaatgtcagtgagtgccctcagcttctgacaatgcttaatctaccggtgtctaaacagcattgcagtgttcctgctgcttaaatcatataggattcattttagctaaggctaaattaggggaataactgaagatatatcggaaatggaaaccccaaagagtaatagctatgaattctgtaaatgggaagacagaccagcctttactgtagcagtcaatatatagagataaggtcttacactggtgtttttgtttgtttgtttgtttttttaaactactgatgcctcagtcctacccctggaaatatgagtaaaatggggccaggacaacagaaagttgagagcttctttttgtactggctttaaaagcaaggatctaggccgggtgtggtggcttacgcctgtaatcccagcactttgggaggccagggtgggcagatcacgaggtcaggagtttgagacgagcctggccaacgcagtgaaaccccgtctctactgaaaatacttagctgggtgtggtggcacacacctgtagtcccagctacttgagaggctgagacaggagaattgcttgaacctgggaggtggagtttgcagtgagctgagaccacgccagtgcattccagcctgggtgacagagtgagactcagtctcaataaataaataaataaataaaattaaaaaataaaagcatggagctaggtcagaaatagctacagactgagagtaatcactgtaagtagtgacacaaagactaatctttgtgcagtgtggaaagtacagctgggttgtttctttgattcctcctgccccattgagccatacctacagagagcagctgtgaaaaactatcactttcaacaatgaagaatagtaatatgtcataatggagattatgaagttcagaaaggggtaaatgcagttttggggagggctgagactaagagagaacacaataagacaggcaattaagactgacatgaaagatcagtcacattgataggatatactcttgatatgatataatgagaatggcagtttaccgctgtggttttcttttcccaaaacccataaccacagcctaaccatgagaaagacatcaaacaaatcccaatttgggacattctgtagaatacctaacccagtattccttaaaaacaatgaaagtcagagatactgtcacagccaagaggagcctagggagacatgacaactaagtgtaatgtggtatcctggatagaattctagaacagaaaaaaattaaaaactaaagaaatcatgtatgagcttcagttaataaggtatcaatattgtttcattaattttgtcaaatttaccatactaatgtaagatgtcactattataggggaaactggctgtggtgcacatgagaactcgttgtactatcttcacaatttttctgtaaacctaaaactgttctaaccctaaacctagccagtaatggtgccttggtaattaaaacaccatgctgatgagtatatgatttctagctagctttatgaaccccatgatagaatttggatatgtcagtccaaatttatcactcttagtggaaaatcagggtaggttcacttcattgttaagaatacaacagtaacattattcgcctttgtaacttaaaacacatcccagcgtcacataccatttgtacccccgcctcccctctcaaacccattgcttccccactggccgccccctaccccccaccaaaaaaaaaaaaaaaaggaaaaggaaagaaaaaaggagaaggtaaaaaggaaggaaagaaggtaaaagagaaagtagaaagagaggaaaggaaggaagaatggaaagaagaaaactcacaatggttggcaaataaacctctatatttcaaaggttattgtgaggataaaactcttatagttatgatataaaagatttaacgcggtgttggtacatgttgttggaataattcacagtcaacataatgagcagtgatacaaagttcaggtgttgtagcagacgtattttgagtttacagatattaaacagtgaaagtaaattttgggtttctgttaagaaacacgtaaaatagccattagagttttgtggatatgtcaggtaaattttgaaggcattttagaaatgtcaacttgctaactctaggtgactaaaataggtaagctttttataaataaggtagattgagaaatttttggatatgaaattaatgatctgtatgatgactgatattttattttgcaaatcagcataatgtttactgtgtctcttcttgttaaagtgttttatttacctttcctgtgtttgactgtctattcttgatattatgtggtcattatttctttgcctctgtcattatgtactgtttgcatcttttccgtagtatcttgatcttcaaaataaccaggcatgctatttacatgaagcagataagcataacccatgtaaattttcattgagtcactgagaggtggtgtgtgttttttcccttttactttaaaatgatttatttatttatttatttttgctggcagccttaataatgttttcataaaatatgatcgatttataagtctgttttacatgcctttccctttttgtcttagtgctttgcttctaagttgcagatgcagtgggtgaacaataccctgtgtggtgtgacaggtaaatttcccaatttacctgccgtaatagtgtgctgtgtaatgccattcaatcatctctgaattttacttgcctgattagttaagtgaagcagattttcaatttaaatgtaacttcatctgcttgattaaaaatgtaacagaacattatctgctgcaaataaatttcagtggaagagatgatttttgcctgtttaaaaataacatctgtttatgttggctggaagcagacgattaatacctctctaatttcgaggtttaccagtccagctcacctgtctctttgcatggatagttgaaattgatggctgtcgagtataaacatttacctgttgatgttgagttgatggatttcttttttaaggataatacagaatcccatcattgggcattcatttatttgctgctcatcaagatgattgacagttttgccaacaacatggaaaaaggatcttccttcatgatgcatatgagaaaaattttacccctcaatgatgagtgccctacagaaaaacatattcttgtagattctttttcatagttggtatttatttgaattttgagtttagagtccataagtataaatttaagtcaagtgcatagtaaattagggtagtacacccctgctggcatttttcatcaagtgattgtatgtataggccataaggacaaggagaaagataggaaaaaccaaaatggttattttttttcccctgcacttagcatagtgttaggcatgtagtagactactcaataaatatttattgaatttgaattaaaaattaggcacagagtatatttgatattctataaatgtaatagactagatgtcattggtttaaatatgtagctgaaaattagagcagaaagaaattacagaatgctaattggtctgtttatgttttttaagtgaaaacttccttttaggagcttattaaaagtagatttttaaacacagaattctcctgtaaacgtcctctagggggaaaaaagacattgcatactgttaattttcctaactggtaagtaaaactgggttaaaaaaatagattcagaaaattctaatgttaataatacagtggtacaatttggtggttttaaaagtatatttagtatatagtaaaacactatttgttttctgaaaattgctgtagtttcacaatctgaaaaaaacgtcttgtctttttgaatgctgtatttactttggtggaatattttgaacatgccacttatttatagaggaataattttgcattcttttggtaacatttttgttgtcctttgttataaagcaaacataaatattggcttgtctgttactgaattgataaattgcaaactcttattttagttgtaatgggttttggccacattgtgtatgatttgagttgaaactatttcaggcaggtatttgaggagattttctttatcaaaatgcttcaaatcacaaatcaacaaaattaatttttgttctcaaatatataggatactttattctaagtgagactatataagatatttaatctctaattagtagatttggtcatttcggatgatatgattgttttatttataaaacaaatatttggagattgttttccaatacatcaggttattccttgatatttagcagaagtttttgccatagtgcttaatgaaaacagctcaaactgttaaaatacatttttggtataagtatatttggtatgttctatgctttaattattaatttgtaattttattttaacaaattactttgtgtagtttttttttagaagcagatcagctcagtgtaagaaacttagaatattgttttgtagctttctttgttatttcgttgtccttcctttttatttgtagtttgcaagggtagatgagatttttttttcagtttcacttgtccagatgatatttaatgtagaatgaataaactcagaagagcagcctttacctaaggaagaaggtatgactacttcaaattgtttcatcacttagtttgacttcagagatttttgctctgtgatttgcactgacttcaaaactttttgcatgtatctcaaaagtgggtgagaacatttatagcagcattattcataataaccaaacttggaaataaacgctatatccatcagttgataaattgacatacaaaatgtggtatattcttaaaatggaatattattcagtcataaaaaggaatgaagtacagattcatgctttaacatacctgagctttgaaaacacgttagtgaaagaaatgagacaccaaaggccacaaaatatgtgattccatttacgtgaaatgtccaaatgggcaaatccatacagacaggaagtagattagtagctgacaggaaggagctgggagaatgtgggaatggaaaggtactgtaatggatgtgggatatatggaagatgttctggattatggttgcacaactttgtgaatgtactagaaaatacttgcacatttcaaaaaggtgatttttctttatttttataaatttttaaaaaaaatttgagatggagtcttgctgtgtcgcccaggctggtcttaaacttctgggctcaagccatcctcccacttcagcttcccaaagtgctgggattcaggcatgagctactgtgcccagcccaaacagatgatttttatggtgtgtgaattatatcaatgtttttaaaaagggagttgaaatatataaatcgttggtttatagagatattattactagatgagctagtcattgctaattctttgacatttatgctgtaatctgatgctgtgaagactgaaaatgttgacagggaaataggctgcaagttcgaggctggccttttaatgagttgttaaaaaatacaaaattacagttgtcagtcttgtcttaaaatcttaagaatagcatttcaatttttgttgataatacaggcacatttatctattagcattatttttgcttatttttttacatatcttctaatgattacagttgtatttttttttctttttttctttttttttttgagatgtagtcttgctctgttgcctaggctggatgtagtttcgctctgtcacctaggcgatcttggctcactgcagcctccgcctcccaggttcaagccattctcttgcctcagcctcttgagtagccaggattacaggcacacgccaccacggctggctaatttttgtatttttagtagataaggggtttcacttgtattggtgaggctggtctcaaactcctgaccttaagtgatccgtccacctcagcctcccaaagtgctgggattataggcatgagccaccgcgcctggcccagtcgtagtgatttcaaagatggaacataagacagccttgtggaaaatcagtctgtcttgaaattgtgttgttattttttgaggtttcagtatattcattttagtgtgagagaatgacatcctttaaggtacatggtggatacattgttaaatcgtagtaacatccttctgtgagcctagtgctgggcacatgtttgcaatcccagctactcagcaggctgaggcaggaaagtccctggaagccaggagctcaaggctgtagtgtgctatgattgtacatctgagtagccactgcacttcagcctgggcaccatagtgagacccccaactctaagcagggtcaggggagagaaacagaaaagaaatccttcaggaaatatttaggaagatagaaataattatattaaaatcaatgtaaacatttatgaaatgtaaatatattctatcaaaaattatgttgattaaaaagttttcttggcacttttagattaaaaaccataaatcagcagtagcttatgcaatgttcatgtgcttgaaattagacatctctttatttaatacataacagtacattgtataccgtttgaagctgtgtgaactctcattttgtgactcagaggagagagaataggtacttgaatataaaatattagttcacctttcaaaatcaatccagtgtgaaatattggttgcctgagaggtcagtcatacagaattgtgtgctttattatttgaaatgttatttgttttcagcctggtgcagaaatccttttccttcagttatattttagaaccactgtgtgagtacattactttttaggttttgggcctcatggacattcttagcaacttgttttcacagccctttctttgatgttcatttgaaccatagcgttgttgatattcagagtattttgacctacaaacataaacattttatatggttcaaactaacagttaatttacttcagtttaccaggcatggatgagtacagtttcaatgctaatagcaaatattttacttattttactttcctgagcactttacatgttttcactgttttcctcctcacatcaacaaccccaatgaattttatctctcatttataaataaagaaataggtgtaaagagataaagtaatatgcccaagtaagtgggaaactcaggatttgaacccaactcctcttgctccagagtctacacgctgaacaacaatgctattccgccctctacccttgatctagtcccctcttggccatctggtagttttgtaaattcaagcatagctccttctatggccttgagcccctcctttccctgcacagtagagaggggttggacttttattggattgtgtttgtattgtaattgtgtgtttttccagatgtgttttctagccacaggaagagatactcaaataagtctttcaacagtatctattatgctgacattcacacttgtttgtgttattttgtacgttttggaagccttctgtagttaagtattagttgagctaattccttactgtttttgtgtcatactttgttatggagcaacgtaatatgtgtatgttgttaactgaatcgatagaaatctaagaatcaacttggtctatatcatctgatgattcaggggctggtttggatcattgataaagtaaattattccctgttttacttaactccttagtggcagttttctagattcccattattggcttgcatcaaaaaaaaaaaaaaaaaggcatttaaaaagttatgccagagctgggagagcaagaggtgctctatgttttactgatggggcctggcaggatcctattcctgctctcctgatctcttatcctgaatcccctgacacctctatttctggaatttttctcttttgtacttggtatcagtaaggaaatacatagtacgaataccctgagagagatttccagctttatttattgatctgactgtctttcagctgataaaatgctattttattacccaagttttaacctctgtctggtgatttgttgttgttgttgttgttgttgttgttgttgaagttcaggctgcatgtgggataggtttgctcaggcatacttcttaggaagtagtcacttgcatgactgtttttgggataactctttgagtatttggagaggtctattgtaacttctgaaaggcattgtttttacgtatgaatgttctaaaattcattctaaatggtcatgaaaagaaaaggattcacattttagaatggcaatagtccctgaggactattatgtcttttagatttcctgtgggtttctaggaatgttagtgtaacttagatttccacctacctgatttctggatgtgcctattggaacttgctgagatctttttttttccttaacatgttgtccccttgacccgtacttcgaaactaaacatattattttatttgcttacacttcaggaggcaattggcagacaccaggccaacagtctctagaggtcgtgggtgccatctacaagtagtcatggttttttattgtattttaaagtccgcaaaagatctcttgctatgttaggtacacatactataggtgatcacctcctatcccttaggagttgtgatcatctaccatcatttggacactcatttaggcagtcttcctgggtgttccatttgatctggtgttaaatgataaggtgaatatcaggttacaatttagagcctttaaataaataagatgatgtattattttgcatataaatgtacactgttcttgtttgctacttaaaggaatgtattagtttctgagggctgctgtaacaaattaccataaactcaatggcttaaaacagcagaaatttcttctctcaagagttctggaggccagaagtctgttggcaagcttggttccttgtagagctctgagggaggcctgtctgtgcctcttttctggtgtctggtgtggctggtaatcttaggcattccttggcttgtgattgcatcactccagtctttacctctgtcttcaggtggctttggtctcaaatttttttcttctttttcttctatggacacctgtcattggtttcagggtccactctaaattcaggataatctcacctcaagatccttaattatatctagagggaccctgtttccaaataaggtcacattcagaagttcttggggttagaatttggatatgtttttgtgggaggggacactatttgatgcactatcaggaatatctgttcattcatgcattttatttatttatttatttatttatttttacaatttcagccaatttgctaagcatcttacattatacagtacatatgttatactttttttctgggacataatattttggagattgtattatttcccatctcattattcagtaaacctgaactctcacactgggattttgtggggttgggggtgtgtggaaaatctgttttattaaacttagtttgctataattttttcagattattaaaaacatgttctaaacatgagtgtatgattatgtttagtttaatattatttattttttagttccttttactttctatcccaccatttgtggatagcatgtaaataaatcttgaaatttggggcaagagaaacgtaagaggttaatccacttctaaggctacatcattttcagagtaactgattccaaggatgagcagaatatatttatttaatagctatgagagatggattttcataaacttttatccaaagtaacaagattctcacattcagtgtaaagggtgttatgaaaatgtaaagttcattaatatgctgtatatttttatccccttgaatgtaatttagagattatatactgtaataggatttatgacattatactgtttaatctttagggtgttacaaacacatcaaggacagttggcagtaactgaagtttgcttgcattttaagaatgcattagtattgctgagtatcatgtactttcctaaaaataaagaaaattatactcttagaatatttacagattcaaatatttttttttccttgcaggccaagaataaaatctttatgaactaacaagatgaattaaagatggaatgattcatttctatggttaggttttaattaatacatgggggatgattttggcactttttcaaagaatttgtttctgtgtatctgaatttgcacctactctgtaacctaactgcgatttataaaatgaaacaatctcttctaatttggcacttgataggtgctttgactttaaaaggcaagtgtatttttctgtcacgaatatcttgtcattctaaaataagtaaaaacaatggattgatgaaacttcttcactgcttttttctttgtgtataacaaatacattgatattttactggcataaaatgtgtattttagttgagtctttaaattattgctcagtgtattttgtttattttaagccattattacttcctttatgttggatttggatagtttagattgtaagcttctaaagggcaaataatacatcttttcaactgtggtcttgactagcagtcccaaacctttttgacaccaaggaccagtttcatggaagaaaatttttccatggacaggggtcgggggatagtttcgagatgaaactgttccacctcagatcatcagacattagattatcataaggagcatacaacctagatccctcgcatgtgcagttcacaatagggttcatgctcctatgagaatctaatgcagcagctgatttgacaggaggcggagctcaggctctaattctgactagcctgccggctgctcacctcctgctgtgtggcccagttcctaacaggccacgaactggtactgattgttccccagagtttggggaccccttgtcttgacagtatcatgcacaggtaggtacttttaagctgtttgatattattgtttctacttcgggagatgggaagataaatggaataaaatgagcaaagtggcagtgccattaaagatctgtggatatctgatttctcacagaattcacagaattacccttcattaaaagatgcaaatggcagttttatgaagtctttttgccctgttttgtgttgggtgttcagtacagatgcaatttttttttttttaaattttcgatacagggttggttgaatccactgttgtggaacccatgggtatgaaggcccgactgtgctgggttaaaaggtcttttctgttagaacttaaaaatactatcctacttccttttgtcctctgtggtttccgatgacaaattctcagttattctaattttgttactttgtgagtaatgcaagtgaaacttaagaatttgaaaatttgagttttcagccattatttactcaaatgctttttctttctccactatactcttcttcccttctggaacttgaggaaatgaatattagacctcttgataactattgtcctgtaagtccttgaggttttttatttttatttttatttttttgttttaagagacagggtctcattctgtctcccagcgtgaagtgcagtggtgtgatcacaactcactgctgcctcaaaattggctcaagcaatcctcctgcctccaccttcagaatagctggaactacagatgtgtgccatcatgcctgactaattttttttatcttattttttatagtgccaagatttcactatgttgccccagtctggtctcgaactcctgggctcaagtgatcctcccacctcagcctcccagagtgctggaattaggtgtgagacaccatgcccagcccctgaggttggtctctcnnnnnnnnnnnnnnnnnnnnnnnnnnnnnnnnnnnnnnnnnnnnnnnnnnnnnnnnnnnnnnnnnnnnnnnnnnnnnnnnnnnnnnnnnnnnnnnnnnnnnnnnnnnnnnnnnnnnnnnnnnnnnnnnnnnnnnnnnnnnnnnnnnnnnnnnnnnnnnnnnnnnnnnnnnnnnnnnnnnnnnnnnnnnnnnnnnnnnnnnnnnnnnnnnnnnnnnnnnnnnnncccctccctcctatcccctccccctctcttcctcacccctcccttccccctccctcccctccccttcccctcccctctcctcccctcttccctctcccctccccttctctttccccctcctctcccttctccatctcccctccccctcccttctcccctcgcccctcccttctctcctcccctctcccctcccctcccctctctcctcccatctcctcccctctccccactccttcctttcttcatttttttcccatctctcagatttaatattttctataaatctgtcagctatctagcctgtctaatgagattttcattttggttattatatttttcagtttctaaattttgcatttgattcttctttatatcttctattttttgaggtggctttccatctttgttcatccaagagtgtttgcccttgttggaacatttttataatagtggctttaaagtcttggtcagataaatccatcatctgcattatttcagtgttggcatctgttgtttttttctcattgaggttttcctgattcttcatttgtcaaattattttgggctgtatcctggacaatttaagtgtcatattttgagaccttttgtcttggtttaatgctgtgatgaatgttgaattcttttcccccgctgagactgagttttgcacttgttgcccaggctggagtgcaacagcgtggtctcggctcactgcaacctctgcttcctgggctcaagcgattctcctgcgtcagtctcccaagtagctaggattacaggtgcacactaccacacccagctaattttttctatttttagtagagacgcggtttcaccatgttgaccaggctggtctcgaactcctgacctcaggtgatctgcctgccttggcctcccaaagtgctgggattacaggcatgagccaccacgcccagctgatttttttttttaataggcaatttggttgggttcattcaggttgaaagttctaaacagccttctgtaggctgtagttccaatgccagtttcctttacaaaacctttgcagtcttactcagaactgtccagtgtgtgtgccaaacattggactgtctgggaactgagtagttgtctactccatagtttagctctcagagtctgtggtatgttattttaggatcaaccttatgcaggcatagtttggaagggtgagcacaaacttcatggggccactttcctatgcttctccttcttcataatctctctggtactttttggttgcctaatcctcccctctttatacttccagctacagagctggagcttgctttagttactctcttctgctgcacatttcttgcagctgtgcccatactggggccaagtagcaagaagacagagaaaaaaataagcaaaaagaattcttgctaccctcttgatgatgaaggtttgttccctcagagttttagacttctgcagaccccactgctgctgctgtcactgcttccaccaccatcttgtttgctcaggggctgggtatggaggatgttgaaaagaataaaaaaaatgcctagggaattttcttcattctatctaagtattaggagattctgttcctgctcctcaagctagaactagaggcttctcctggagttctctttgtctatccctgagtgcctgcttccagatttcagctgctttgagtctagggcaggagatactaaagggggaaaaatactaaatcatctgtttgatattaatatgaattcttattttattccccagtctgccttaactagctgctttatgcatcatccaggttttctggattcagtggaaaagacaaggtagtgtgtgcttattccatcttacttggaattggaactcctggtatatttggaaatcaacaaaaatgttaaaacgtaagaaacaattgtaactctaatgtatgggtttccccatattctttgttttatgcttcatgttgtttaagaatacatgcattaggctgggcacggtggctcacgcctgtaaatcccagcactttgggaggctgaggcgggtggatcacctgaagtcaggagttcgagaccagcctgaccaacatggaaaaaccctgtctctactaaaaaaaaataccaaattagctgggcgtggtggtgcttgcctgtaatcccagctacttgggtggctgaggtgggagaattgcttgaacccgggaggcggaggttgcggtgagccgagatcgcgccattgcactccagcctgggcatcaagagcaaaactccgtctcaaaaaaaaaaaaaaagaatacatgcattagaacccacacaaggaaactgtcccgtttcagggtacaccttttatgggtgcaactaaatgtgcaaatttagtaaaacattttgggcacttgaagctattgcaacttttgctgcctcagagaagcaggataattaaatttttgcctatggaaaaagtaattttaccttagttttatgtcttttctaatttgtcataagattctaggccaaagatctaataaccattttctaggaagtttctttttgtttgttgtacttatttgaagtgcattaggtttctcttctttttaatcaccagtatattgttttgaaagtatattgaacattttttgtcatattttttctcctttctcttttatatttcttacctttttgtactttttgttttttacactgtatttctttattttagattcttcacccctactctccatgtcccctactcccaccccactaaaatggtggataggatttatgtaggggtgctgctctgagagtttgaactctgattgagagactaatccccacccccgaaggctgtctgcatcagctgtccccctggctaattagaattccaaagggcattaataaccatttaaattaatccgattatacctgcagttgctaaaggtaaggttcaggctgtttaaccctctgttaatgaacgcaaacatgaatcaaaactgggtaggaattttacagtttattttcatttctgcccaaaggaagaaaaccatttcacctgctctttgtagcagtctagtttacaacaatgcaaggaagccttgccattaattcagccttcattaaaagaccaaagctaaattgctccatcttgtgaaaatgcatttgcattgtttgtgaaagtcctttgggggcagagctgtagaaaaccgcctaacagcaaataatcctttagttaaatgcaaaagtgttataaagagctaaaaattctctttctagcaactaatgttgcaatgataatttgacagtagtggtctcccaaggggcattaaacaggtggaaaaagagctaccatttcagaactttagttaaaaaggagtggaaattgaatgaccagtattaagagtcagaagaaagtctatagggttatgtagtccagtttctctcatataggaattttttctccaacatagtggacatggttacctagtttctttgtaaacatctcagtaacagcaagtgttaataaggcagcccatctcataatcagataacttgttattgtcagagaatcctgatctgaaattagtaactattatttttctttcattttaccctttgagccatattgaattatttcagtatagctcattgccctcattcctattccctgacctctccatattttcttctttagatcaggtgtgtattacaggagatttttgaaatgtagaaatatatggaagaataaaatgttcagtaaacatgattgtaagacagcacttttcatacatggttgaagttgaaaaattttaaagcaagaaaaggaccagaagaaatatctttccatgtaattggctatttcttgaagagttattctttttgctgttaatgtgtgtgtcacctatggaaaagtctagattcaataactaagtcagaaaaattggtttgagaaaaagacatctactggaatctgtacggcagtccttcaacaaagatatctattagtcgatagatgtcatccccaacacctgtctacaatgactcatgtcttttcctgattaccacttatagatttttccctttttaaaaaaactttacacaaaatgtaaacttcatacattgggattattctttagtctggatcttttctttgaatgaaataagctttgggatgcttatttagatgttcaatggaacagtgtggagaacagtaattgtgtttgggctaaagaattaatccatttagtcatgggaagcactacttagctttccatagcagctgaattgtggtgcaactttggggctattttaggattttaacctcaaatagaaatgaaagtttatttgtattgatgaacatatgcttttgaataatgagccattgacttgatttcaatgaaagtgaaattgtttttcaattcagttattttatgtttgaacatgaattgaaagctacatctttgtattgctgaaatttaaaaaaaatcaataactttaacattttaacagaaagtgttttaataagcaattattagggtggcttcagaagggtattgtagctttaaaaatttctgacggttattagtacacttttgtactgtgtaaatcagacattggaataaaattacttttattaactaaaattctcctacaataggaaattttactgcattttgacatctagcaggccaaagaaagatgttcagaaagtcttatttctgtctcagaccaataattatcccatattttgtataaaacattctttaaaattgttagtttagatgatcacacaaaagtaacttttccaagggatgtaagttgcctgccactgtactacagtctggcaggttctacagcctggagaaaaatctagtagccttttaaaaaaaaaaaattgtgttaataatagcctgtttatgttgttggattttctgctgtttcatgtacaattttatatgagctaccaattaatgcagtttatatgcagtttctatcctcagcaaggaatgaggtggtaatcctgccctgctcttactacaaaagctgggcacatatctaccaaggaaaaatttgtccgccttcaggaatttctttctccctctttcctaatcagtgcaaatccatcagtcacctgaaatctcatctcctccatgaagcttgtcctgtgtgacccttgtaacctgatatcctcatctttaaaattattatttgaatgcctcatccctttccctcttacagcgttttcattatgattttcaggttcacactcaaactcagacattgctgatgttctttgaactcctctctggcacttaacttgcctatcccacacaattaagcactctgaccaattttgtagttagggtgaagttttcatacaaatgtggatatattgaagacaaactctaaaaaattgggtacttgctatgctaggatagtggcctttaatatattaaagaatatttctctttttgagttagcatttttaatagaaaattagataatggttaaaactcaaattggagtacttgattcctggtgatttaagagatgatacagaggtcctataagagactttagagcttacttacatatcgtaagtggtaggtcaatgtagagttaagtagcaacggccttgcaactcaagagcaagactgttagataatataggtagagaatcaagcaggatgaagcagtgtatttagtatagggaatggaattatttggagtaatggtactgggaaaacatgtctgaacagataatagagagtgtgtggggttaagacagactctagtggcactgggaggattgggatagagcttggtgttgcacagatattgtgccttaagcttaagtgatgtattgatgattttcatggagcatttattctttttaaagggaagatttatttgggtgttgtcctggttaacttcaggaaggcttctgtgtgaaattatgctggaattcgttttaaggatgtaaatcctataaatccacagcttgggtgacaaattgaatctctaacaaatagaaggaatttaagagaaaaatcctgttgtcaaagaatagctgatattacaaacagttattatatatacaaattctctatccaaaggatgtctttgtatgttgttgagatcattgtcactgcttactctcaggtgggtatagcagaacaagaactcagatttcttggattctcttttttctttttttttttttttttgagatggggtctcactctattgcccaggctagagtgcagtggtgtgatctcggctcactgcaacctccaccacccgggttcaagctattctcatgcctcagcctccctagtagctaggattacaggcgtgcaccaccacacctggctaatttttgtattttcagtgaagacggggttttaccatgttagcaaggctggtcttgaactcctgacctcaggagatccgcccacctcagcctcccaaagtgctgggattacagacgtaagccaccgcgtccagccagattctcatattttttgtaacagcagatcccttataagtgcatccctttgcacacctaaatgcctaaatcatattgttgataagtttaattcagcaaataactgttatttagccactagggacgttgcagaagaaactacaaaataaagttttttttgtttattttcttctcatctcctttagatatatgaaaaatgctgctcattagcaatgtttgtgatgtggtcatgcaaaccaatgtgttttgcgtctaatgtagcagtttaatgagtgggaagatgactatcctggggtgaatatgaaatgtggcatggaaaaggaaacaattgcttgtgaatcctggagaatctggtaaagggggaacttaaatatgtcgaggaagggaaaggcattgtaaaccagaagaatagatagggagaacagtttgagcaaattgttttgggaggcatatttaatgtagtgaagacttaatgtagtagtgatttaatgcgaattagctggaagagacactacctacaaagctcataatttagtccaaattctgaggagtaacttatactaggttggtaatggtactactgcaagtaaataaaatattgccaaaataattttgaaattagagtcaccacgatttaatgacttgataaaaatgttaatggagagaagagagattgtaagtttgtgtgattttttaaaataattcaactactgatagcaatagggaagttgaaaggaagggcccagtccactttagttttagatgtgtagagtttgaattttctgcatttgattttggtgaaggaattatgagggtacttcaaaaaataagactagaatgtttgtgtcaggcccagatatataaatatatataaatatttgggcatggaaagaaaatcccaggaatcaaataatgtgccagttttatgattttgacacactcaaacctctgccttttgtttctctgggtcactctgtccagtacaacaataggcttgctatgtattttggatgaacaatgaaagagagtgaactgttctttaaaaagctgtttattatagtgaaactttatctgtagatgcagccactttgccagatctctgatggaactaacaataattttgtctagttaattttaatagtacgtcctttgtcacaggttgttcaaatgaacaaatataacatgatttttatggcaggtaaagaagaatattttaaatggaaggagacctgatgcaaagaaaaaggcattatttttagtggtgcagcgattttgggacttattatagtagaacctattctttatagagattattttgtttgatttttctattttgtttttctttgctatctagctttgttacatagtgaccatttttagcactataaaacttaatgtagtaatcagatttagcagattattatttaaagctgagcatttaaaattaactttttgccctgtgttcatttttgaatttcctgtttttatataaatatttgattaaaaagctttctgtttaataaaattgtgttatgattattttaatgtcgtttgaggacatttaaaaaaccctcccaaaatatctaggatattgttttaatctgtagccttctcagtagaaattaaaaaaattgggggatacacttttttgtgtgaaggataaagctcttgtattaatgacaacattaggtactgggtagtattttagtcattattaaaattattattaaaaattctgttatatattgtaacgtattaaacatttgagtatgtgttgagttcatcatttgaatacatagtgctgttttaagttatttgtgtgttatgaagaaaaggtcactatgttttatttttataaggtggaaaaaacaatccagaatgataatcaaagccaaggtagaggaacttgttaaacactttaaaattagacttccccccacccccagcctctagtgtgatactttgaaggcagctgctacagataaactctggagccccagatggtggttgcctaatcctcatgagaattcatgtcctggaagcagctcttatctctccagacctgacattgtctgtgagcttttgctaaggagggaataatataaacatgctatgcatgagtttcacttcttgaatatgtcaaagacacaggaagttataacaaagtataaaaagaaccgagttcacatttattgaaaatgttgttatttaaagcacttgatgctagcttgtgatgatgagtgatggggtgcagtctggaaggaaaggcacagtgaactgttttttattttggaaacgaaaatgccagtctcagtgttatgatttcagagatgtagatttgtcattaagtgtgcagtacccagaataattcagttatttgatctaatgtaagaatgtaaaacaatccatcctgtaaatgaatgtcctggcttttatttcctatgcaggagtcctctctgtttcgaaagtcaaaacagcaattgcactattctggatttgatgttttgttaaaaaaaaaaagtttctgaaatctgatctgtgagatctgggccagtgacaactataagtggttgtctctttggcatagcagccaaatattctgaagtgaaattgtggatactttatctacttcaggtagtgtctcatttaatatatgagcagggatgttggcactgtcatcatgaataattgttgaatcacccatcacttgatgttatgactgtctataaggaaaaaggggaatttcccatcttataaaatgacaaaatttgtaattaaatgggaaactgtagtgttcctcataacaaagcctaagcctgtctttcaaatctgatacctctttctctaaataacctgttttccaaccactctggccctcttacttgtcctagaatctgtggtgccctgttatgttttcatatcttttttcattttatttcatcattctgcagagcccttcctcaaaaaagcttctattcatcctgtgagatgaatagacccagctaaaatatcacttgttctatggagtctttctcagactgaataattttattttctcccagaatgttacaaccagagtaatctttgtaaactacagatttgatcatgcctcaataaaaaagttttaatggtaattaacatttcatatcaaactcagtgtatcagcctagtggtctctgtcttcatttgtccagccgatcacatcttctctttgtcacagaacaacttgctgttatcccttcctctgagcctactttgtggtcacttttgccctggagtgctcacccgtctgtctattttagtcttcctcatttttaaagatctagagtctatgaggaattaagataatacaaagtggaaagtgttaggtgccaaaagagaaagaattcagttggcatacttatgttgtctttgcctcctctgttcaagtgggaggtcctaatgatagagcttgctccctcaaacttgtgtatattctgcagtctctagtacagtatcttagggaagaggtagaggaggagataaatttgaaagattagtaagaaagaactgagtaaaacctgggtttggttagataggataggtggtagagtgaaggaagaggcatcaaagactcgtgttcaataccttttttgcattgaattaattgatgattgacccttggtgtgtttgtcatattttccttgctctttgaaattcttttgcctaatgtgtgctaaagtagtctgaaacagactgcttaccacctgtatcttttagccttctacccactgagctccttttctattgcttcctatttttgacacatttgccacaccctcctccccacctgtattctctttttggggttctgtttcccatagtaatttaaatggccaatgaaaacatgccccagatgatactatttttcatcatgctctcctgccactttgttttcctgtttaaaagaacaaacagcaaaagaaaaagacacaagctgctagtttgtagcctagctggctctgatttctctaattcttgtctttgctgttctgtcattcttggtttctactgtttctttttcttttttcttttctttcttcttttttttttttttttttcttgagacggagcttcactcttgttgcccaggctggagtgcaatggtgcgatctcagctcgctgcaacctccacctcctgggttcaagcgattctcctgcctcagcctcccgagtagctgggattataggcatacaccaccacgcccagttaattttttgtaattttactagacacagggtttcactatgttggccaggctggtctcgaactcctgacttcaggtgatccacctgcctcggcctcccaaagtgctgggattacaggcgtgagccaccgtgcccagccctactgtttctttttctgtctgtctgtctgtctgtctttctctgtctgtctgtctttctgtctttctttctttctttctccttttctctctgttgtccaggctggagtgcagtggcgcgatctcggctcactgcaagctccacctcctgggttcacgccattctcctgcctcagcctcccagtagctgggactacaggcacccgccaccacgcccggctaattttttgtatttttagtagagacggggtttcacggtgttggccaggctggtctcaaactcctgacttcaggtgatccacctgcctcggcctcccaaagtgctgggattacaggcgtgagccactgtgccaggactgtttctttttcttaccgcgctctgctcccatttttgccttcccatttgtgcgccaccattattaaatgctttatattctctcttttgattgggttacacgttcttttattcttcctattcttaatcctttgtgttttctctgttactttgtttttctaatttcctctctctttgttatctttttctgttttcttctccatgttcacttcctttttttattatctttcaactctcctccttttttcactcttcactgtgtatcattaaaaaataaaaacaaacccgaaaacaaaacataagctcttggctgtattcaggcctcattttgtgcttaatttccatgtttcctgttgctttaattagagctgacaccaagttttccccttcatttatgacttttcattgttttcctcatattccttacccataacaaatcttaaaaagctataatcccagctgttctccatcaccatcatgtccaactccatgtgctttctttttccatttttcttccagtgattttatgtatgtgtgtttattaaagtcctaaaatggggaaagtatggctgatgtgcaactgttgagtcctgcaatactggcttttctgcctcctagaagccttggtggtgagggtagaagcgggagccaattcataaaaagagagtgaagagtcaaataagaaatttgagggtgtttatagctgtctgtaaattatgctttgtggaaaatagagttggaagtgtaattgaggaacaggagtagaccagaaatatgaaccattgaaaggctctctgcttaaagatgcttatcttttcttcccttcccctgtgactcatacctactgttcattagaaatgcatgtgttttaactggtcttttttaaaatgaaaatgttctgtaatgttaagtcttcatcacactttgtgtgacttaatcagattgtgaataggaattttaattttgagtgtgagggaaggacagtggagggagagcactaatgggtagaaactctcctgtgtaacaggggctatgggagacaagggtatcattgcatgctcttgtaacttttgttttgaattcattgaattttttaaatgaagaagatattagtgagagtctagtttaatttatttattttataggttaaaaaacgatccagagagatttacttgttcaggtcttacagcttgttagtgattgaaaagggccagttcaatccattgtctttttaatgccatattatttttgtattacagtggcttcctagccattccttgacttgaagtgagaagaaaaggatcaaagagaaaaagagacaaaaagtaatatgtatatgtgcccttccaccttctcattcttttcttcctttattgtcagcatattataatattctggttttccatatctgaagaacagatcctgcttgtacggctaaggagctgttttattgcaagtattagaaaacaaaaatattagagctttattgaggaggaaagtaataatatattttaaaggttttctatgctattttatttgtgttcatcaaaaacacaagatcactttttgtgtagaaaatctgaatgggaagcaaaatctgactggagaatccagtggtccagagttactttaagaagtgaatatgtttaaatagcagggcccaatgacatgcatcctagggcacttaaagatgtggcagataccattgcagaggcactagcaaattaccatgcacaggatgtgaaaagggcagagtaatggtagggcttctaagccaccacttttgttaatctagtgctctttaccacctcccccaaagctatagaaacaaagaagctatacaaaactcatattatctgcattgcactgggctttgaagacaccacttatccagccataccccattttctcaacttacgcatcctaaatgtaaatccaatgtgggttttaagagcttgtataatgtctatggaaaatagagagtagaaatagagcttctattcacaagtgtttcttgaatcccattttttagagtacatttagcatactgacttatttgatcctctaagcaactcagaatgtctctgatataatgcataaaaataaagatagcacagtgtgcaataaaaaagtttacattctttggattcagtttgtattatcaatccagacctttttatttgtttgtttctattatgtaccttgtctgcttccacaaaaggatttgagatagattgggataacatgcatgtacaatagtaggacagctgaagataaagttaaagggtaaacagtcaagtgaggttacctcttctaggaacctgaggtaaaatgattattgtatttagatattaaatttagctctcagctttggcagttaaaaccaaagggaaacataatgaattgtttgttttaattgtttgtttaattaaagagaagcacattacttttaaccttaaatcatggctatttaaatacacatgtattatctctgtaaacttttttgtttgtttttagaggcagggtcttgctctgttgcccaggtggagcttactgtaacctccacctcttgggctcaagtgatcctcctgcctcagtctccccagtagctaggactcagttgtgagccaccatgcccagctaatttttaaatttttttgtagagatggggttttactatgttgcccaggctgatcttgaactcctggactcaagcgatcctcctgccttggccttccacagtgctgggattataggcgtaagccatcacgcccggcccttataaactactttagagtagaaaccatatggatccacgtttgtctccatcacagtttttagcacaagtgaacaaatggttgaatatgatttatttttaggaaagtaacttgttttggcactagaatctaagagaaaatttggcttctggaatcttatgaacaaaatactgagtaatgtaagttattgacaactatttcagccaaagttttacaaaagaagcaaaacagttctttgtatagcccttgcttttgttaaacccacagaaactacagggggcaactaggaagtgcagggtggtatcttgaacaaatgagattctgagtcgatggacccaaatctagtcccatatctgctttggtttctgtgacattggggaagctatataaccttactgaactttacagatttcctcatttgtaaaatagggctaataataattttctcaaaggcattttggtttgtttaaatgaggtaatccaggtacgcaacagtttcttttgagagaaaatatttttctttaaaaaattttttttttactttaagtaccaggatacatgtacagaatgtgtaggtttgttacataggtatacgtgtgccatggtggtttcctgcacctatcaacctgtcatctaggttttaagccccacatgcattagctgtttgtcctgatgctctctctccccttgcccctgcccagtgtgtgttgttccccgccctgtgtttatgtgttctcgttattcaactcccacttatgcatgagaacatgtggtgtttggttttctgtgttcctgtgttagtttactgaggatgatggcttccagcttcatccatgttcctgcagaggacatgatctcattcctttttgtggctgcatagtattccatggtgtatatgtaccacattttctttatccagtctatcattaatggacatttgggttggttccatgtcttttgtattgtgaatagtgttgcagtaaacatatgtgtgcctgcatgtttataacacagtgatttatattccgttgggtatataccgagtaatggaattgctgggtcaaatggtattgctggttctagatccttgagtaattgccacactgtcttcaacaatggttgaactaatttacgctcccactagcaatataaaagcatttgtatttctccatagcctcgccagcatttgttgtttcttgactttttaataatcgccattctgactggcatgagatggtacctcattgtggttttgatttgcatttctctgatgatcagtgatgttgagcttattttcatgtttgtcagccgtgtaaatgtcgtcttttgataagtgtctgttcatattctttgcccactttttgatggggttgtttgtttttttcttgtaaatttgtttaagttctttgtaaattctggatattagacctttgtcagatgggtagattgcaaaaattttctcccattctgtaggttgtctgttcactctgatgatagtttcttttgctctgcagaagctctttactttaattagatcccatatgtcacttttagcttttgttgcaattgcttttggcgatttcatcataaaatctttgcccatgcctatgtcttgaatggtatcacctagattttcttctagggtttttatggttttgtgttttacatttaagtctttaatccatcttgagttaatttttgtatgaagtgtaaagaaggggtccaatttcggttttctgtatatggctagacagttttcccagcaccatttattagatagggaatcctttccccattgcttgtttttgtcaggtttgtcaaagatcagatggttgtagatgtgtggtcttatttctgaggtcactattctgttccactggtctatatgtctgttttggtaccagtaccatgctgttttggttactgtagccttgtagtatagtttgaagttaggtagcatgatgcctccagctttgttctttttgcttaggattgtcttggttatgtgggctctttttttggcttcatatgaattttaaagtagtttttttctgagataaaataattttctgaactaagcatgggcttttcagttaggctgactttggattttgctgtttgatcatgggcaaagcacttaacatgtctgctatggtttgaatgtgtcccccaaaggtcatgtgttagaaatttgatccccaatatggagatgttgggaggtgggatctttaagatatgtttgggtcatgagggctctgccctcatgaatggattaatgcagttattgtgggagcgggttcatgacaacaggaaaagtttaaccccatcttaagtgtgctttagcacctgcacagtatgcaggttaattctcttggcaagaatcttgcccttaactggtttgtttacaacaatgccaacagcgtgcagggtaacattgtagactcttccaggtttgccatggtaacatttgtgaggtgttcctttttgaacagtacctattcccttgatgtctgcagtatcacctttcttgtagcttcacgtgtatgtggccaaaagaacaactcttttctaaaaggcctggagaacattatcaggttcctcccttactagaaaatgagagtgtcccacctgaaaaacaactagtatactttaatacactttaaagtgactacataatatttcacagcttagatgtgtcatggtttatgtcatcttggctctgttgatgggtactttgtaagctccactttttttgagacggagtctcgctcagtcgcccaggttgcaatgcagaggcacaatctcagctcactgcaacctccacctctcaggttcaagcaattctcctgcctcagcctcctgagtagctggaattacaggcacatgcgaccacacctggttaattttttgtatttttagtagagatggggtttcaccatgttggtcaggctgatctcgaactcctgaccttgtgatccacctgccttggcttcccaaagtgctgggattacaggcatcagccaccttgcccagccagctccactttttttatttggtgaggaaagttgaaatcatgcatttgtacaattgtggatttgttggagtttttttttttttctttccgcttagtcagttcctaatttgtacattttgaagccctattcttaggagtattatgatattttggtgaattgaccccttagtcattattaaatgtttctctttattcctgacaacgtcatttgttctaaaatctgctttttctaatattaatataggcagccactcttgctatcttttctgccattttttagttcttttatttttaacagatatatgtctaaaaggtaggttttgtgtggaaagcatgtaggagggttctttccctgatttcaagtagttccttccatccccacacaagagaatagtactaagccagaaaattgatgaaaccaatcttcagctttctttcccctccctctcttcccctcccggctttctccctcccttcccccttccccctctccctctccctcctcctccccacttctctctcattcctcttccctcccgccttcacctttcccgcttcgttttggcagggtctccctctgttgcccaggctggagtgtggtggcgcgatcttggctcagcgcaacctgctggactcaagcaatcctcccacctcagccccccgagtagctgggactacaagtatgtaccaccacatccagctaatttttgcattttttgtagagatgggttttgcccatgttgcccaggctggtctcaaactcccgggctcaagcgatccacttgcctcagcttcctaaagtgttgaggttacaggtgtgagccacgatgctgggcctagctttctatgtggccagtttctctggtatttttctctggaaattgcagcgactttgacctgtgtacattctgtgatctgtccttgacactcaattacgtagatggggtctggtttgactacctcctcccttacaaggtggccaggaaaccttctcaatgtaagattcaacttacctatttcctttctctccaggatcactattctgccatgtctgtgtgtctaaaagtgtttcaggcagaggcagggggatctcttgaggctaggagtttgatatcagcctggataacttagtgaaactgtagtctctccaaaaaaaaaaaaaatcgttggtcatggtggtgtgcaaccgtagtcccagctactggagaggctgagaagggaggatcgcttgaacccaggagtttgaggctacagtgagctatgatcttaccactgtactccagcctggatgacaaagccagactctgtctctaaatgaatgaatgaatacagttgtgtcttcttattgtttagagttgaagtatatgtagtccttgttactccatcataactgaaagtgtaattttgctttcattcttaaatgatatatttggagcatataatctcatttgaaagctttttttagcacttgcaatgtgtatttctactgtgttctggcatttattattttttatgatgtcagtagtcattttttttctatacgttaatgtgtcatttttctctgccttctttcaagattatttctgtatttaaactttctagtagtttgtgatgtgcctggttgtacattttttgtatttttcctggttggagatcaaacttttatttattatttctccagagtttttttttttttttttgccttgtgttcaagactaaaacttttttcttgcttcattttttccttctggtcattcttgtattcctgtaatacatgtggtaatccgttgctgtgtcctacagtttatgatgctctgtttaaaacaaaaaaaaaatcgattttctgtttgtcggatcggataatttctactgatctatgttcatgcctactaacttttccttctgtcatatccaatctgctatttagcccattcagtgatttttaaaaatatttcagatactatattttctacttctaaattttccattgctttaaaaaaataatttctatttctctggtgtgatttcctatctgtttaatcattgccagcattttttttcaaattaataagttttatttttgatatttatgttcatcgttttatcactttttatgaccgaggtttagtgaatagttttaagtttttgttaagtaaattagtaggccctcctgtactctggccctcctttctgtgttagtggtgttcacatcagttttttaaatgaatgatttggtgctcctggtttctccagtgtattttttgttacggcttctgcttttgtttgtttgttttcagacaaggtcttactctgtcacccaggctggagtgcagtggcatgatcacacatcctcgacctcctgggctcaggtgatcctcccacctcatcccctcgaatagctgagattacaggcgtgcaccaccacacgcggctaatttttgtatttttagtacagatggggtttcaccattgttgcccgggctggtcttgaactcctgagctcaattgatccacctgcctcggcctcccaaagtgttaggatcacagacgtgagccaccactcccggcctattacagcttctgaaacacagtctactagattgccttcaccaaccctttctcacttctagctttaataggcaggagtgctgcttcagcaaaaagaagggtgagagcaagtttagaaatggcagtgttgaatgaggtgaaatgagaataggtaatgtgtaacagatcatattgagtgatgattatgggctggcagcatctctagtaatcctgagctgctttctggtacttacatctcatgtccacaccagcagcaaaacttgtcactttaagcctttgaaatatacttagaatcagaacctggttacttcttacccatctactctgccatcactttgttccaattcaccattatcatagtttgaactgttggagtggtgtctagatttttgttcttcatttttccaccaagcagctagagaggtccttttaacacataaatcagacaatgtcatttctttgcacacagctcattcatttcatggcaaaaaaggctatatatgatatggttctttatctttctgatcttatctcctaatactatcacctatcaatgctctgcttcagccacattgactgctttttaaaaaattttaaaaaatattaataactttattcttttctgtttttactggggctggcataataaaatacaaccgcaattttttttttttgagatggagtctcactctgttgcccaggctggagtgtagtggtgcgacctcagctcactgcaagctccacctcccaggttcacgccatttgcctgcctcagtctcccgagtagctgggactacaggcgcccacaaccacgcctggctaactttttgtatttttagtagagacggggtttcaccgtgttagccaggatggtctcgatctcctgaccttgtgatctgcccacctcggcctcccacagtgctgggattacaggcatgagccaccacgcctggccattttttttttaaagttccaagtatattcctgtcttagagcttttgcaggtatcgtgccctctgttgtgtatgctttccaacctcaatatttacatggctgtcttcctcaattttttcaatcttgctcaaatatcatcagagagaattcccctcacctgtataaaataacatctttgtctacccttttcattttctctcccccttttcttaatgttttatatgcatatgtatgtatacacatgtgtgtatatatgtatttaatggtttcactctacctgttaaagaagaaccctttttgtttcatttctgcatccccagggcctagaaacagtactcaaatacttcttgaatgcatgactgaataaactggataaatatttgtgtttataagggaaatcagtgggcatatagcagcattaggactctggagaagtgtggagtagttaggtaggggtgtgttctggagagaataagttactggagtggacatgttcatgctaaagattatttgtgggcagattacttgggcagatagtaatacatgaagtcagaagcctttctggattattggtttctctttgaatccaccaaggacagtttttttttctcttcatttgaccccatgatataggattaggtttctttctttttctgtttcttcttcctgtttttttatttatttttatttttttattttttggcttcagagtgagcaagctttctttcaccctttcttggctctctggtttattgtcatagccagtcctttcctgccagcttgattgtcttccctctagtggctggctctcatctccctggcttcttttttgtcaggaagggtgttgtgtatgtgcactttatccctgaatgctaagagaggacttgtcaaactgacagttggtgtgactgctggctgccacttgacatggagaatgacatctaaaagtctgcatttgcagccgtggaccttcaagagactcatagaagaggctgtactttttcagtgagaaataaccacatctatgaacatttagtatttataatattaaaatgtatcctttcactaaactatatttagccctcatactgttcatcctatcttatattactgatctttttcatgtgataaataagattatgtagaaaacaccaagatttttcaggagtagtgtataataatgaacaaggtttatttcatttgtttcttgtgtgcattacatcattcatttccctcccattttgacatctgcaatggctccctgatatctactaaatataactatttaaccagcatctaaggcaattcataatatgccccaacctactttttaaaatcttatttcttagtcccctcacagattttctctaccctattccactggtttctaaacaggttttttttgaagcctcttaggcattcccttggaaaggtaggggtcaagtcaccagatttctatcctcaacctttaggctttaatctcttttgcatattttggtttctttaaaatagggctctataactaaaagaggtttgaaagtcactccatttgtctggtcagatgattagtctctatgtctttcagtctgtctctgcctctttctcctgtacacatactccctagggccttatacttaaacattttcttgtggctttacttttctgtgtagttccttctgccaggaatgctaatgtctccagttgatcattcatatagtgagttttgctggttagctggaacagtgtgacagttttaaacattttatttttatttctaaagaatttccagtaagctgggaattaagtgtttcgcatgatcaaaacgtttagggattaatatatgttttgttaccttatgacattgtatgaacgatggagaaagacagatttttacaaatgttagaaatgtaaagtcttgaattgggtcataattttttcaatgaaggtgtgaagtttaagtttagtgggagagagtgattcagcatacatatggttttacttgtagggttttttggtttgtttgttttggggttttggttttggttttggttttttaataacataagctgtatatgcagccaagatagattacattatacatattatttttcttccatctttatcatcaaatactgagttctctcacagtgctttgattcacactagagatttttttttatttataatgcagataagtagtatgttttgtaatgatagttctcatttctggatacttttaaagcttcagttttcatgtcttagtaataggatgttaattatgtgatattattttatctttaacatttttcactgtagaatattaatatggaaatgttgctcagcagtctgcaaaggactgttgctagtgtaaaacattaagtcatttcgcttagaaaatctgtggctagggccgggcgcggtggctcacgcctgtaatcacagcactttgggaggccaatgtgggcggatcacgaggtcaggagatcgagaccatcctggctaacacggtgaaaccccatctctactaaaaatacaaaaaattagccgagtgtagtggcaggcgcctgtagtcccagctacttgggaggctgaggcgacagaatggcatgaacccggaggcggagcttgcagtgagccgagatggcgccactgcactccagcctgggtgacagagcgagactccgtctcaaaaaaaaaaaaaaaaaagaaaatctttggcaaaatcactggggatgattttacctcccaggatcattttgataatgtctggagacatttttgattgttacaacctagtggcagctggggaggcggaggaggcactactggcattcagtgggtagaggccagagttgttgctaaacatcctgccactaaataaatgtttttgtggcccaaaatgtcagtagtaccaagattgagaaaccctgagccaatcttctaccatacctaaaaaaaaaattttacttagaaatattttaatttgtttgtacaggcatactgatttagtcagccattatcctaatgattcctttaaaaaaatttttggagtgggaaaataaagactttttctactttagaaaagagcagatctttaaaaaaaattgcttttcttaagggtgtaattgtgaaatagcttgctttctttttctctttctctttcttttctttttagttggctatctgaatcattgagatgaactgaaaattagatcttagcaaataattctgccaacagtggaactctaaggctctggtatcagcttaaggcagcccagccttacttcagagtccccatcgaacagatcgttcaccttgttggatgaattgcttctctctcaggattaattaagaaaatgttaatacttttcttcctcttcttgcttccttgacccctaaacacagtgttaacagcttctctacctgtacatcaacaatatatcagtgtatacaccttctgaatccttctatatctttctccatgcttgtccaaagaacacatgcacagtagttttggggtcattgttttttttacagacttctctgagacatacctttttcacttttactatgtaagtttccctggttgatagagggcttgactttttaatagctgtaattatattctatagaatagacagagtggatgttcggaatttactgaactcttcgcttagatattcaactgttttctgttttttaaaaccattttaaacaatattgcaaatacatgtatacttttctgctgaatttttatttaccaataaaattggtttagtaatgtttagtaccaagaaggattaatgaggataaccacaaattatttgagcttcaactttttttgaaagttgtatttgaccaaaaggtccttcctccacacaattttgaagataatgtaattactgctcaacctgacctggatagtgttatttccttgtttaaagggggcaagcaaatagttttagctaaaatgacaatataacagaaaacctgtagttccacaggatgaataaagacagacttagaaattatattggtaaatatgttattttaagaaatattagttaaaatttcaaaagcagatcattcaaggcagcaacagaacccttgttagttgctttattgatacagggatcctaatactgtctgaaaacttttaacaaggtgtcaaattcagaatatgctttttattgttagtaatgtctatttatctgatgattcatacttagtaaatgcataaatattgagtaaatgttttagattcattgatctgcaaggcagatggtataagaatagcctggatacatgaattctaatcctacttgtgctgttgttgactagtaccaatatgccaagttttcacctcctgagagtgcctttcctttccttattgtaaaattgattgtttctaaagtgttttgattataaaaatttctgatttattatcttgcacattgttttaaagaaatggatgataaaatcatatacttatttaatattgcatatttccatttccctggctcagtgcagagtaaatcaacaacattgaaaagctagttgggaatcggagatgatagatagctttttctaagtttttaggtccttaaccaatatttggtatgagattcgctcaatggtgtgtatgtgtgtgtgtgtgtgtgtatttgtgtgttagaattcatcagacaagaaaattaatttctattttagatattttacaaagaatcacttattcctaggattgttccccaagacatctgaaatcttaatttgcatatctatgtggcaaagctttaaatttaagttatccagtagtttaacataaaatcatactgaaacactcattaacacatttgagtatactatgtaagttcagaatataaattacttagtactgagccatgctgcattaagttaatctttatgttgttagattatttttatgttaaggaaacattatcccagattcggtttttctagatacatagaaagggacatactggatgtttttattatgttgaatgaagctgtgcattgaagctattatacttaagaaacatttttatgacagtttagctttttcagctgctttcattatgttgtgttttttagaagtctattcagggtatttttaatgtcttaactaacaatatgatttttgagctatgtttctgtcgtgttgtttctcatcactatatggatagaattagttatatagtaacaatgcctctgtgctcctttaccaccacaaaatacttattttattttaattcttatttattagttgaattatttattacattaatttaattcttattttctttgatgttttatgaagcagagtttattttcataattgtgtctcataattctgtacaataattgttggaggagtatgtttagtgaaaacaaattaaaggtggaagagatactattcttcctcagcattggtaataatgaagctcaatttcaagtcatatacttttttgttatttgggtattgaatatcagtttttgtgaaactaatattgcaacctatacagttgaagaaagagatatttctgatgtaatcttataaatcagggtgtaggaaaataaaaactttattttgtagattaaagctcaccctatgttacattaaattttaataacattgatattctgcttgctttatgaaaccttttattacaaacagttatgaatatgaacatctcatttgactactgatgaacagagggaaaaatctaaattaaaactttaaataccactatttaattacccaaatggctttgactgtgttaaagagtgtctgggattattctgtttttcaatttgttttaatgcttccttggtaaaagctgatggattcccaggcccattgctgtcactgatgaactatataaagataaatgacattatggtaaattccacttaatgacacatttttaattttcagaacacagacattttcaggctagtgaatgaaggctaattacctcaagatcagaacaaaataactcctcatttcgaaagataatagaaaagaaatgttgcagattaatgatgctatttatctttaaaggaaaaaaattttatctttatccagatagcatagctccctaaggagcgtggttataaaatgaatctgaagtcgcaacttaataggttattaaaattgtgagtgcaggctctcctgctttagtctttccataaatttaaattgaaggtctgctttattcaaaaaggagcagcttgtttatgaggccagtgggagcagcacacgttactgacaaaagatgcacttaacttcattctaatgtcttgcttctttatttctctgaatgactgtcacctatttgaaaaagtattttgaaattttgttaccactcttaattgatacctaagtggaagggccatacttagacttgtttaagattaaaataaaaatgaatgctgtaaataaaagctgtaaagcctttactgcacacatataaatcaatttgtaattgatttaattgtgtgtgtatatttttaaacattttaattttgttatataagaggaaaatatcttggcctatgaggggttgattttgtggtcacagttggaatttatgtaggaattgttcaataaatcattattcacagttaaaggattagcaataatccttttgctacactcccacacaactaacaaagtagtgactcagagaatattacttgatcatagaggctttaaactgttcctgacatcctaaactcctgtcttttgctgtaggtaatagaactgttatttctttactaacgaggtcatatagcattttctgtaattttcattcttgtctcttagaaagtacatgaattgcctgtatatggttcatatttctgagccacagaaaaatgtttgtgagcatgaaaggaaatagttgttgcttgcatctgatagaaattttattatattattgtgagacattattttatttatacctttccaattttatttgctctaaatggttagaaaacatatgtttatcttggccatacgcggtggctcacgcctgtaatcctagcactttaggaggccgaggtgggcggatcacttgaggtcaggtgatcgagaccagcctgaccaacatggtgaaaccccatctctactaaaaatacaaaattagctgggcatggtggcacacacctgtattcccagctacttgggaggctgaggcaggagaattgcttgaacctgggaggcagaggttgcagtgagccaagatcacaccattgcactccagcgtgggcaacaagagagagactctgtctcaaaaataaataaataaataaataaaaagtgtatcttatagggagagcattatctcattgcccatggcataatgttgacataaaattttctattaagacatttcttagaacagccagaaaacggaagtctttgtaattttaattgtagtatgcatttgattttatgttaactgttatgaaagcctcttatttttaaaatgttcttaagtagttttgactctgtagattaaggataatttctaataataattattaaatttgaaataagatattcatatttactcaaaactgtaggaaaatactataaaatgcactttatcctctatctcacttttctttttatttaaaatttcaataatattcctacaaggctccctttattctttatttgctacaggtgtatctatcttacagtgacttaaggagagaagctgatgagaattctgaaggttatgttttatagttagaatccttcagtgaaaacacagatgaatattttttcttaatactaaaataatgtgtttatataattaccttatttctaattcttaacagtatccgtgaaaataaaaagaaatgtttcatgcatatgagagaaatttcagcaattatttgtatcttctaaattcatttttaaatgtggcaagcactgtgtctataagcctatatgttatttcacaataatttttggaaattttctgttttagtctatgtgagtcatgtaaaaattataaaaacttttaggaactcaagcagccttcaatcagtgaaagaactgtttagcatgataatacaaaaataaaacctatagtattttggcaccttataaagctcccctttcgcctcaaatttgattaaagtggatacttagaatgtatgcagtacatgttttccacatggttattatccttcagctgaaaaaaaatccgtgtgattattgttagaataatatacactaaaatgttctagagcattaataatattgtgtccatgctcttgtctaatttttcccaattattgctattttaaatttccaacagtatcttgtacttaatcttcatatgtgaggatgagtttattctaaagacatttacacacaacttagagaaaatgtcagagattgtcagggttatattttagagtcagaggtaatcctactctggatatgaagataaatcattttttaaaatgtgccagttttctcttcagtaatgatgatcttgaatgaatattctgtttggaaattctctgcttatggcctatcagtagttattcctctggatatatactttggaaattctattttaaagcatgtcattaattctttagacttaatcatcttctagttctttttgctggactctgatattaaaatttagcagtagcctatgaaaaatcgtatggaaaagagacaaatttagggccattaaattcctaattatggtttcataacaaggatcacgagctatttactgtttacctccgtgacagttctggaattttgttttgattgtcaagtagcagatagatctaagtataaagattcttgaaagggcaaaagaaaaatctttgtggattcaaatcctcaaatccaactacaattaaataataaggccttatcagaagttatgaagcataataaagtgctttgtctttccacttgattccttactgactccccaagttaactattatgggttcatggttaaggcacacaatcaggagtgaagttctaagttttaattttagcactggctcaagttttcataatgtatataaattcattcccccctgtgtttattttcttacctgtaaaacttaggggtttaaatgcattcaaattgtgtcctgggccaggcgtggtggctcacgcctgtaatcccccagtgctttgggaggccaaggctgacagataacttgaggtcaggagttcgagaccagcttggccaacatggtgaaaccctgtctctactaaaaatacaaaaattagctgggcgtggtggcgcgcacttgtagtcccagctactcaggaggctgaagcaggagaatcgcttgaacctgggagatagaggttgcagtgagccgagattgcgccactgcactccagcctgggtgacggagcgagactcctccaaaaataaaaataaaacgaattgtatcctgcagagctttagagatgggaaagaaggtgttagagaggggaacgtctagtgggcagctctgtaactctgcagtcttttttctccttccctgcttaactagagcaacattttttttttttttttttttgagattgggattctcacttgagccagagaggcggaggttgcagtgagccaagattgcaccactgtgctccagcctggtgacagagcaagattccatcccccctaaaaaagaaaaaagattgggattctgcttaaggtttgagaaaaatgttctttaaaaatgaaaactaaaaacaaacagaaaacaaaagttttaaaaccacttccagaatgggccaggaattgtcaaactctggcccacaggccacatctggcccaatgcccaattttttgtaatgaatgtttctttggacaaagccacgctcattcatgtacatattgtccattatgcagcagagttagtagttgtgacagagactatatgacaagcagaggtcaaaatatttatctagcactttgccaaaaaagtttgctaactcctgcactaggtactcgctcactaattttatacctgaaaattaattccttgagatggcttaacttctgctatatgcacttctccttcttagactgcacactaattcatggctaattctttttgttttaatgcattattaaggattaatcttcagggattatgtttaaccatttagcctctgtatttcctggcactcttttaagaattattttgtgcttattatttttcctaagggatataaaaataaatattgaataggaaatggttcatagcccatagccagttggattggtaaaattaatgcatctgaaatgattataggacattttaagatataatgtggtatatttagaatcatgtgagtccaaaagtttaaattgtgtaagtctaaaagtaagtttaggaggagttcagagaaaatcagtgtggctggaatagtctatttagcttttcttattttattttttgatgaaatgtaacttgaactggtctctgaagactaggcagaatttgaatagatatcaaggacgtcaggacattccttgggtgaggaaggtttagtgaagggtggtgaaggttattgagtccatgggagaagtgaaaatgaggtgtggtattaataaggaaagaaagggttgattaccagatgaaagagtttgatgtggaaaatacttgtaaatcactttatgtttctgagtaaggaagtaatgaaacatacgtacaagtaatcagtaagacttgttagacagctgttgttcagtactatgctcagtgtttgagaagctatgtaggatatatattgtgatcatgtgttttcagggatcttatattctgattagactgttaagattggtggtcagtcaaaatggaagggcatcggccaggcgtggtggctcatgcctgtaatcccagcactttgggaggccgaggcgggcagattacttgaggtcaggagttctagaccagcctggccaacatggtgaaaccccatctctaccaaaaatataaaaaattagccaggtatggtggtgcatgtctgtaatcccagctacttgggaggctgaggcaggagaataacctgaacccgggaggcgaaagttgcagtgagctgagatcgtgccactgcgcttcagcctgggtgacagaataagactccgtctcaaaaagtaaaaaggaagggcatcacatgatattgccaaatgtgagtgattgatagatagtactgtgggagtttgaaagagcgagaaattactgagagctgttggaatcatgaaaaatttcttgtagggctagcatttttgctgggccttgagggataaggaagactcgtgaaggtatagtttatataagcagacagaagggtattgtgggcagggataatgaagtgagcaaaggtatggagataaaacattgttttatatgaagaacaatgaggagagaagtctgatttgttcaaaattgattgaaagatacagtgataaagctcaaaagtaaggaattctgggggcaattttgtgaagaccgaatgcaagttggctaagtgggatttctttgttctcttgaacttttccaaaattttttccccacacaagtagtagagttgtctcttcaagcagaatgttgctaaataacctccatgtgtaaaagagacaaacgcggcgttgccttaatcaacttgggttgaagaatgtggagcttaccaggttccaccagtgtagccacagaggcacatcagtagcacccttattgccctgaggaacagtttgaagaattttgcactaagccttaagaagctgttaaaagttttagggcaggcctagagaaatactggtaacatgattaatccactggtatgcaggatagagtgggaggaaacatgggataagaaaacgattatagtattagagatttaaggacctgagtaaggatggtgttagtaagaatagaaaaggagaaagaagaatggcctttcaaagggaaagatccataatgtagcagctattataaatgacatcaccatggttaaatatttgaataaacaatggctatggataatcatgtagaacactggaaatagagaaaatattaatagcaaagaatatttaaggcaaggatagtatgtagagacaaagtgtggaacattttaaggcaggaatagtcaatattgaattccacagagactatggaatctaattttgatttgaggcattggttggtgagtgcacagtttctaaatatacaataatatggtttctctgaattgagcatgatagtaactagattaagatgagtaagatttgaatagagaaagtaaactcaagaaaaagtcaaagaaaaaaatgatggctctgttgattaaatacagggaatgaatgggaggaacatgaaatacgagtactaaaaatgatcttagtggattttttaaaaagtttttttttgtaaactaaaggtatggaaactagtggagtatgtaaatgtgaaaccagtagttattcatttactcaaatatgttgtgtttgctctgtgtaaggcattgtgctaggttctataaaagattcataaagattcattttcaatagcaaaaaaaacagaaccttggaataaacttaacaggaaatgtgtggagtttatgaaaaatactataaaaatgaacagagggatagtaagggagagttgatcagatggaagagcatacattttaagtggatgaagagacattattgagatgccagctttccacaaaataatcgataaccttgggggattgttttatggcttgacataatgatcttaatatttgtctgaaaaattactgggagattggcatagaaaattaaaaaaaaaaacaaatggtgacgtgtcctgccagatattaaatttgatgataagcttataacagttaagataacatagaacaggccaagggataaacagaccagaataacagagtgtgtgtgtgtgtgtgtgtgtgtgtgtgtgtgtgtgtgtgtgtgtgtgtgttttcaagtataaagaagagtgtagtacattatacaggtgagatttttaatttggggaaaggatggattagttagtaagtgatattggagaaaagttacatttctgctccatactatacatcaaaataaattctagataatttaaaatttgctattaatattaaatgaaactataaagtactagaaggaaatgtgagtgaattattttatatttcaagaggacttcctaagtatgacataaaaagttagaaactatagttaccaatatgacaagaatgttcaagaaactggtaggacttaactacagctgcatgaacaccttttgaatgtgaacaatcattaaaaacaaaattgagaggaaacagcaaaaaacccacaaactatgtgattaataaaagggcttttagtctaattgtataaagtacccttaatctaattacataaaatagtctaagaaaccagtaaagaaacgctctagtggggaatgtgggccaagcataagaattagtggttcctagaagaaggaacataaggaaaatgtttaccatcactactaataaaaatctaagtgccatttaaatctgttaagatggcagatcatgataaaatgagcattcgtatacatatatatatgtgtgtatgtatgtatgtatatggctatgagttttagtgactttcttgctgaaaggcaattgggccatagttaccaaaagtcttaaatgtggctactgtgggcacactgcctatgaggtagccctgctacgcaaggaacagtttaaaaaaaaaagtcttaaatgtaatagatacttgtatttgaatgtttacagtaggattattcacaatatccaaaaggtggaaacaacccgtgtctattaaaagatgcatagaaaaccataatgtggtatctacatacaactgaatgttactcagccattaaatgtaatgaaaatctaatacatggtacaacatggatgaaccttgaaaactttgtgttaagtgcagtaagcctgacataaagggacaaattttgtatgagctcacataaatgaaatatcttgaataggcagattaataggtaaagaaatatatgaaaggttactgggggttgggtgggagaaagaagttgggggaggttacttaaagggtagtttctccttggtggtgataaaagtgttttgaaaatagtaacaatggttgcacaacattgtgagtataattaatgatactgagttgtacattttaaaacggttaagatgacaaatcttacgttttatatattttaccacagtaaaagagaaaaatgacaaaaaataatgtcacgtttcacttacaggaatttgttctaaggaataatagagtgtatgtaaggtctttactacagagttggaaacaacccagatgtttaatagtaatgaattgtttgctgtggtatagtctataaccattgacagtgactgaacaaatatttaatagaatattatgatttaacaagtgaaaatataggtagtaaaacagcatgcacccatttttcatttaaaaaaatttatgcctaaaaaagacaatgttctattaaaaattgaagtggtcttctttgggtgataggattacagaggtttatcaaatgcttgtttataccctgaaaatgtaaaacttaggttctggttcttttttatttttattcttttaaggtaaaaggagatttttgtctttaaatattaataaaggggtcacaaacagtatattaattttttaaaaggaaaaaactttttataattgattataccgcttgcgagagtttgagatactcttaagaattcaggttaaacttacaaaatcatttttaatacagagatcaatgaaaaattatccaaagacattagctccatgtactggtaattgttaccaaaagccttaaagtgtacaattttttaaaatcagtgtggcaactatcccaggaattggaagtctgtgtttcttcccctaagattcaggtcatgtgtgtatatgtgtgtattttaatttttaaagaacataggagtaatgtagactcctacttctagccatgacagagtcccagggactgaatttacactcctgcttcaaactagaaaagcagtctacaaaataaaataattgtttatagacattggataataaccagtataggacactaatcttagaagggaaataaagtgacttctgtagctcttcccaccttattgcctagagacagttttggtacagggaaggcagacatactgagatcttgggcaggtggcatcacactacattgaagagatagattttgaagtacaaggaggccaaggtgtctagaatttgtggataaaattactagagagtagtgagatgcatcaggacagaagtgatgagatccacaaatctccacaaaactcaatgaacctcttgagagtctgagcgaatactcatctgtgcatgtgtgacaagaaattacccaaggctgaagaaagaataactggaaaggagcaggtgtagcgatccgtggagctcatgcgaaacatttacacctatacatttctctcttagcagggctttcactgcattccatgttttggcagtaaagctgaagaacatttaagccagaccaatcaggaattcagagaaagaataattcattttatccctggattattattgaattattttattcctattgtgaataattctataaacattcaagtacagaattgaagaccaatcaggaataaaatgaaagaagacataaattaccatcattagtaatgcaaggaggaacatcacacagatcctaaattttatggaaaatcaataaattcaataacttagatgaaatggacaaattccttgaaagttaaaattaagaagaaatagataacctaaatggtcttattaaagaaggtgaattgttagattaaaatcttccagtagagaaacatccaagtccagatagcattagtagtatattatatcacactttaaagaaggaataataccaattctttacaaactcttccagaatatataaggtaacacttccaaactaattttataagatttgtattactattacacaaaacccaggcaagatactaccagaaagctacagatctagatccttcatgaatatagacacaaaaaattattaacaaaatattaggaaatgaattatgtaatatattaaaagattaatatgtcatgatcaagtgaagttcattctaggaagaaaggttggtttaacgtgaaaattaagcaacattatttactgtattaacagactaacaggaaaaaaatgttttcctcaatagatgcagataaagcattttacaaagtttatcacctgttcatgatagattaaaacaataaacaaaagtcttgcaaactaggagtacaaggggcactttcttaatccaattcaaggaccttttaaaaaacctgcaactagtgactgaatgctctcactttaaaactgggaagaagacaagacagtcccttctcagatacatttctacattgtactggaagtcaattgtctggaagtcattgtactgccagtgcaataaggcaataaaaagaagctgaaggcagacgaaatggaaagaaaaatattaaatcatctttagttgcagttgacataaaaatctagttagaaaattggagagaatctcaaataagctactggcactaataagtttagcaaaattttttgtaagaaacaaggtcagtattcaacaactaattatatttctgtatactagcaacaaacaattggaacttgaatttttaaatatgccattttcacagtatcaaaaaatgtgaaatattaatagtaatcatagcaaaaatgtataacacttttgcagtgaacactataaggcaatgcagagaaaaagaatctaaataaatggagagttatatcatgttcatggatgagactttatatttttaaggttgcaattttttccagatgtatctatttattcagtgcaatatcagtcaaaattccagcaggctttaaaaaaaacttaagttgaattttctaaattgattataaaatgtatttgcaaatgcaaaaggatctagaatacaatgattaaaaccgcaggatagtattgtgaagattagtatgtagatgtatgggacagaaaagaatctagtagatttacataaagataccaaacatttcagttgggaaaggacaagcttttcagcaaattggtgctggaccaatctatagccatatgccaaaaatgaaccatatctcttccatcacacaacatacagtaattaacttgggacatactacagatttaaatgtaagaattatatgaaaattctaaaagaaaacaggatattggctaggcacggtggctcatgcctgtaatcccagcactttgagacaccgaggcgggtggatcacgagctcaggagatcgagaccattctggctaacaaggtgaaaccctgtctctactaaaaatccaaaaattagctgggcttgggtggtgggcgcctgtagtcccagctactcatgaggctgaggcaggagaatggcgtgaacctgggggcggagcttgcagtgagccgagattgcggcactgcactccagcctgggcgacagagcgagactccgtctcaaaaaaaaaaaaaaaaaaaccaggatatctgaataccttgggttatatattttaatatttgatacaaaaggcacaagctataaaaagaaaaatataaaatttggacttaatcaaaatttaaaatatgtagacttcaaaggatactttaataagctgaaaatgcaagccacagacctggaaaaaatatttgcgaaggatttatgtctagaatatgcaaagaactcttacaactcaataataatgagatgaacaatccaagtaaacatgggcaaaagatttatagatatactaaaggagatatacaaatggcaaatataagctaatgaaaagatcaaaatcattagttattaggaaaatgaaacttaaaaccacaatgagatactgctcttgtccactagaataggtcataattgaaaagatcaaccatttcaaatatatggagaatgtcaagtaacaagaacttgtatacattgatagtcataatgaagaattacacagactggaagagtcttttctaaatatataccttaccatccaacccaggagttccattcccaggtatttacccaagagaactgaaaacatgtccacaaagtgacttgaacctgtatattcctactagctgtatttataattgcataaaaacttgaaataacctgaatgttcgtcacctagtaaactgataagcaaatgttgatttatcaatttaaaggaacaaattactgatgcattccacaacatggaggagtctctaattcctttttctttctttttctcttttcttttcttttttttgagacagtcttgctctgttgcccaggctgagtgcagtggggcacgacacagctcactctgcctcccaggttcaagagattcttgtgcctcagcctcctgagtatctgggattactggtgcacaccaccacacccagctaaatttttggaattttagtagagacagggttttgccatgttagccaagctagtctcaaattcctggcctcaagtgatccacctgcgtcggactctcaaagtgctgggattacaggcatgaaccacagtgcccggcctctaattctttatactaagttattgaagtcagatacagtggactatgtactgtattaatcttttcctatgactattctataaacgacaaaactaatgacaaatcagatcagtggttaccaggtttaaatggaagaaattttattatgaaaaagcatgaaggaaccctttggaggcatgaaaatgttctgtaccttaattgtgtagatattacattataaattactttatgcatttgatttttcaaaatttattgtaaagttctgtaaattataaaggtgattttatttatttatttttttttttgagacagggtctcactctgtcacctaggctggagtgcagtggcacagtcgtggctaactgcagcctcgaactcctaggctcaagtagttctcccacctcagcctcctgaggcaagcaacaccatgcctagctaatttatttttattcttgtttttatctgtagagacagcatttcagttttgcccagactggtcttaaactcaagtgatcctcctgccatgccttcccaaagtgctgtgattactggtgtgagcccctgtttctggcctgatttttaaaatctgatgagaaaatatattgatataagaaaatatgaatttttatatgaatataaacatgaatgcttatatgaatatattcatataagaaaatatatttctgcatacttctacccaatcacgatagttcaattataatatgtgaaaaagagggaacttttttttttttttttttgagacagagtctcactctgtcgcctgggctaaagtgcagtggcgcaatctcagctcactgcaacctctgcctcccaggttcaagcagttctcctgcctcagcctctcgagtagctgggactataggcgcctgccaccatgcccggctaattttttgtattttagtagagaaagggtttcaccgtgttgccaggctggtctcgaactcctgagctcaagcaatctgccctccttggcctcccaaagtgttaggattacaggtgtgagccatcgcgcccagcatgtattttaatatattacattgataatttaatattacattgattaatggctcacagcttctttgtataaatggctcaaaaagccaacaacaggggagtagttaattcaggtacattcaaacaataaaatgctatataagaattaaacatcaacatttttctatgaataaaatgggcaactttttacagtatagtcatatgtcacttactgacagggatacattccaagaaatgtgtagttaggtgattttatcattgtgtgaacatcatggagtatacttaaatctagatggcatagcctcatgcacacctaggccatatgatatcctattgctcctagggtatgaacttgtacggcatgttattgtactaaatactgtaggaacttgtaacacagtggtaaatatttgtgtatctaaacatagaaaaagtgcagtaaaaaatatggcataaaagataaaagtggtatacttgtatagagcacttactatgaatggagcttttagaaccagaagttgctctggtcaggcagtgagtaagtgttgagtaaatgtgaaaatttacattactgtaaattttataagcactgtacacttaggctacactaaatttattaacttttttctttaataatagattaaactatgccagttacaacatttgtatcaactttttactttttaaactttttgattcctataatactcagcataaaatacactttgtgtagctatgcaaaaataatttgtttgtatccttattctataagcttttttctaaagatttttaatttagttgtttgtttgctttttaaacatttttgttaaaacctcatacacagaagcacacattagcctaggcctaataggatcaggatcgttaatatcgctgtcttccacctccaaatcttgtcctctggaaggtcttcagggacaaaaacacacacagaacagtcatctcctgtggtaaaaatgacttctggaattcctctgagggacctgttttactgttaacttttttaaaaagtaagtagaaggagtacacattaaaataacaataaaaagtatagtaaataaataaaccagaaacagtcgtttattatcaagtattatgtactgtgcataattgtattgctagacttttaatgactggcagtgcggtaggtttgtttacacaaacatgaccccaaacctgtgagtaatgcattgttaaaacataacagtgactacaccatcactaggtgataggaattttatgggacagctgccatatacttgttttgttattgacatggtgtgtgatcatatattgaattgggaagaaaggacataacagcaagatctcacttttgttgggaaaaaatgtgggatggggcattattttatgaatgtatatatagaaaagatattaaatatcaagtgtttattggagttaggttggtagcagcttttctttttttaaaataataaaatatattttgaattttctactcaatattttttctctccattggaatataagcaccatgagaataggaatttttgtttctcctctgttgcgatattgcagatcctagaacagtattccataaatatgtgtataatgaattaatttttttatctagctggacctcagactagattttttttcattgatttgtttttgttttaattacatagttgtgattactggaactttatggttctatgtggtagaataagttctctttgttagtcatatttaaattactctagacttttttttacaccacttacaaacgtccttttgggtttttttgttttgtttgtttgtttggtttttgagacagcctcactaggacacccaggctggattgcagtggtgtgatctctctcggctcactgcaatcatttgaatctctccagggttcaagcaattctcctgcgtcagcctccccagcagttgggactacagggtgtgcaccaccataccccactaattttttctatttttagtagagacagggttttgccatgttggccaggctggtcttgaactcctgacctcaagtgatccacccgcctcagcctcccaaagtattgagattacaggcatgagccaccgcgcctggccataaacgtctttggggctttaattggaattgcactagttacgtatattaatttggcatctttcaattagaagtttaagacattagaatgaattatttagatattccatatctttcagtaaacttcatggctttttaaatatcagctggcgtattacttattaaatatatttctagatgttttaattttgttggtgttgctatcgagatctgatatactttgtgttttatatttgttcctggttaataggtaagctgttgttttgtatatttttttattaagccaccttcctgaaaattatacatagtatttaaaaaatttataactcaacattaagttgattaatgaaaaccaaacctttataccttaaacgatacataattttgtggtagaggaagtggctgtttttctccattttttttcaccctaattgttgaaagcttcctatcacaatggtcaagtatttatcatttaaaactgagcagactctcaatactttgggggcacatttcacctaccccaaggcattaggcagaaatgctgaggaagctggaagacttagtactctgttctttggtcagcaagtgatagttgacctataattaattaatagaagaaggaagtactctcagtgttttgggtcttttatcaaacaggtatgttattcttaggatcttttcactgttactccctttctgctattctaaaatataatcctggagtctcttctttttgttgctggttgtcacatttctgcaaacagcaatgtattgtgttaatagttatttcattacagacatttctgcgttttggtttacatgtgttcttgccttatttttcttaaattatttaaaggagaggagtatgttttgtgcagaattgtgttgatcagacgtgtactaagcagttactgtgtacagtgcagcagtgaaagggaatgataatactgagcacttatgtgccagttctgaacagtatcgatgcggaaaccaagaatctgaaagaataggtgtcttgtcaaaatttaggaagctatggaatgtccatttgattctaaattctatagtcttaagccctggctacacattagaatcatctggaatatttaacaaatctcatagttttattgtactccccctcaccctcacctttcatctagccaggaaattgatttctacagatagggcctaagcatctgggtgtgtgggagagacatataattttttaaagctgttacatgattctaatttgctgccttggtgaagaacaggagtcagcaaactatgccccataggccaaatccaaccaatctcctgtttttgtactgccttggagctaagaagggctttaacttttttaaatgactgggaaaaaaatcatgacatgaaaattctatgaaattcaaatttcactgtctgtaaatcaagtttcgttgcaaccaaagcctttggtaaatttttgttgacatgtcaagaaataattgttgagcaactttttcatcacatacacataaagagataaagaaatatttgggctcagtcccttcaaattgcaaatcatttcttccctttctgtttgttctttcgatgaaagtgtaaatatatttttttataactcttaatattggagaggagaaattgctaggcctaattcagtaatcatttgaacatgtaaggtcctaggggtttgtgtcttcgtgttttatattgaccaatattaattcacatgagacagtattcccaggttggtggtgttggcttaagggtttaaagtaacatcgccattctatttcatttccaaatcaaatgttaatggattcctataggtaaggtatcccaaggaaatacttattttcaaagtacagatgctccttaacttacagtgaggttatatttctaaaagcccattgcatgtagaaaatattttaagtcaaaaatttatttaataagccatacccaccagacattatagcttagcctagcatatcttaagcttgttcttgtttttatttgtattattttattttagtcttaacttgtaaggataggaattaaaataataccaaatgctgtcattttcctcagcaaattttaggcatatgacctgggaaattgtgaactactttctcttttggcttttggacttcctgttgggttttgggtataatatgcttataaagatagatttttattaattgtgattggacttcttactgagagcactttctgaaaatgttaattttcttaattgcataccagtgttaaataatgagatcacaactatttttgaacaattagaggttatgttctctttaagaactgattctgtagtctctatccataaatctttcctcaccttgtttagtggtaaggtcaagtaaccattaagtagactgaaatatccccagatcaggcattcattcaccatcttttagtattgcagtggagccacagaattactaggaatggcagagaatggcactacatgaaggaatgacaggagactgacagggtcaagagaaaatgatggagggttttagaaacccaaaccaaaggaaagaaagaaaaaagaaggtaaggaagtggggattagagggtgttttttggtggttgtttttgttttgttttgagacggagtcttactgtgtctcccaggctggagtgcagtggcacgatctcggctcactgcaacttacacctcatgggatcaagcgattctcctgccgcagcctcctgagtagctgggactacaggcgcctgccaccacgcccggctaatatttgtatttttagtagagacagggtttcactatgttggccagggtttcactatgttggccaggcttgaactcctgacctcaggtgatccacccgccttggcctcccagagtgctagaattacaggcatcagccaccacgcccggccaggatagggatttattgactcacttaggcatttatctgttctcagcatagctggatcattctagatctattctagaggtccaagcattaacactagctcatcctgtttctcagatctattgttctctgtgctgactggcttcattcgtaggccttctgtagtaagaggaaaatggctttgggtacttttgacttccatgtccttaacacctatgtctcagacagagatagtatcttttttgataattctggttaaagcacaagaagttctttcattggttcagcttggattattcctggtccaatcagtggggtctgatgtttggattggatgggtgtgaatggtgtacccacctccctaatggggatgcagtgaagtatagggtggttaaccatcccttatcaccatccataccctatggatagattttctgataagaaacacagaagaaaggaaatgatgctaaagagagtaaatagttaactgttaaaagaccaaaacctagtacttgtgtcatctaatagagaatcctatgtacattgtacacttccttttttttagaaaaattaaaataattttaaatagtctttgtgaaagcttcaaagattcttccaggccttatgtgtttgtcctttcagcttttcattataactttatgaaaatattttagccactcttttaacaatttattgaatgtctgctatgtcgttttacctgcagtgtcatttaatcttttctcaagttgataatttaaaaaataactttctaagttttatttttatttgattatgtacaatatattcaattcatatttgtggggtacagtatgatgtttcaatacatgtatacactgtataatgatcaaatcagggtagtagtgtatccatcacctcaaacatttatcatttctttctggcaagtacattcaaaatgttacattcaaaatcctcttttctggttattgtgaaaaatatacaatgtagtattattgttaattgtaatcactgtacttgtactgtgcaacagaaaactagaacttattcctcctatccatctgttcttttatacctattgactaacctctctccatccagtctttggccagtctctggtaaccactattctaccctgtacatctgtgagagctgcttttttaaactccgtatatgggagaaatcatgtggtatttgtcttactgtgtctggcttatttcatttaatataatgtcctccaggcttatccatgtagccaaaaaggacaggattttattctttcttttctttcctttctttccttcctttccttccttcctttctttccttccttccttctttttctcccttcccctctcccctcccttcccctcccccctttnnnnnnnnnnnnnnnnnnnncttcccttcccttcccttcccttccctgtcctttttttcttttctttcaagacaagtctcactctgtcgccaggctggagtgcagtgacacaatattggctcattgcaacctccgactccctgttcaggcaattctcctgcctcagcctcccgagcagctgggattacaggcacacaccaccatgcccagctaatttttgtgtttttagtagagacagggttttaccatgttggccaggatggtctccatctcctgacctcgtgatccacccaccttggcctcccaaagtgctgggattacaggtgtgagccaccgcacctggcccttattctttttttaatggctgaatagtattcattgtgtatctatatcacattttctttgtctgttcctctgttggtgggcagatagattgattctatatcttggctaatgtgagtagtgctacaataaacagtgcagatatctctgacatactgatttcattgtctttggataaataactcaatgggattgctggatcatatggtagctctacttctagttttttgaggaacctccacactgttttccataatggctgtactaatttacattctcatcagcattgtataagggttcccatttctccacatctatgccagcatttgttttttgtcatgatactggccattcttataggtgtgagatgatacattattgtgggaagataactttattgtatagaactagatttctagacaatttatggaaactgatgaagaccatgttatattttaaaatatattttaaccaaggctcacagggtatttctctaccttttttttttttatctgaagtgctatcagattttttttttgctctgttgcccaggctggagtgcagtggcgctgtctcggctcactgcaagctccgcctcctgcgttcacgccattctcctgcctcagcctcccgagtagctgggactacaggcgcccgccaccacgcccggctaatttttttttgtatttttagcagagacagggtttcaccgtgttagccaggatgatctcgatcttctgacctcgtgatccgcccgtctcagcctcccaaagtgctgggattgcaggcgtgagccactgcacccggccagtgctctcagatttttaattcctatgcatagcatacagtaaacctcatctggaagtcccatacacggcacagtgcaggctgctcaatttttctgccttggaaggatgaaaagctaagttgaaaaatcattttatcagtttcactccagttgttacattttggctttagaaatatccttcatctcctgcatctcataatctcctgcctttgaggttgtgtcatagatattatatcacccaagtgctttcaatttgaacttcttcaagaggggtgcctatgtctcagaagtttcccgtaggtcctattttacagttattatttcagttccttctacgctagcttgttgaagaaagttctctaaccaaaggcaattctaattgcctttgaaaccagtactagtcaagctgtacagtagttttatgaagactgagcactcaacctggagttccttaaaaagaagacacaacaggaaggcccaagatacccttttgcccttcaaaatgaactgccagtgcccctgctttcatgccttgagtgaacatattccattagaacaagactgtacttttggttttacttaagaataactctctgagaaatgtgttgtttagcaatattcctttcaaattcacaagcgctaattgaaattactctctatgctatctttctagcaagacttaaggtttcatgaatagatagtgatcctcttctcatgtttcagggttctgtcttcatactctgttctccttcctttcctccatgtctttccccttgactgtatcacttaaaaagctattctttaaaattagtgatattgcttctaatttatatatttcatctccttaaccgtactgtaaacctctctgagtcaggaagtatatgtcttgtatttattttgtattttcacacaatggtcacttagttcaaataattcataaatttttggcatctaggttagaatggcacaaaataaggcatagttcttgtcttcaaagtgcttttaacctttagaagagatgtgacatgcaagtttaatatgcaagagttattaaagagagcacaatcagtttctcctcaggaaaacagtggggacagatggtattaagagccatgccttagtagcactggattattgggatattttaatgtgtgtatttgctggatcacagcattataaaggagacatttaaagaaaacactaatgatcgtaatcccttctatgtataattcttggtggtgggcaaaactcattcccgttgttatttcattttcgtttcattaccctttgaatcaacggatcacatttattatgaacatataaaaatctcacctatttagctttcagagttttgttttgtttttcctaattgccttgatgatcagaaaacagaaatatcagagtcttgacctctctctgccatgatcttttgtgttgagtttagcactcttgaagaaaggagagatttgtttatagcatctgccctgacaagtcagtactgattctctatcctggttaaccagatttattagtgactttcttataatactattgtaacattacttttgctttccttctccacctcatgcaaagagaaatgaagtaggaactttttgcttgtttgacatattcctgatttttttgtaggtttctctgaggtgatgtagcttttttggacagtacacctgctatgatatgtaatagtttgtactgttttgctaagtgatttttcttcctttaacagaagtatattttaactgtttggtttcttttttctttgtgttccaatattctttgaggagaatagaaaatggaagaagaaaccttagtaaataagttttttttgtgttaccgagaaactgtttaataataaatgtttcccgatccacttgatgtccacttttttaaaaaatggcctttattgaaggcaaaatttggtttcgattttgcttagatgaaattgcattattttgctattattcaggagactgtttctcacctggttgatcatttcaactgtttctttctgtgcttcaaatcatgagaatcccatttgccccaccgcagacttggcatgtcgaataaatgtgatggcagcaattaacatcacgattgcaatgaaaatgtaaaaaggaaatagttgcaaagttgtagtagggaaaacaaaagctggaaaagcagctttttataaataattatgaaattattttcatttttcctacataggattgaaaagtaaacaaattctctggttattttacatgttgattgtttctgccatatagcttaggactctatatagttgtggttagttttgtttttacattttaagaacaacacaataaattggagtcatcagtgttctacatagatgaaaagaaatttattattagaaaaagccaaaggacttaaaatgttcccttacttacacataaatttaagtatattttttcctagctagtaggtcattgtgttattattgtgtgttgcagaaagtatttcacttaaatttgaaaataattattaactggctagtgtttcattttttatttaaaagaacattatctaaatatttatataaagcaaagcagtcattcttttcatcctaagtgtttactagttttcattgtttaatattgattttcctttttgttggtattagattcttattacaatgcgtttgctctttgccctgtgatgttgctttgttggcttgttcatctacgttgtagacctagatgaccttcatgttctagtcctttgagttttttactaggctgaaacaaaagaaagcgattggttgctagtaaaagaactgaacaaaggcagacagggagggttttaagcatgggatactgccttagaaaacagcaggtatatctcagctcggtctatgaaaaccagcttctataaggctaggccaccacactgtcatttttttattattggccatcccttagtctctgtacactgttgaaaaagtgatgattcatcacaggatagttagaaataattggcctgttcaaaccctttacagttggggaagttggttttctacatcatataaacctgatgtccattatgcatgtatatttgggacacagtctgccttttaactgcactgtgctttacctgtatgtttaattcaggatgagattggttcctaaagcttttaaacaaagactttttctttttgctgtttttatcttttaatatcaatattgaatgaaaacatatgggaaccattcagagatgttcagtagacattaaaataaaaaggaaaatgtttgacagtttccctgggtaagctgcgaggcatttatgtagcaaaatgatgtattaaaagccaattattagaataatgatcaacataaaacctgggctttatacatcattagaaggttgtctgttgtggttgagggtttggggcagtatacatttgagtctgaatactcctccttataagtgactcattttgtgaagagaatacagaaaaatcttcaaaaactttacttacctttcccatgattggtgttcgttttttgttcaggtcctgtttttctcatagtaaaataactcagtatatatttttggctttagattgttactaatttaatctagtttctcagaatattaaatttatatttatatgttttatgtgccattaagtattgttagagaatttgtatagaggttaataaaagagagttgcccaaattctaactacattaatctgatatttaattagttgtgtgttagaaggaagataaatcaaattttacttatacctattaataatggttactgggtgaattctggtaaggtattatgtaaaggccagagaaaataaaatattgatgtttaaaaagtttgtggataagaaatcttttatttttcttgccacttaagattaaaccaaaagataatttttttaccctcactgaataaactcatttaaatagggaaaatctgaccgcatttcatccttcaattcctaagataaaggaaaagaagcagcaggagtagcaaaggttgggatagagatggcatactttacgtcatttctttcaaaagggatggaattaaacaaaaaattttttttctagctaaaaggccatcattttgtgtttgttattgttaagaagccacccaactacgattaaaaacatttaatatgcaataaaatattgacgtaaaagaaatagccaagagatagatatttgttaatgtggatatactttcagatttttaataatactattgaaattttataaagtattgaataaaatttcacttttaaaaaataaaaattcatttaacaataatttctgagatttatctaggcctcttaccacacttggacctctcatttaatcaaaggattgatatacacaataagtgtgcacattacaataaggtatctgggtcaaagatatttttcttgttttttattttgatgtttatttaagaattttgcttataatatgccaaacctttagctatttagataagtcccagtcatacctaaaatttttacttagagctgagtatttggtgtggtattgacctgggtaatgagcgtataacaaaatgttataaatgaaaagctatttctgacttaaactcttgattcttctacattagtgctagtaaaatttatgtattcttagttccaagtagtggaattttatacattttataatgccatagcaaagcacgattggaaatgagaagtgctgtctcttagaagttctctcatatttcagctaaaacatactcagcaaaaaagatatgtaaattaaaagaaaatctccaatttcctattctgagtaaagctttgatttttgctgattcaggaagtaaggttgacattggagcttctcatttcatctggaataatcactttttccttttgaaaagtctttcattttagcagcagtatcttctaaaacactccattttgcatggatgaacctgtttttctctagataacacagaaaatacaactatcataaatggtaacctgctttctatagtatagctttcctgagtgcccagtgagatactaaagtgccaggctgttcattctggagatttcactgatttttctagctgcatccctattctaaccccccaaataactcccaaaagaggaattttataacttccaaattgactgctgtaataaaatgtttatcccctaagtcagtagtggctcatcagcttaggatcattcagaatatataattccagttcttcttgaaacattgcaccatttttttctgttaaaataggttttggtttatcttagtgatgctgatattttctcagattttccattagtattttttctcccatctgaataataatctgaataaataatgaactggcttttgttataggggtaggtgcatagagcatccaatagcattccaaatatttggctgccaaataaggaaatcataactgcttatttgtattaaattagtattaaataaaatgattaacattttaaaatgttttggtataatctacatgcaatccgttaaaatttccaaactaatgtcagattctttattgcttggctttctgccaaatgatgttcaaaggaaattgagtttttctctagcatctaaggtaaatggaaatgtatgtgatgtttagctttgactagagagttacaaatggatccatggagttttggttatataatttatatgctatatgtatgagggcacttccttgcttcccatgatacttgggatggtgctgtcagtggagcaaatgtatgcttatgccatcttgtccataatatgtatttctgttgctatttgaactattaatgctatgtaataccaagtacttatatcagaaatttgtactctatgtagatagtgcttttgaacttctttctgatagtacatattcctgtattaatacaataaagccaagctgacaggatgacatagtgaagctcttattaaaaatgtgttctaattgttgctgagatactattggaaatctagagcttgctgcctcaagttattttaaattgtgtattttatatttacattttacatttacatattttatctattaagaattgcttttaaattaaaagctttacatacgcttaaacaaaagtatgaaagtatatttgaacttcaggaagcaattctttgtatcagcaccctgaatggttttgtattaaggaaagccagattcagtgacaagtttgaccctcacatctggaattgccattagagaaaagcaatcatctgagtcatatgtgtatacttacctatgacataagaagcacatttatttttcttctttttttaaaagcatatttctttcattttagaaaaccaaaatgcccagattattatgattaacatttaagttttttggctaaaacatagttaagaattatggcaggaaatacagaattatttctgagcaaagtttatgacatccaaattaatacagcttttaaaggaatcgatggataagccatttgaaatttatatatatttgttttatgttgatgtcatagatctaccgtgtaaaatttaaacattatgaaaacagattttaaatatttagtaaagccttctctggaaaatgctaaacctttgttttaaaattatatctgtagatatctggtcactaatactgtgaaattatttcagcattgagtattgccggctacaagtgctttggaaactctttagctgttcatttttggcaaaatcttactttttgaaaagaccttattttagaggagatatcaatattgctttctcagtttttcaaactaccattttgtaatttattagtaaattgtaagtgccacagaaaccactgtgcagtattcaaggtccttgcattcagggttaaaactgagtttatatacacacatactaaactcttacaaagccagggaacaactattcaaactgcactgtggactatgctagaggagttagcatgctttctttgcagacatggttgatttgaatacaacaacaaaaaattgtccagactgccaactgaaacccttgaaaacacttttcaatctgtagatacaactgtatcagcaaaatgttgatcaaagttcaagtggaaacattaactagtctagctagccttctggtgttttcattggttaattcacaaagagcatcgcacagtggatttttacgtagtagtaacaatttgctgtaaaattgtatggtctgaggatatgaccgtagagtttgtcttctgtgtctccaaacttactatcctgtacatcttgactcattttattcatttttcacttcattaaacaataaggatttaccttaaattaagcatttttttggtatgtttattgtctcctagtggtcctttgtaatgccatatggttgctgcccagctcgacttacaaacttactctttttgcttctcatactagccattttgcaagcctgagctgctttgtggtacaggtcaagtacttatggagtaaagttaagtgaatttttattgtgcaggaatgtcttcgtttaaagaaaaaaaaaaaaagaaagaaagaagaaaaagactgccccagcccttgttttttaaatagaaacattttttattttagagcaacttggatttcctactgaatataccatagtatagtgagggttatattttgttttaggcagaatggtttttaaaatagcccaattaattacataaatggaagttaatttattttataaaacagtttattttaaaatagcttatccatatgagttatttaaaagggaactaactcttaatgtttttaaatatgatttgatttataataaacttcctggaagtgagggaggcctttaatcttcatgtattaagagagggtgaataataatgaattatttttgccaagacagttttttcctgttaaaacccaagtaatcctgccattttcacatttttccttttgttctaaaaagaagtggtaaatgttttgcactgtttgttggctatggctgtgtcatgagggttctaccatgattgatcagtgagggccactgtgtatttttcatatatattcactgtggaatagaatccagtgttgaatttttttttaagtcagtagtgaagaatggtggagagcatttgttccattgaataatttataatagctaatttccccataagaagcctaccaaaacatgatagatatatctcacttggaagaaaagttgtctgtaaagtgaatcaaatcctattttaatatatcatatgagtatataaacccctttttctcactgattttatgggatcaaagtggaaattattcttgtagaaaatgacttggtttttaagacaaatcaaatttttagaaaagactgattttcaaatacagtaatatgtatgtcagattctgagtgcaaagtagataaatattttagatagataaaattttatatttggcataaattgagtaactttaaagataaactttattttttatttttatgttttgaacacagttatagtcagtagtttcagattttcatcctctccttgaaatgtttcaatagaaaggatatgtaactcttctttaatgttcaatattctagtactttaaagaagaagctatttttaaaaattaaaagactgaaataaaagaaaggaatttccatttaaacagttgaaattgtgattttaaaatatactagcaaattattagataagcaaataatttcttagaagccatataacagtaaactaaattcaatccaacatactattgttgagcacctacctgtgcagagtggacaatgttaagcagtagaaatgtgttattgcctaagagtaactagttcgtagcctaagagagagtcagacacataaatggatacttacaatacaaagtgtaagtaccttgatagatgaaaatataggacatcatggggacgtctaggactctgaattcacttttgggaaatcaggtaagacttctttactccaagacttctttcctccagaagtcttatctgatttcccaaaactgaattaggacctgaagaataattaaaataagctaaacagaggaaggcctggaagagagagagtgttgttgcaggttcagagaatagcaggtatatagccctattgctattgcttaagagatttatgtataatttggtgtggctggaccataggttttaaaggtaatggagaatagtgagacattagtctggattggtaaagtgagaccagattatgaagggatttataagaacgatcagaaaaatcaagaatatctcaaagatatttttagtaagatagtgacaggatcatatttacaatttacaagtcagtttggcagaaggcaaagaatagcaggggttgggcagatgatggcaagatcaaacttaaagagactgattcctttctaaaatagatgagaggtcatggtactgttcttctggatagtgaatactagaggagaatcaagtttgaaagtggacaaataatagtttgtttttaacatttgatttgaggtgcttgtggatgatctaatttgaggtgtccagaaaggaactggatatatgaatatagagccaagctcaagagagaatgaagctagatatatagattaggaaggtaatcagcatgagaatgttaactgaacccacaggagtccacaagggtcttcagggctctccatctttagcatcagcgtatgataatgattttgttacctaattcattatgtttcaaatgtgaatgcattgtgaaatatttaatgtactataccagtataggatattataaactataatgaagagtgcatttactaaacacattgctataaaactggtgtagtaaactctgggccagtgtggaccatcatttggggcaggaaaaagaatcatgtattttttccccttttctaaattgacatattaaaagttgtacgtatttaacatgtacaacatgatgttttgaaatatgtgcagttggctctcggtatctacagattcaactaaccatgggtggaaaatatatttgcaagtcaactttttgtatcgatgggttctacaggactgattgcaggagcatccatagattttggtagctgaggcatcttggaaccttggaacctctggatactgtgggacgactgtatatattgtgaaatggctaaattgagatgattaccatatgtattacctcacatacctgttttttgtgatgagaacacttaaaacctactctcttagcaatttttaagaatacagtgtatcgttaactgtactcaccatgttgtacaacagatatctttaacttattcttcctatctaactgaaattttgttatctttgacagatacctccccaaccccctctccaccaaactcctggtaaccaccattttattctctacttctgtgagttcaaattttttagataacgtatataagtggacataaatgtactttgtggatttttatattctgtcacttagcctttcacacctcacttcacagctttgtgaaggagaggtaggtatttttattgctgtttccagtttaaaaatgtagtgatatcaagtaactttcctgaagtctcttgttgctcactgttgagtgacaaaataaaactttgaagagggacctgggtagagagagaaatgagcaaaaaaccatttcaatgagagatcagtgaccttactgcatttaagtgttcttagacaggaattacaccatttttcaaatgtattgtttatttaaaacttgaataccccatctgtaactctgttctaggtgatgtggtatcagtaccagaatgttgtactgtttctgaaaattattttcagtatagcagttaaggacattaaggcttcaaagccattggtccagttttgataagaaatgaagttggaagttgggtgtagtggctcacacctttaatttcagcactttgggaagggccaaggtaggagaattgcattagcccaggagtttgaaaccagcctgggcaacacagggagaccccatctctagaaaaataaaaaataaaaacaattagctgggcatggtggcatgtgcctatagtcccaactaagtagttctctgctaagcccgggaagtcaaggctgcagtgagccatgattgcaccactgtgttctagcctggaagacaaagtgagaccctgtctcaaaaaaagtaaaagtaaaaataataataataataataataaagctggaaatcaaggatatattttcatcatctcttcacttgacaccaagacaagtcacaaacctgaagagtattgcctatttattcctatttattagaaaacaaaaaaaaagttgtttttcaactcttttatctaggtatgaatgtgttaaaaattatttttagtgttttatatataagccagcataaatgatagtagaatacatttgtataatgctttaatatttacatactttgacatattttctcatacaacccttacagttctcagaggaggtagtcagaacaggtattaacctaattttatttttgaacaaacaggttcagaaggtaaagtcagtttgtttcagagctagaacttttcctattataccaccctgcttctagatgtgcaatctgtttaagaattaaagtaatttaaaatggtaaattaaaatgatgttattgcagttattttaatttcctgcctggagcgtttcagtagtagtggttcctgtattatctgggaagttaaaccaaatgttcttttatactcttttagactctacaacttcagttaatccagatttcctacccaataacattgtttgggagccagggatctctggttgcccaacccttctaagtacttagaagctcttagaaagaatgttcagtgaaaggcagtgaaaaggcctgttttggatacctactgcctatagctaaaacctgttaggtgccttcatgtgaatccctgaagacaccatgatgaaattgataagcatgtcataattcaagtaaaaacttattatgagtgctagatgatagccatatactgaatactttcctgattttactgcttttgccattgctcatctatctgtagctggaatgctttgtctcatatcagactgccagaactaaattccaccagccttcaaagccagcccaactgataactatttttgtaaagctttccctacttactctaacaagtaatgatgtaaaattcttagaacaatctgtcatagtctcaatgcagatgtcacatgtaactttgttattaatattttagttacttgtggatatctcatatcttctttggtttctttgttatagaacattgtcttcccataaacttgaatattgtccctttcccttagaaaagggaaatgtgggagaggtggggagatggttacatcaacccaatttttgcttcttaaaatgggcttttgttgatgtgagtctatggtcccatttattgttgtgacaatatcttggtagtgggaattactgggtatgttggagaacctcagaagggagaatggtcatgttctccagtgccgtatctgaatatctgaatcctgctctggaacacagttcttattctcaacacttgatcctattctctttatcaaacatagtttttacctcgttctctgtaagagccaattcccagccccataaagccaggaaatccagcaataaagaattgttcccagcagcatgttttgtacttatattttcttcttcttcctttttttttttttttttttttatttgttgttgtttagacagcgtcttgccctgtcgccacgctggagtccactgcaacctccgcatcctgggttcaagcaattctcctgcctcagcctcccaagtagctgggactacgggtgcgtgccaccacacccagctaatttttgtatctttagtagagatggggttcaccatgttggccagggtggtctcaatctgttgacctcttgatctgccctcctcggcctcccaaaatgctgggattacaggcatgagccaccgcgcccagccagtacatagattttctaaagtgttcaacactcttatcaattcagattccaccataatttatatgatcaatcaagcactgctttgtttctctgtaggtctcctggaatacaacatagtcagagatgtgtagagtatggtccttctgggtttgccaaattttgtgctgaaggaaaatgatggctccaccgctcttcctgcctaactcgtagaaaggcagcatggtattgtgatagaaacatgagctttgaagataagcagtcagattctgattcctgttcttctaatagtccagccttgtaaagatcacttatcctcatagttagcaagacttcctcatttaaaaaattctttcctcatagggttgttgtgaagactaagtgaattaagttctgtgaaaaaatctagcacagtgtttagcacatgaatagttttctccatatatgtggcctctctcctgggatgatcaccttgtcccagtttgtccagggtttccctagttttatcacagaaagtctcatgtgtactaggaatcaatctctctctttctctctcttttttttttttttttttgagatggagtttttgctctgttgtccagattggagagcagtggtgcaatctcagcgcactgcaacctccgcctcctggattcaagcaattttcctgcctcagcctcccaagtagctgggattacagatgcctgccaccacacccagctaatttttgtatttttagtagaggcgaggtttcaccatgttgtccagactgatctcgaactcttgacctcaggtgatccgtctgcctctgcctcctgaagtactaggattacaggcgtgagccaccacgcctggcctctcttctctctctctcacttgacttttctaggcttattggccattccttgaataaggtacagtcaagttttactttagacttttaagtagctcagaatagagttccttagcttgttggtttttacttatttttttcattaatgtttcaaggtatattatgaggttgcattatttaattgctttgttgattgagccaggcagatctttcatttattagctggcctgatatcagggcaggaaagcttatgagttactttgtaaagtgatggttttattaaaggtggtaattttgatcagctgacctattggtgggttctgattactttacagaagtggatggtattgacaagcctccatctacttggaagttttaaaatgtgttctttttattaaaaggacttcatcctgtgaaactagtttcttcaaattgaagttctctcagtctaggcatgatgagttacaaaaatgattgtttgtagtattttggaattggtttccacctttatataaactcaaatgtcaatttaatgtgttcagtaagccaagcaacctttctaatgaaacaagtataattatgatttatttatatttttatttcatttctcatttttttcagcaatctttcctgtcctcaactatgtttcctttttaatttaaaaaaatcaagtagaaaacaaatatctggcttttttgtcaatgtcatggtcttatgtcaagatcttgaaaggtatctctccaaattattgttctgctatagttatttctatcaaagaagtcctcttgtatagctatttgttgaattgtgtacctactgaattagtcaaagctctagctaaaaccatttttttctttacctctcccctcccccaaaacttgcttttgttatgtattggcttgctaatccttgtgttgagcagtatcagacatcacctttcttgggggcagttagtccactcttccgctttctttgtcagagggctcccttaataggagaagtcaacagggaggacaaaaaggattgaaagttgtatttaatcagggtcagagaggtggtgttcagagtgacgggcccacaggcaggctggccttttatgcttgccgacgcagatggtcccagagcattcagctaagtgaagagaaagctgcccagtgaaagctattgtagggtagcatcgttacagttgagaaaggttgccaggggtaactagagagtatcaccagtatcgtgtgatcactaggctgtgccattgaaaatgttagactgaggattgtattgggtcccttggcatcttgatgttcatatgtaagcagtattagcttacattagtgtttttaatttagttttttctgttttcttccctttgttctttccctgccttttttaatatataaaacatagacttattttaattcacaattttgtaaaaccttctgaaaacataccattatttaataatatatctcttataggctttatggtttggtataaactataccaaatttttgtgaataaattggatttatgaaaatgaggtgtaatatttctcgtttaaacagctctaagttgattttccattgctctgaaactgccctagtatatcccaagatgggtagtttgtttttctttgtgattttaagtaacttattttaaaatatgttagtatttacctgaaaacagtagatagcattgagtgcagggttgtgaccaagaactcccaaatatttatgaaatctatcttcaatttttgcctaaggcaaaagtaaaaatatgcatcccaaatgagccagaaccaaaatagtgtaacaatcattggtctcaatttaatatacttaatatactttgaatatgattttaatatgccagttttggaattccttaatttcatcccttctattgtcccccggatattttaagaaattacttatagtcacatacaaaatgtaaacacagtagtctcctgccgtcactagaggaaaacacatagagatttctattcaatgtaaaagtgaaatttgaagtgtaactaacgttcaaggtgaaatgataataactttgcaaattattgttttaacttagattaccagtcaacccaatttaagtcacccttacgtcagtcagagctgattttgacttaatactgctttctcacctgttgagagaacattaagtgaggacaaacatagtaccatcctgtaataccaacattggtatttgagagctaatcatctccaatgttattattttgtgttagaggtaacttttagaaattggtgaatttcaagtggagccaggctttaaaatgccttctgagacccccacttaatagttctgactctaaattaatttcacacctttattgaaaaatctcaaatttatgttaaaatgagctgtttgtttccttcctttcattaaaatacagctgagtcattttcatttaaaacaactcatattcccataaataagaacatttgtcacaaaaagttaatgaatctggtaaaatttagaactaagattctaaaaggtctatagatacggcaagaaaactgttttttggaaaattgaatttttattaaaaaatcaacacaatgtgatttccctttatttcctgaagaataataattagattatgctattcttttatcatcatagtttttttttaaaggaaaatcataatatgatcatctaaaagacttagggaaaaaaatacatctgtatcacttatggtgaggttggcttaccaggatttatgaataaagattgtagtgtcaatgcaaattttaattacattgcttctttaatgaatcttgataagtctaagacattgaagttatagcattttatggttattatttttattttaccgatccactttttctttatctatgtacatgatacagatgtgactgaaacacatggtaaaccgaatgaccttgaagaagaaaagaacaaatttccatttcatgtattttcatttaaattgaccacgtgacacacacagtgggaccagggagattcacataaaaaaaaatttacattaaacttcagcagagacttcctatcactttggtctttgattcattacaggtaacatgaatatgagagggaatggtacatatttagtagttatcacatgtcatcacaacatagattaaaaaacaaaaccgtttttatgattcacaagtatagatatgaatgttacctccttgatacagtttaaagttgactctttaaagatagtccttttatacaattaaaccatcctatcaacatatattttaagtatataaattattatatatgcacttataattttatactggaaattaggagctagtaaactaatttcagttttgccagttgtttaaatttttctttaacgtgaaccaaaacctttttcgattccattattatgttagtaatagtaatatatgagtgttaccagaacattaatgattggaatatttagcaaaacccattaatgatggtgtgagttaaggactatccctatatttcaggtatatggcagttatggtgagaaggtacaaccagaataatcacaatttatttgttacagtgaattccattttacgaagaactggcaggttttttaatctgaacaatattcataccaactaacatacttaagaggtactcagatgcttgctgaataaatgtagtttaagataatacttttgaaagttggctgacataagaaaaatggtaatctttaatgggaaattgcagcctttggtgtttatttacaaagagttgggaactttttaaatgctgttaaccctttatattggtttgaatctcatctgggataattgagaaggctcattgtcattttgaggatcccagactcccacaaaaaaaaagatgagagtggggtgttgactagagagctccaagtgataaaatctaggaaagaacactaaaaaaaggcgtcagaaggtttgggtttaagcccgctaatatgtgtttattacttacctataaaaagattacttatctataaaaaggtgatctctacctactttaagaattactacattcatgaaattagagtaagtatgtgaaagtacatacgagttgagtattccttatccaaaatgcttgggaccagaaatgttttagattttggattttttcaaattttgagatatttgtgttatatacttaaagtggagcataacatttcctttgagtgccatgttaatgctcaaaaagtttctttttttttttttttttttttttggatttttgaattagggatactcaacctgttcttggaaatctgtaacatatggtatgcatgtaaattgatggttcaaataatcactaatactactcacattgctgccactgctgatgccttataactagtatcagaagagcctcttgggatgtttatactgtagtctacccttatctttagggaatacattccagcattcccagtggatgtctaaaactgcagatagtactgaaccctgtatgcattgttttttcctatacatacatacatccctatgataaagtttaaattataaattaggcacaataagagaacaacaagatagaacaattataacagtatagcataatgtcagttaatgtgaatgtggcactgtactcacccttcttgtgttgatgtgaaattatgagatgaagtaaggtgaataatgtaggcattgtaagcattgtgatgtagtattaggctactactgaccttgaacacaagcattgtgataccttaacagttaatctgataacccagatggctactaggtgacttacaggtagataaggtatatagcatggatacactggacaaaggcatgattcacatcctcatggggacagtgcaagatttcatcatgctactcagaatggcgtgcagtttaaaacttaagaattgtttatttctggaattttcatataatatttttggactacagctgactacgggtaactgaaactgtggaacatgaacccaccgataatggaaggctactgtattttaatatttgccaacactgagcatttgaaatgagctactttggcaggaaagattataaataattgagtagatatcaatggatgagcatcatagtgctctatcagccctttgggagaccatgagtaacctatcatttggttttagctctttgtcttgattcactttatcaaaatgggactatagatgacttgtggtaggttctagagtgcaagaaatgagaaaataagtgaatgagctttgcccagccacagattcttaacagtgctgagggaattgtcctgaggtctttgcaaaatcctaaattaatgattatcactataacagatttttctttacttctttccatgtaacatgtattttcttccaacagatatttttaattgacttcttcagatcaacattagtaggtgacgttttaataagcattctacattgtttccagcatttacctgatgaaattaggataaaatgccatttctgactggttactagcttccaaacagcagccttgtagaacctgccattcagattcatgagtcagcagaatttataaattatgataggtcatggatctttgtttttttccccagattgtcaaaaacacatgccaagtgttgtgcagctttatgtactctttctttatatactagccaacagcctacaatggtagttctcatcgtgtggtctgtgtacctctgggagtccctggttcctttcagtgtccctttcttcaaggtcaaatctgtgttgctagtaatactaagaagttatttacctttttcaatgtgttgacatttccactgatgataaggagtaaggagtaaaagttctggctccttagaatgaatgaaggcaattacatgaaaccttactaataatattctatatgttatttctacatgcctgtagtttttttaaaaagctagttagtttcacttaggaatgttcttgaagcaataaaaataattttattaagcctcaatactctagtacatgtctttgaatattctgtatgatgaaacgggaagtactgtacacacaaaataaaactcggtgaaccagtattttccacatgacccattcattatgttacaaaattatgcatgagtgaaaatttcatttactgtccaagagagaccaattttagattttacattgtaactaacttttaggaaactatcacctgttaattttggcctagtgtaaaagaacagtttccataggtatggtaaaaagcaattgaattactgttttctttttcaactgcataactgtgtaatgccagataatcttcataccataggggaaaaatactttttttcaaccctcatagattcttcattggatatggatacctataacaaaagacagaagtttattgacatgtatattttatatatacatgggagacacccatggaattagtagttttcaaggtggctttgaatagagcattttcaacaaagaacagtaagtttttagagaatacaagactgaggaaaaggactttgaatctgtagccgtagtaaattttggaagggcaaatcaatatggcgggtagaggctagttggtgaagcttattaatacagattcttttccaggctaaagttgtcttcagtggttaacctttgtttctcctagtagagaggtgggcaggataccttttgtctttgcaaatctatgtcttgatttaggcaagtggaaggcagagaggtttcttgcatctgctccttcaaaactaccttcagtagaacaatccttcctattttggggtagcatattctggtttcccagaacatacttcagtcaaaacaacatatcacagcagattaaatacagagccagatatgacaactcaactattttctagtaagccagatatggaaagacatttgaaaatacaaaacaatgccactcttctcatttcggaaaatagatttttcatagaagtttcacttttatttattttttatttttaaattagtggagaactatttaatttttttttttttagttttaatgtctagtatgggagatactaatagtaacagaccaaataaacaaaggctctttgaggctctcaatttttaagaatataaagggatcctgagacttaaaaatttgaaaactgctaagctctctctcactgtgtgactcgcctgctcgccctttgccttctgccatgattctaagtttcctgagccctcactagaagctaagcagatgctggtgccatgcttcttttgtatatagcctgctgaagagtgaaccaaataaaccctcttttctttataaatttcacagcctcaggtatttatagcaacacagagattaaaatcttattagggcaaggggtatagctggtcctaaaattgtaagattaggaactatactttgtattctagttcataagtataaaagccctggatgagaaattgatctgaggaaagctttattgcaaattaaaggactcaggagaatagatattgctgggcaatggaggatatctcatcataccccccttgagcagtttgcttttatcatgactttgagcactatcctttatgtctctgttcctcaatttctccagttataaaataggaccatttttacatcagcgcctcctctccctgtcttacaggggtttgacaaggatcaaatgagttgctttaaagagaacatgtgagataagatatctcctcacagtaggtttccaggatcctgtccaggatgatcacagtcagcatggggttaatacacagattcaagaggcatatcaaaggagatctgataagatttagtgactggatgaatacagggaataaacagaaattagttaaaaattattctaaggagccagatgctgtggctcatgcctgtaatcctagctctttgggaggctgaggcgggcagattacttcagcctaggagatcgagagcaacctgggcaacatggtgggacccagctctacaaaaaatacaaaaattggcgtggcacatgccggtagtcccagctagctccttgggaggctgaggtgggaggatcgcttgagcctgtgaggttgaggctgcagtgagccgtgattgttcgtgccactgcactttagcctgggtgagagagcgagatcctgtctcttaaaaaaaaaaaaaaaaaaaaaaaaaaaagtttgttctgagggcttaattgtcaatattttagtaacaaattggaggaattggagagaaaagcaaaaaatagatatttaaaaacccaggcttttaagatcaggattgtaggattgtagcacagaagttaaagaaaagtggccagaaaaataattaaggacaaaacaggtagggcatggatggctgtttaaggttggctttcaggaagcagaggagttttgtaagacaataggcaagcatcgaaaagaaacttggattattataacatgtagcagaaaaaatgaaaaacaaaacaaaaaaaacttgggttagcgtctaatggtcggggctggttatacaatttgtgggatacagtgtgaatgaaaatgaaatgcaggcctttgttcaaaaagcaaggggaaaagtacagttaagagtgctaatgtttaaagcttttttcctttgggaagaaaaacatggtagagttaatagcaataaataagtaaacacaaattcaaaattatgtttgtgggtatcatgcttttataaaagatagtaaataaataataccttatcactgtgaaatcttgattaatcatgactttctagctcttttttctgcaaattcattttagtcatcaaaatttatacttttataaagtttcatttttaatttatataattggaagtaatgtcaattatgtttggcaaatgcaagattacaaatattttttgataatttttgattttgaggacaggccttgtactgatgccactgttaagaacattttataggctgtgacaacattaggataaatttctgataaattatttcaaaatctaaatttagaacatctagagctaatttttagaacaatttttctaaaagctttaactctacaaatcagttctgtgtatagatttaattctaagtgtagatttatacaggggtatttaaatattctttctgctatttcttgtaacttggaagttgtacaacttccaagaaaccaaatgacttcatgacttgtatataattcagaatgtctgtttgtgcatcctacctcatatcttcaggtatgaagatatggaaacattaaatttaaaataatccttctcattaacagttggttcttcattaaaacagttggttctcatacaaaaatattgttcttttcaaccaaatgtgacaatctttatattcaatttctctttctaaagctattgctatttggtttgcaatgttgcagtggtttataaaactggagattataaatgccttgatgaattctgatatatttttggtgccatgacttggatactttgcaataatatgctgacaaaggttttactctctgagcaccaacacttcctgtcctggtccttaggctggagagttaatatttgcgcatatactgttaggataggttccaggaagaggagtactttggctttccactgtatatccccagtgctgagccgctctttcatggggctgctgccatcattgccattgccaatctgggctcagtcctggccactgccttgagtgccctgtgttgtccacgtctgtcccaggtattcacatttgggcccaggcagccagtccagctgcttagtgcatatgctgacacttgacatatttcctctgttctgtgctccattgtcccactggtcttcatctacaaagtacaagttcaaagtcattaacaagttcaagatggcgacaaaggaccgttcaactaaatagaggccccttttgagagcaagcccatgtgtgactgcacaagttacatacctggtaagcttactctgcccatttatattgccgaagtactaagactactaaactgcctttaaattgctctgttcaggacttccctaagatgaactatttgaccttaatgggacctatatagttgttaggggcagagacatggtagttttcatgcaggtattcagtgagtttgttttaaaacatgctaccttcttagtaagacttgatactcctctaggagccttatggaagctgaactccctggcagccaggactgtagctattgaatctgactggggttctaagaggaaggcttttgaaatggagttcagacaaactgctctatcaaaatactcttgttgatttagtttgctgtgttttattctatatctttcttttaattaccacttggatttttattatttctgatctttttttgtttgttcgtttgttttttggttgaaggaaagggatcatagattattatttagctctcaccactggctgcttgatatggatggcctactgtttatcaatgccgataaccagagttttggtggttgttgataccatatatgtcccccttaatcttgtaatcttgtacctatgtgagagacatttttaaagaagaaaatcaagaaaaatgtctcatagcctcatttgtcatttttttcttctttaagacgtcaacagattttttttagaggaagtttctctaactaaatgtcttttgtcctctgtaaaatggacaagagttgaaacaagcaatgtatatgaaaggtaaagacgtcaaagtcaacacacagaccccagattgcactcagccacttctttgcttcccacagcatttctatgctgtaaaatgctgtcttcaatgaactagaattggagttactgtttgatcctcctcttatcctcttaaccttggccaaagatatttacattatcacttcctaactgatgtgccacatctattgcaaaaataagttgtggtgagcaagatactgattccttgtgttctcagggtggcctggcaggagcttctgggtcagttgtctgaaggtgccctgctccatttgccctaatgtgctctataaacacctttccttgaacactgtgacatgaaaaaggcttggaagtactactttaaacttcaaatgaaaaactcacaaggaagtgaaattccgtaattaagcaattaccttttaaccatttatgtaatcagtattgcttttgttctttttcagtttttttctcctaattttagtcaaggtaaacatctaagcagcaagtaatatactgatgaaaataaattttgagatttgtaatctagtaatttgtcttctgagtcttgtgttaataggaaccagaggtcttagtaaatgagaactatgattctgggtgcttaaattgttttatccgcacactcattgcgtgaaagatttcagcctataaggaagaaattatgtcagtctagagtctcctcattgtagaaaagttcccatttttatacttttgatgataacaaagcagctccattggattgtggttgacaatagcaatctgtatgtttttgctagcaacatacagatcataagtagaacatatttcagagttacacatgatccaagagaaagtgtgccgaattttgaacttggttggtagaaaaaggtgattttttttttttggtaaagagatttttttagataaactctaagaaagtagttatttacagaaagtacactgaagtataaaaagatagtaaacatagtcataatgactatagttgctagctatatattcagtttatctgagggggcaggaactttagcatcatcttgttttatgaactctaatttacttatcaataatttttcttactagttacttgttgcaataacttatactattatacttcatgtgtggttttgatttcttaatggcagtatcttctttattagttgactatgggaaatatacaagtatagtgtccccttgtttgcaaagaaagggattcgcgtcttcacagtttactcacagctgcagtggtgagctgccctctcctggtcatctatgccttccagaactcccggtggataccagggaaaatcatacattttgccaaataaatggatgttttaatcatctttgatcttaacattattttgtgacactgtagtataaagctctgctgtagctccttacttttcatgtcttaaaagacattgttgacagaaaagatgggtcatcttttttctcccacgttcttgtaggcattctatccacctgagatttttgccccattacttcagtcttaatggacaaattttgtgccacccttgtttactaaattcttgagatttacttagaagatgtttcttagtttgtctatccactttgggaaaaagagattttcagaactgtcttaaataagtggattacccaagatgttcttttcatagaagattttttgttacatattttcttaaaaatgagcatcagattttctctactgttaataattcatgttgtacatgagtttactggtgattcttcttaaaaccagtgcttatgtttttatttttttaattctctattcttcaattcctatttcttataagcccatccttattttagactctagacttggggacctatgggattcgcatcagttatggtgcttaacaaaactttaataccagaattttagaatcttactttcttgttgaaagtagcagtttatcccagccttttcctattatataccttatattttgtatatactcttacattttctatatacccttatattttgtatttttaaaatggaaggaatgaaaaaaaaacctgtggtttttatcgtatttcccatttatatttgtaccttgctactagttgctatttctattaagattcctagaaaactttttatgacatgttgtttctaaagttcatatatattgtagtaactcagtataactcattatttactaaggaagcatactaatattgcatatcctctttaaaatcctacagttaagaacaaaagactagaagacatcaggccttttcatttattagtcattttaccttttagacaattttatgtaattatttttcacgtggcaaatttcattgtacactacacacatacgtttgcagaaggggtgcaaagttttggatacatggaaatttcttcttgagttagctagaatttcttttcctttttcaagttaagacagaaaacccagccaatcaattcagttttgatagattttaaaaccctaatcaatactttaaaattacttatgaagcaaattattaagagtaacttctaaacgtagaaaacatgaaaatcacatccaaattgtagaaagaagttatttacaacaaggtcagggcgtgtgccacttcttcctccagccaagacctttcctgaacttggtgatcatggataaacgagtgcccaagagtctttaatttgatatatgcattacatttctaagatcttaaactaataatatctctttgcttgtctttggtgttgagattgtttaaacctttcaagacctgattttgaatccttgctgtcatttactagttgtgtgacagacttgcccacttctcctttataatgtggaggtaatattcctacaatggatgcttgtgaaaattaaacattaataagaatattaaaatgcattttgtaagccaataaatggcatacaaatgtaaatagtacttataaaataaaatgcgtttaattttttaaaaatatatgacattcccaaaacggaaaaaggtattacagtgtctgttaaaccagacttaatggaatacttgatttttcttctcataatcaaccaattacattaatgtatcaaacctgtgtactgatgaagatattttaaatagtcttttttttgtggagggcagagaattgtgtaacttttatgtatcccactgccttttttattgtgtattgtgaacacaccacagcagaatttaaatagttaaatatttgttgcctcattaaattgtggcttcctaacttaacttcagattgcagaggactagaaaagtaggcatttaatatattattttattttacgagttttcttgatacataattggttttggatatatttcctcctaagtacagagctagcaccataaattacaagcagtaaccagatctttttatatgcctcactttatattgcttaggcaaccttctgtatgctgttttctctagtcctctccatagcagttaaacctgaactctcatcagagaagtaaaaatttcctgtaaaatgagttgttaaaagctatatgtttgaagtgtaagagcaggcccttctaatgtttaggagttagcttgtgaaaaaacaagcttttatctatgtgttcttgcatttcagtctgtatttctgaatttatgtatgtgtgtggcagtgtagggtagatgataaattttgtagcctaggaaacctgtatcccatcaggagagaaaacagatgttcttcctcctggttaagaactacatctatccatttagcaattatgaatctcttccctaggtaatactctttgagaaaggaatctttcagcagacaggatcaagaagcacatgattcattttttacattatgggaatgaatccttttacatttgccttctcctttttcatgctttcagtttaaataaaagtaagtagacgttccagtttaaatcacgttccagtttaaataccttacaggatgaaaggtattctttacttcctaggatcctaggattcctagtaaagggattctttcttacttcctaggatcagcgaattggagacactgtcagagatcacgaaagaaagttcgtcattcctcccatccccaatccagttcaaccaacttgtttctagccatgtttttatttaatagtttctgattttagcttgttttgattgaaattatattatccaagtcttgtttatgtttctctgaaagtggccaaatactgtttgttctacttaagtagtatttgcatctttttctgtcctcatgctaccactgtagttgaaacccttatctcttaccaaaacataatctgtcatctcgttgcttctctaaatttcttccatattgctgttggactgatcttcctaaaatagaggtctcatcatggctttctgttttccagcgaccattttcctttttcaaaggtatcctattgcctttaaaattgaggatagtgtgtttagcctagaattgacacccctcagtgttggccctagtctgtttttttcaggctgtatgccatagcactccttcacatgagccaaactggatggttcaggctttgatacttcactacctcttttctcatcctcaaatcagtctctgtctttgtgatacccatcttctcttccttcatcccctccccaaatccctgcatgttgaattcctacttcttcctcaagatcttagcataatgccacttctacttcttctttaaggtcagacatagaaagaaaagagtaggaactgtatttactgtatcaatatggtaaaaacaacactttaattgcttttttaaactaaaatgatttaacctacttcatttatatagttcatccaaaaaaacagaatgaccttcccaaatgcaaatgcttaatatgtaaagtttagttaccatattaaagaagattctgcacaccatgccacttaggtatcaagaaatgatggtatggccaaaatgggcaaaggaagaatgaactattacagacaaaactatgaaactcagaggagctcatagtacaactgtaaatttatttgtttttttaaatttagggatgtgtaaagagctataaagttcttgacaggatttgataaatcatcagggaaagtagttaatgctttagggtaaaacattttaaaatacagctttaaaaatatataaaaatagagctttacactcctgttattaatttttaattgtctctttatgatgctaagcatgttggcactagactcagttttaaaaatgtctaccagcttggcatggtggctcatgcttgtaatcccagtactttgggaggctgaggtgggaggatcacctgagcccaggagtttgagaccagcctaggcaatatagcaagactccatctctacaaaaaacagaaaaattaaccaggtatagtggtacacacctgtaatcttagctacttggggggctaaggttggaggatagcttgagccgggatgatcaaggctgtagtgagcaatgattgcatcactgcactccagcctgggcaatggagcaagactctgtctcaaaaaacaaagtctaacagtgatgtatatgttataccagtgttatttggaagataacttgagacttttcccatgcatactgaatttttgggaaataaatttaagtttttctgtataaatggtcaaaaaaatgttatattgagagagagagaggtatactatccggaatacagtctgtgggatatgcctgtacaattaatttatccattcaggcccagtttcaaaggctttggaagatgggttgcaaagtttattaatcctcatcatttcttggctaagataattagtataatataaaaagtctttgattctctattctgatgacctgttttgatccttagagacagaactaaggattaaggtgagatgaatcttcttagtttactagccaaaacagtatactcagccctagaacagaattctctgtcgcttgtatttagcattccctcttgctgaaagtgttcttctctttttatatttatgatttctattaatgaaattgcatctctgtctcccatttggtggtgggggggagacaggggagaagaacagggccttgctctgtctcttagcctggaatgaagtggcatgatcacagctcacttcagcctcgacctcgacctcccaagctcaagtgatcctcccacctcagcctcctgggtagctgggactaccatgcacggctaattttttctttttttttttttttttttttgagacagagtctcgctctgtcacccaggctggagtgccgtggcatgatctcggctcactgcaagctccgcctcccagcttcacgccagtctcctgcctcagcctcccgagtagctgggactacaggtgcctgccaccacgcctggctaattttttgtatttttagtagagatggggtttcaccgtgttagccaggatggtctcgatctcctgaccttgtgatccacccgcctcggcctcccagagtgctgagattacaggcgtgagccaccgcgcccggcctaattttttcattttttatagagacagggtcgcaccatgttgcccagcctggtcttgaactcctgggctcgagggatcctctcaccttgacctgagattacaggtgtgagccattgggcccagcctgcattttcttgaagttgaagatttcctctgtgatcacatcaacccaagattctctttctctaagccctattagcatttcttataatgccattcaagtaccatcactaacttgattggaagttcctcagagcagggactgtgtttcagattttttgttccccacagtgcttaacacagagcctaatacaaaacaaattctgtgtgaattttttgtgaaagctcttggtatctctaatgtgctctcaaaaccaactactattataagataattagattttactcactaccagatttctctacctggccaataaggtttgcagaagttccagacctatcaggtgtttatttgcaaagaaacaaagtagtaaacttcaaaagtcatgaatgtactcttgagccctgtcctcacagaaaaaaaaaaaaataagcaaaatttctatttttttttttgagacagagtctcgctctgttgcccaggctggagtgcagtggcgcgatctgggctcacttcaagctccacatcccaagttcacaccattctcctgcctcagcctcccaagtagctgggactacaggcgcccgccaccatgcccagctaattttttgtatttttagtagagacggggtttcaccgtgttagccaggatggtctcgatctcctgaacttgtgatccgcccacctcggcctgccaaagtgctgggattacaggcgtgagccaccgcgcccggccgcaaaatttctactctttccgaggggctaatgctgttctcagctgtgaaactttattgttgtcaattctggcatttaattctgaatagggtgccatcaccttcactactctattcatgtggtctttcaacaaatgtattgaatactactgtatgctatgttagggataagaagtgacccagactgctataagggaaagataaaacagtagtatgagagtgtataatattctaacgtagtatggaggccaaggaaggcttttatggtgacgtttaagctgaaatccaaaagaattaactagtcgaaatggtgaggcaaagagtgttttgatccaaggaaataacatgtgcaccctatctactagaagggatgaattatttgcttgctgtcctgaaggtaggccattgtggcttgaaagagtgtgagagagagcatgtagggcaagatgaggctggaagagtaagtaaagatcagaaatttcaggcattgtaggccatgttaaggttttgaacgttatttttagagcagttgctaatgaagtatatgaagcaggggttataggagcagatttccattgttaaaagatagctatgcttcagaaaagagaatggtgagagggcctgtagtacctgcagaaataccagttaagaggctactgggaggctgaggcaggaggatcacttgagcccaggagtttagcctgggcaacgtagtgagatctcatctctactaaaaattttaaaaattaactgagtgttgcagtgcgtgcctatagtcccagctaccagggaggctgaggcaggaggatcgcttgaactggggagatcgagactgcagtaagccatgattgtaccactgcattccaacctgagcaacagagtgagactttgtctcaaaaaaaaaaaaaaaaaaaaaaaaaaaaaccaaaagaagttctaggcatgatatgataatgttgttatcttaggttagtgaggtgacagtgaagaaagattataactgaattataattttttaaagtaaaatcaacagaacttggtatggaactatttatgggagatgaggaagagaaaaacaactcctagatttctgattgtgccctgcgtatgctaaggaaatactcagaagggaccagttttaggaagtgcatttgaggcacctaggccagttgaatttgagtggtcaggtcaagagttttatatctgtgaatcacaagcatagataggcaggctaacttagggtttcagttatctgaggaaaatagagggctttgttgttttatttggtagccattagctatgtgtgtatctggtctgaattgagatgtgttatagtctaaagactgaaaaaaggctgtaaagcatgttattaataatattttacattgattacatgttaaaatattttagctatattgtgctacataaaatatattattaaaattaattttacttgtttaacgtgactactagaaaatttaaaattaccaatctcacattagtggcttgcattacatttctgttgggcagtgctggtatagaaaagcaagcttaggattgggccttgagatatcccaatactgaatgtctacatattatcagagtcaagttcttggcattttcgtgtgaaaagactcagatacactacatacacataaagtcttagcattgaaaagacctcctaggaggctgggcgcggtggctcatgcctgtaatcacagcactttgggaggctgaggcaggtggatcacctgaagtccggggttcaaaaccagcctggccaacatggtgaaaccctgtctctactaaaaatacaaaattagctgggcacatttctgtaatcccaactacttgggaggctgaggcaggagaatcgcttgaacctgggaggtggaggttgcagtgagccaagatcgcgtcactgcactccagcctgggcaacaagagcgaaactttgtctcaaaaaaaaaaaaaagaaaagaaaaagacctcctagggaattttaatgtttcaaaataagaatttttcttttcccacaatctcctctttaaagaggccatcattgaaagtagtttccagcaataaaaaaaaaaaaaaaaatagtagtagaagaggaggagccattactttcatttctgttcattctgaagaaacagagatgactctttctgtataactcaaattcttaaaagaaacccttgatatatagtgtcaattatatgaactctacctcagggtacctaaaaaaagaatgtttggttacccgaatgagggggaggttttcctttagagagaagtattggtgccaacaaatgaaaaaggaatagtttgaacaccacattttgcaactcctaatgaaataatggatttaaagaattatcgatggctgcttatttgacaaaaagagacacctgacattgtgccacttcagagaacacagtgcttacctagaagtattctttccaaaatttaaaaaatgatctaatctacatataatcaggcttctagatccaactacaagtttataggaaatataaagactatctcatgaaaatacaatcagcaaaatccagaatgtgttaaactctacaggatatcacttcatttctttaacaaataattgcatggaaaagagggaggtggactgaagggaagaaatatggaagggggaaactacagattcagggacttagtttattacaatggacctttttgggatcttataaagcatatatatttatcaggtaattatagaaatttgaacactgatgaacatctgattagttattgttggtttttaaatatatgatattgtattatggttacatttaaaagagtccttatttatcatttgtttgtttgtttgttgagacatagtcttgcactgttgcccaggctagagtgcagtggcacaatctcggctcactgcaacctccgccctccaggttcaagcaattctcatgtctcagcctcctgagtagctgggactgtgggggtgcgccaacatgcctggctaatttttgtatttttaggagagtcgaggtttcaccatgttggccaggctggtctcaaactcctgaccccaagtgatctgcccgcctcagcctcccaaattgctgggattatatgcgtgagtcactgcgcccggccattatttatcttttagacatagcatgctgaaatttttgcagataaaatgttttgcttaacaatagttcagtagaggacaagggtaagtgggtagggatacagatgaaataagattggctgtgaattaagaattgttaaagctggaactttgggagtttattatactattttttcaactttcatatgtttgaagttttccaaaatagtgaatgagtaagaacacacacagacattatacagaggggaagtgtcattaatgattttatctactatacctttttgtatcagaagatctggagaagaaacagaaatattaaagtttatttccatgaataatccctttactttcataaatatctgctgggcctggtgatttgaccagtaaatgggatttatctttttgtgtagccaataaattggctctttaatcttttctcattcacgttaactttctcttaccctgtaaagtgtgttgaatttaatgtttattattcctatgagttggggaattggtataaaatacatacataaaacgtgtaagaaaaattataaattgaacacctatgtaaccatcacccgggtcaagaaataggaccctttacatgtttcaaagctgtgtggtaaaaaaaaaaaaaaaaaaaaaagaaagaaaggacctgggcagtactgctgacgcacatcccttctccaccacatacttcattcctcccctctttcatatatatgtgaatattcatcaccctaatatttatggaaatcaatcacttctttgctttttattttttctcttctcttaacggtatagtttgtcttccctctcgtgttcttcatacttttactgtatattcatgtatgtataatattattttgcacatttgcagacttaattagcactattccgtacgtattcttctaaacttatctgcactctgcatcccatagggtttcctttatactgatatgtgtagctgtaattcattccttttttaactactgtatagtattctattgtatgattgcaccaccaatgtattcgttctcttactgatggacatttaaatttttggaagttttttgcagttataaacaaagctgctaaggatattcttgtgcatatctcttggtgcatgtatatgagagtttcagtagagcaggggttggcaaactggcccacaggccaactgcctctgtttttataaataaaacttttaaacagttattctcatttgtgtatatattgtctgtggctgttttcggcccataatggtagagttgtgtagttggcaacagagacattatggcacacaagcctaaaatatttactacatggccctttaagaaaaagtgtcctggctgggcgcggtggctcacacctgtaatcccagcactttgggaggccgaggtgggcagatcacaaggtcaggagattgagaccatcctggctaacacagtgaaaccctgtctctactaaaaatacaaaaaattagccaggcatggtggcgggtgcctgtagtcccagctactcaggaggccgaggcaggagaatggcgtgaacctgggaggtggagcttgcagtgagctgagatcgcgccactgcactccagcctgggcaacagagcgagactccgtctcgaaaagaaaagaaaaagaaagggtgtcctgacacctactcttagagtgtatagcttggagtagaattattagatctcctcagcaagggtaatcatcaactgtactggacttggcaaagtatcctgcaggaattattatatgaattcttacctcctggtcaatatttggtggtgttaaaattttgttttgcattcatatctcactatttatattgctgtttctctgattactagtcaggctgaacacagtttcaaatgtttattgaatcttgcatatttttctgttgattgcctgttcatattttttgcccatattccctatgtgttttttttctcagagatatgtgggaattttttttatatgttccagatatgaacactttgttggtcatatgcattaccaatatttcctcccaacctgtggcttgtcctttaagttttcttagtgatgtcttctaaaaaaccagaacactttttattggaaataatttcaaattttaaaaagttgcaaaaataaaaatggtactcttaacccattttctgtttagaaaaaaacaaatacagcttgctgccagtgcatttttcatcaggacaaatgagaaattggcatacctgtgtagcctttatccagtcacttattatttacattttactccattagctttataatcatttgtgtgcttgctcactcttcatgtatatgtatgtgtatatttgaatatgcatatacacacaattctgaaccatttgagattagagcacatatattatgcttggctttcatgagtgtatagtgatataattttatgaaaattaccatatctaatttcttttttttttttttttttttttttttgagatggagtcttgctctgttgctcaggcaggagcacagtggtgtgatcttggcccactgcagcctccacctcccaggtttaagtgattctcctgcctcagcctcctaagtagctggagtcacaggtgcgtgccaccatgcccggctaatttttgtaatttagtagagatggggtttcactatgttggccaggctggtcttgaactcctgacctcaagtgatctgcctgcctcagcctcccaaagtgttgggattacaggcatgagccaccatgcccagcctctaatttcttaatggttcctcttcctgtttaaaagtttttaatgttaatgtagttatttactcaatcttttcctttatggtctgtatcttttaaattctttcccatatctgagttttaaaaatatttgctgtattttctcatatgattgttaaaatcttgctttccatatttaggaatgtaatctactttgttttttttttatatagtgagagatgaataccaattttgttttatcccattgtcccagcaccatttattgaataaattgtttcctttgtttatagtgacacctatatggtgtatcaagtttatgcatgcaggtcgttgggctacgtgattgactgttcatgtacttagatcacactgtcttaaaaattagagctttatactaattattgatatctgcctggcaagtctttctagcatgttcttctcaaatttaacatttactttgataaatagttacatagcaacaattcatgtaatcatcacatactcaaaatacaagatattaccagcatagtgaaacccatgctctcaggatgttgcacccttgcagtaaccttctccttctcccaacagttgggccttatcctgacttttgtggcagtacttccttgattttctttgtagttttgtcactgataacttctcctaatctatattgtctagttttcctttttttttttttttttgagctttatattcatggatgcatccaggagatataattttgtatacatcaggcttccttaataaaacattataaagctgtggttcatttttttgttttttagttgatgtgggatattttattttgtgactataccagagtttattcactctgctctaagtgagcattttggctattgttaaccagtgtttctcttaatatgcatgttttgggttaatttcaggtaatacatgtaggagtagaattgtttttccctatggtatgtttatcttccactttaacatggaatggcagactcttttttcttttctttttttgttttttgaaacggagtttcactcttgtcacccaggctggattgcaatggcgtgatctcagctcactgtaacctccgcctcccaggttcaagcgattctcctgtctcagcgtcccaagtagctgagattacaggcacccaccaccatgcctggctaattttttttatttttatttttagtagacacggagtttcaccatgttggccaaagctggtcttgaactcctgacctcaggtgatccgcctgcctcagcctcccaaagtgctgggattacaggcgtgagccactgtgcccagctggcaaactcttttttcaaagtagttttatcaatttacattataaccaacaatgtatgagagttcccattgtctgcatccttgcgaacacatgatattgttagtattcttaattctgttttggtagggggatagtagtattttattttggctttagtatgcatttaccagatgactaaatgaagtcaaatacctttcatgtgtttattgatcacttagatatcctcttttgtgaatgacctatttaagtcgtgctggagtttctacttctttggcttaataacttgaaggggttatttatgtattctagacatgcgttctttatatgttggacagatatctccttccacattgtggcttgccttttcactctcttaatggtgtttttttgttttattttgtttcttgatgaacagaagtactttatttcaatgtagtcaaaagttatcaaatttgaattcatgctcaatcattacttacctactatgtgaccatggccagcttcgagcttcagtttacttatctgtaaataggtggtaataatatccatgtcattgggtaattgagaagattaaataagataaagcacttattatagagctttttacctagcagtccctcaatagatgttaattgccttcctcatcatttagggtgctcattttcatactgtcttttgggaaattgggtagtattcatgagctatttgcaaatgaatgttttggaaattagaatctcatataattatcctaggaatttagaagattgcctaaaatagtaaatcataattaatttgcccagagaactaaaatgtaatattttctctgatgtagaggatttacactgaatatgggatccttgtataataaaactcatgactggagtatcttatccaggaaatgagaagagataataaaaaatagtctaacccttctacatgcatcatattttaaaccaagagtagttctctttgcctccaagagaaaacaaggtttattaaatagtgaaaaattgctaatcactccagcccaaagtaccttctctctcctaggaacatttagtgcctattgatgattttcattttcccatatttcatcattcaacaataatttgtaggacatctcttactatgcttactatgcaccaagtatagactcattctttgtgtgaatggagctaagaatgaagagtggaagattttgtaaaaaagattttaattataacaccatgccaaaaaatttcaaagttctgctactggtaatggcggaattgttcataatgtaccaattttcccacaggtaattctactctggatgaagcttatactataaatatttagtacataaaatctaaatgtttatatacacacacataattgaaagcacactttaatgcttcaaaacataatctggccagacctggatggctcatgcgtattatcccagcatttagggctgttcagacaggaagattgcttgaggccaggagttcaagaccagcctgggcaacatagtgagacccccccatctctgaaataaaataaataaaataaaataataaaataaactatctgaaggcactggagaccaaaccaaagtgggcagaaactcacaggaagtcaacatttagaataaagaaaaagcatttgatgactttatttttagtattttatgcttgagggcagttactaatggctacaccatgggggtgattagaactcggaaatcccaattcttactgatttggggaatcagaaaatagaggctactatagcacctggaaagtgaagggaaattctcagagggacatcccaagttctgcatataaatgattgtcaaatatttgatccttgaacaaaacgtgaacattcttcagaggaacataatggaatccatagcctctaaaaagtatcattcacaagatgtagaatacaatccaaaattaccagatataaataaaaagaaactggaaactttgatgtatactcaagaaaaggcaaccaagggacactatgggatgacccagatatagtaattagaaaatcaaaaaaaaaaagtttttttgtttgtgtgtgtgtgtgtgtgtgtgtgtgttttgttttgttttgttttgttttgttttgaggcaggagtctcactgtgtcacccaggctggagtgcagtgaccatttacaggcataatcttaactcactgcagcctcgagctcctagactctggtggtcctttcacttcagcctgccaagtagctcggactgtaggtgggtgccaacacaactgactgacaaggattttaaagctgttattagttatgactatgctcaaggatataaaatggcatacaataaaataaatatgaaacttgctggagaaataaaactataaaagagaactaaatggaaattttagaactgaaaaatgtaatatctgtaataaaaattcactgtgtgaccttaataacagattgaaaatatcagtgaacttgaagatccaaatcactcaatctgaaaaacagaaagaaaactttaaaaataaattcaaaagagcagtgccccagtgactcattgaacaatattaagacctaatatgtgtcattggagtcccagaagaagagaaggaaactggggccaaaaatatatttaaagagataatgggagagaattccccacatttagtgaaagatgtaattgtacatattgaagagattcatagccaaattgatgaaaactaatgataacaataaaaatcttataaatagtaacagaaaggaataataataaaactgagagttgacttattagaaacaatggaggccaaatgcagtagaacaccatctttaaagtgcttagggaaggagagctttggggaaagctgggaatcaagaattctacatccggcagaaatatcccacaggaatgaatgccacatgaagattattttagattttaaaagtgagaaaggaccagatgcggtagctcacacctgtaatcccagcattttgggaggccacacggcaggtggatcacttgaagccaggagttttgagaccaacctgcctgaaaccctgtctctattaaaaaaattaaatttaaaagagaaagaatttgttgccagctaccctccactagtagaaatgctgaagtaaattctttgggatgaagggaaatgatataccaagtcaaactcctgttttcaaaaaggaatgaagggaaaacttgtctttttttatcctctttatttgtttcaaatgtatatgatgttgaaagcaaaaaaaaaaaagtaacattgggtgatttatatgtagatataatacatatggcaactatatcagaaaggactgggatgggcaggtaaatagaatcatttggtgacaagttttttacatttttcataaattgtatgatattaactctgaaatgttaatatctgaaaatgtaaaggtatatttcagttcttagaacagacacttaaaaaaaaaagacaaaaaaacataaggacataaacctaaaatgcaatagagaaattatattggaatcttaaaaatattaaattactccaaaggacgaaaggacggacagagtaataaaaagcagtaattgaaagatctaaatgtggacatattgataattacatctggccaggtccagtggcttatgcctgtaatcctagcactttgggaggccaaggcaggaggatcctttaagcccaagagtttgagacaagcccaggcaacatagcaagaccttatctctataaattaaaatatatatatatatattagaaaaacataattacatgaattgtgtatatacagaacactccaattaaaaggctaaaaataagcatgtgaaagctggagtagtcatattaatcaggtaagtaaactttgagactaggaatagtagtaacagaggtaaacaaggatgtttcccaccgggtgcggtggcttaagcctgtaatcccagcactttgggaggccgaggcgggcggatcacgaggtcaggagatcgaggccatcctggctaacacagtgaaaccctgtctctactaaaaatacaaaaaattagccggtcctggcgtcaggcactacttaggaggctgaggcaggagaatggcgcgaacccgggaggcggagcttgcagtgagctaagatcccactactgcactctagcctgggcaacagtgcgagactccgtctcaaaaaaaaaaagggatgtttcagaaagataaaagggtcaagtaaacaacgaaggtactggaatcagaccttcaaaatagataaaaacaaaatttgacgggattaaaggatctcctcatcatagagaagtccacaaccataattggaagtttgaatacctgtctcaataattgacagaagtagtagattaaaactaccagtaaggacatagaagatcagagtaatactgtatgtaataccacccaccttgacataattggcatttatagaacacaaaatccaataattatagaatatgcattcttttccagtatacattcagcaagatagaccatatatatggtggaccataaaataagcttcaaaagattgaaatcttagactttgttctttgatcataatagaattagaaatcaataacaaaaaatctggaaagttctctgatcacaatagaattagaaatctatagcaaaaaaaaaaaaatctggaaagtccccaaatattgggaaattaaataatatactactaaattaaaaattcattaaacttttttttgttactgcttgattagctaattgttacagatgattctctgattttctctctgtctctctctctctctttctttctctttgtctttctttcttgagacagagtcttgctttgtcacccaggttggaatgtagaggcacaatcatgtctcactgtagccttggcctcccagactcaggtctttttttatcctcttaatttgtttcaaatgtatatgatgttgaaagcaaaaaaaaagtaataatgtgtgatttatatgtagatgtaatacatatggcaactatatcagaaaggactgggataggcaggtaaatagagtcatatggttacaagtttcttaacatttttcataaattgtatgatactaactctaagtagagttaatatctactagagctaatatctactcccatgtatagttcctaaggtccctcctgcttcagcctcctgagtagctgggaccacaggcgtacatcactatggccagctaatttttaaattatttgtagagacagtgtctccctatattgcccaggctggtctcaaactcctgggctcaagtgatcctcctgcctcggcctcccacagtgctgggattacaggcatgagccaccacacctgccctctaatattcttttattaaaaagagagaaaaatacacaaatagaagagattgtgacatagaggtgaaattctctcagttttgtgtgtgttttcctcttgagtttttctcccatatttaggaaaagatgaattataaactctttatgtgcaacttctttaaatatagcatatatgagtctccacttcgtatatagtgtcaagctggtacacaaaacagattctcagaaaataaactaagaaaatattcctcaagtctctataaatacatattttatcacatgtgattgtactatatcaatctcattttgaatctcattttgagagatgcacttacactgtttggtatggcgttttgtattacaggaatgcttttcaggactagcagttgctaagggaaggaaatgcttaagcttgtctgtaaacattaacttcagcatatacacattaataatggcttccccacctgtaaccaacctacttacctggcaggttttatttcctaggctaaggatttttgagaactctatcataaaacagctgaattatgacctcctttggtttttacaatatgcaaatacagctaaatactcgttaatattctgcatttaaattcttcttcttaataaagacatgcactttattcctgctcccacgtatggttcctaaggtcccagagttcagacttccttacaatttttaattctcttctatcttaaaccttttgagagctgagcaataagcttttcattttcttcagaatcagctccagtctcaggattttgaggccatgtcagtagagtaagaatgtaccctccatgttttctatcaaaaataaaatattaacttgtttaatagtttcagttttgccagatgaaaataattctggtgatggctgcaaaacaatttgaatgtacttaataccactgaactgtacacttaagaatggtaaagatggtaaatattatgttttctatatttcaccatgattttttaaaagtttaaacaaggccgggcatggtggctcacgcctgtaatcccagcactttgggaggccgagacaggcggatcactaggtcaaggagatcaagaccatcctggctaacacagtgaaaccccgtctctactaaaaatacacaaaaattagccaggcgtggtggtgggtgcctgtagtcccagctactcaggaggctggggcaggaaaatggcatgaacctgggaggcagagcttgcagtgagccaagatcctgccactgcattccagcctgggagacagagtgagactctgtctcaaaaaaaaaaaaaaaaaaaaaagtttaaacaagacaggaggatcacctgagcccaggagttcaagaccagcctgggcaacaaaatgagatcccatctttacaaaaaaaatttaaaaatcagcagggtgtgattgtgtgctcctgtggccccagctacatggaagcatcagtgagccatgtttttgccactgcactccagcctggctctggcttaaaaaaaaggcggggggagtgagggggtaagaaaagagtcaagaagacctgaatcttttttttttttttttttttttaatgaaaatggcatttgttccagaggcaagagtagcctccaaattagtagaatgccagatggagatgtggggtggggtgggatggggagaaaggtgttgaagcaactcaatcatgctactactaatagttcctcttgggttgagacttaggatggtattaaattcaattgttttcttttctgttgtttttatacccgtgtgtgctcttgatattatattgagttggcgtagttgcttgcagtcagtagataagaatagtaatgggataatatgtatgaaaaatattgacagcacaatacttttctctttcatggagttcagacataatttgggagaaataaagataggtagtcaatgtctatccagcacatcctaaaatttatgttcattgttgtagaaaaatgtatataatctaagttcccatagtttcaggagaaaacaaattgtaaattaaactttctgtatttttgctccataccccaagattttacatatctacatctaactatagcctcttcaagtactcctattgtttgaaaacagaaaactttaaaatggaaaagtgggctcctccttttgtcctttcttacttgaattttctattttgaaaagaataataggggagaatttcacagggctctaatttatttgacccctctttttcctgttttcctattatgactttaataatatacttttatttgaaaatatttctaagagtcacttttttggggagaagaattagtatgcagttttgttataggcacctcagttagatcatagtaataatggtgatataagagaaaaacaattctgactcttataaaattatcagaagggaaattttccagtttattaaaacagaaaggacagttggtttggtttagtcatcaaaataaactctgactaactagattcccaagttctatattgtgcttgaattttccattgggaatgaaacattccactgccctttttactgtttaacttaagctgctgtgaacactcagagaatggccctgtggctgagctgcttattttttttttttaatctattcattttatactttcagacagatttttccctggggtgaaacaaaggttaactgaaatttcctctgttgtgtacctgaacgaatcagcagttcgagaaggaaatcccattgatgggccaagagagtgacaggctctatttaaagaattcccccgactgtgtggtagaccagccatgccatgaatttaactgttcctgtggtccccatacttgtacccaccaaaaaaaaagagagagagagagaaagcgactttgttctgcaaacgttggcctaagctttgaaaaccatgagccattgagttttgtgaattcaagttagacagtaacagaggccaagactctaagcgaacaatatctgaaaaggaagtacacaaaaacaggtagaaactgtttaactgttttatttctctgtgtatatacatatttatgtgtgtttatacacacaaaaaaataccttttttgcattttatgtagccagtcctaattacatttgatcaatagtgtttgttaaatttttttaaatatgtaacaaatatgaaggtttttcttgtttttacagcttttttgctccataaaagtatcctggtttttatcaggacatattatatgtattggaaatgaaagtcagcacggtgtgagtttaaatggttaaaaaaaaaatggatttttatattacctctgcaggagcttctgttaggaccagctcatgtattttgtattttttctgtataagggaaactgctttaaatatgaaaagatggtatcttaagttggattaaacatccgtaattcatgtgtatttaacctcaggacttgtgagccttgttgaaaaatccagctttaaaccttccctgtaggcctcaatagtgcatactgcattgggattataaatagtcagtctgtttctggagtgtaggttagtatgtattcccaggaggcatgaactatttacatttctaacaaatgtttcacatatgttgctgattcatatttctatgtacaaatttaggctttaatttttttaatttccttttttattagaagttttgttataaaaagtttcttaagtgtttcattctttctagcatgggtggcttaaggagattggaggggagcgtttcatttatttatatagagattttgatgttttgaaagacaatagaattaatagagaaaattgtccagatatccagcgcttggatttttgtttgagaagtttgaggaagcagatgccatttgagttggtttctatggaaaaatttatcttagagatgatgtagggctatatttatgttcacaaatgagaaattgaagctgagagaaagagaaaatgtttaatacataattactcaatatgtcttggaagaacctaggtttttattcatacctggtgtttctttataaactgcctctcttttatcttgagatggtattttcgaaattatttctctttctcattttcttctaccatttcctgacattttcttgtcttttgttctattcttcttcgtctcttatttttctatattggttgtactgtaaataggttgctagcaacacaccttaggagcaggcttttggggaatgggtctaagtattccatttggcctataataggctatattgttgttttggaatataattttgaaaaaatcaaatttatatttatcctgctagttgatcaagctataaatcaatcaatacttactagttgctgcttatataaatagaagagttaaccagtgactcagacagatgacaattgactattaaagatttttttaaattggcatatgtttaggaaaatcacttgtttcttcaaaatttattcattaagcagtattttttgagcacttactatgtgacaaacaccacacaggtgatagagatacaacagagaggaagatggaactggttcctgtctccttacatcctggtgtaattatataataaaagttaaccacaagtagaaacttggggcattatttttgtaaaatctcagtcaagtttctctctacatagaagactagtataacttcagataccatcattcatatccatatcagaatatagtcctatgttaaaagtagaaagatgcaattttaaacatgttttcccattagtaattgtcatgtggtacatgatgaaatgaaattgttgaaatgagtaccagtaattttattattagagaaagtcagaacactattaataaaataatttagggagattatatagcatattggttaagagcatggtttggatgtaaacatgggtttgagccctctagtctgccactgagaagatttttggtattaaatcaattattattcatatttttatgaattcataaacctcacctgttctcatctgtgaaataaaattgtaatacctacctttataagattgttatgagagttaaattagaaatacaggctgggcatagtggcttatgcctataattccagcactttgggaggccagggtggatcacttgaaatcaggagcttgagaccagcctgggcaacatggtggaaccccatctctactaaaaacacaaaaattagctaggtgtgcttgaattctcagctactcgggaggccaaggcacaagaatttgcttgagtccgggagtctgaggctgcagtgagccaagatcacaccactacactccagcctaggcaaatgagtgagaccctgtctcaaaaaaaaagaaagaaggaaagaaaagaaaaatacataaatgtttaacttagtacctggcacagaataagctctttatatgtattagctgtttttatgtcctatattctttttttattaatttaatcttgattctctttttccctccctccctcccccccgttcccgccctccctccctgcttccctcgnnnnnnnnnnnnnnnnnnnnnnnnnnnnnnnnnnnnnnnnnnnnnnnnnnnnnnnnnnnnnnnnnnnnnnnnnnnnnnnnnnnnnnnnnnnnntgctgttgttgaaacagagcctctctctttcatccaggctgaagtgcagtggtgtaattactgcccactgcaacctctgcctcccgggctctagcagtcctactgcctcagcctcccaagtagctaggactacaggcatgagccaccatgcccagccatgattttctttctctagaaaagtctgttagtggggatttgaacattctttttgtattatacatattttctttgaggtgtcatacattaaaatcaatttcttcaaaaatcaggatgagcatttgtacaaaagtatacagtcaactaggatgaggttttttaaaagttgttttccttttaacataaagttgtatgtaataatttccaatccctcatgccttcttgcttcctttctggcaatctcaacttcaaatcagtaatacttattataggtacattggtacctataataacaaagcgactttgttctgcaaacgttggcctaagctttgaaaaccatgagccattgagttttatgaattcaagttagacggtaacagaggccaagactctaagcaagcaatatctgaaaaagaagtacacaaaaacaggtagaaactgtttaactgttttatttctctgtgtgtatacatatttatgtgtttttacacacaaaaaagtaccttttttgcattttatgtagctagtcctaattactattatatacttattataggtacatttatgtagctagtcctaattacatttgatcaatggtgttaaattttttttaaatatgtaacaaatgtgaaggtttttcttgtttttacagcttttttgctccataaaagtattctggtttttatcaggacatattatatgtattagaaatgaaagtcaacacagtgtgagtttaaatggttaaaaaaaaaaaacatttaaccatttggacttaaagaccttctgtcaatattctgtctagaggctgggtgcagtggctcatgcctgtaatccaagcagtttggaaggctgaggtaggtggatggcttgagcccaaaaatttgagaccagcctgggcatcatagcaaaaccccatataacacaaaaatataaaaaattagccaagcatggtggtacacacctgtggtcccagctactcgggaggctgaggtgggaggattgcttgagcccaggaggttgagcctgcaatgaggcatgattgcaccactacactccagcctgggtgacattgtgagaccttgtctcaaaaaaaaaaaaaaatctatctatctatctatatagatagatagatagatttttttataggtagatagatttttttttttttctggagctaaattgaaacccaagtagctttgggggcttgttatccatctaatatacaaattcttccttctataccaagtcatgtcttgccataatagaaggtagaacttttaaggagatagggtaccacattatggtgaatgaatatttcttttgtggtcaaaatcatcaaacatttgtctatatttactgcccctgaattctctccttcagttctctttttaatccagccaggtttttgcatcaccattccatccaaacttctcttaataggatcaccagtgactttcctaataaattcaagggtcagttctcagtctttttcttacctgccctattggtggcatttaccataatcgataacacctcttctttgatagatacattgtgtttagttggttacggggcactgacctattcccccaccaagtttcctctcacctcactggttactcctaaattcttgctcatgttctatcctttctctacactcaaacccttggtactctcacccagtcctgttctaaataccatctccatgccataattgacaaattttatttccggttcagatctgtctctgaaacttaagactcataatccagtatccaatggcatactccacatcttcatttgaatattttaatactattgctaatccagcctgtccaaactaaattcatctttccctcaaaacatgttcctctgcattttttagttgcagtaattatcattttagttgctgaggccaaaaacctggtagtcatcttttactgtgttcttcttttactttttttttttttttctgaggtggagtctcgctctgtcgcccaggctggagtgcagtggtgtggtctcgggtcactgcaacctctgcctcccgggttcaagcaattctcctgcatcagcctcccaagtagctgggattacaggcgcctgccaccacacctggctaattttttgtatttttagtagagacagtgtttcaccatgttggcccggctggtctcgaactactgacttcgtgatctgcccgcctcggcctcccaaagtgctgggattacaggcatgagtcaccacgcctggcctcttttactttcatatccagttcttcaacaaatcttattagctttacctccagattatattcagaattcctctacttctcagcatacccactactccaccctggtcagaggtactatcttttttggactgaattattgcagtaacattctaactgatctccttgcttctatacttgcccttcccatctattttttcttctcagtggagtgattctttgagttataagtcaaatcatattactcttacgagtttttgtttcactcagagtaaaagtcaaaatccttataatggcctacaaagcccttcataaactaatacctctgtactcttatcttcacattcccttcattttctgcactctagccatactggcctgtctccggttccttaaacacatcaggaatatttttgccttaagaactttgctttggctgtgcctactgcctagaatgctcttaccgcagaagtacatggctaattcttccatctcctttaagttgttgcttaaatgtcagtgaagggtattctgtctaccctatgtaaaattataacccgtacccaatttccattaccctgctctactttttcttttttccaaagctcttatgcctctctaatgtacatcatttacatatttaatatgtttggtttttaattgtttcactttcccactagacgataagttctatcaaggaaagcaatgtctattttgttcattgatatgtatatcccaagcatctagaatagtgcttgcaaatgatagtaactgagttaatatttgttgaataataaacgaatggtaaatattgggaataattgtaatgtttagtttaaccctgaatataccgtcaggtttattggacccaattttagtttgaaaatttttttttattttgagtgtttctaactatttgtaagaattgaggccaggtgcagtggctcatgcctgtaatcccagcacttttggagaccaaggcgggtgaatcacttaagcccaggagttcaagaccagcctgggcaacgtagcaaatccccatctgtacaaaaaatactaaagttagccaagtgtggtggcatgtcgcagtagtaccagctacttggagggctgagatgggaggattgtttgcacccgggaggcggatggaggttgcagtgagttgagatggggctgttgtactccagccagagcgacagagtgagactctgtctccaaaaaaaaggaattgatagtacatactttgattctttcttaaacgtcttccaaagactagagaagagttttacttttcttcacaataaaactaattctgtttcagaattactgtgtgggtacattggacccttttataaatctaagatacttcatggcctcctgccatatcttgaaaaactatactgtttcatcatcctaggaataattttatcattacttattcattatttccagttgtactgaaaaagactaaattattaattttttaaaaaaacagaagaatgatgaaattgcctagaaggataatgcaggagtgacatgaatcatcactgttacatcatccttcacttttattattgtgctgcctaaagtattgcattatctttcaagaatgtgcagtagaagtctggagacacactgtctttataatcttctttcactttcattgaacaaggctgagaattcacaattttatattttccacacaaaatggcaaataggaaattgacaaaacatgttttcacaatttttagatgaatcagaagatgaatgcaaagaaacacgtagtctaggtactagaacctaatgatgtaatgaacttcatcttttaagtaattctcagactacgatttttcagtggatattggtagatgttttttctaaaactcaagaactgataagtgaatgatgtatttctgtgtaaaaaaaaaaagcagagtattctcatagttactcattcaacagaacattgttcatcacacaatatatgacaggaatctgaatcatcctgctttgataaggacatgtgattttttttatattttatgatatttgtgcatctaaatttacttcatctggtttctatcaaatgggcaaatgctgtagacaggtatatatgcaggggcgattagaaggaaatagatgatatagaaatgaaaaattttttttcaattgatcattctgattgttgcttatgaatctaaaagtgaaaatgttttacagtttttttgtttttgtttttgtttttttgagatggaattttgctttttgagatggagttttctcttgttgcccaggctggagtgcaatggtgcaatcttggctcaccgcaaccttcacctcctgggttccagtgattctcctgcctcagcctcccgagtagctaggattacaggcatgtgccaccatacccggctaattttgtatttttagtagagacgtggtttctccatgttggtcaggctggtctcgaactcccgacctcaggtgatccgcctgccttggcctcccaaactgctgggattacaggcgtgagccactgcgcctggccatgttttacagttattaagcaaagaagaaatatatttaaaatctgatatgagtatttttaaacagatgtaatctaggttcatgcatgataattgatgagtagttgcattccacatgttgcatatttcaggtatgtttatggaataatatgcgtttgctgtctttatagtctcattaaaatgtcttataaaattatttttcattatctctttattcttctataaattatgaaatgacttagtttattaaaaggtcccattggacccagatagtgaatggtgaaaactatttttcctagtataaaggagcaggaatataatgaaaaggcactagagatgtgaagatgactaaacttggagagatgaagtactggtggctggtagggtagtaggtagactttttaggccaagtaaatgaaacaactaaactgctattaaattcagaaaaattaaaatgttgtgtaagaagaaaaataatgtacttcattcactacatagtcattatataaattgaatataaatttaacctgaggatggagggagaagaaattcagatagggtgttataagataattaaatcctcttttattatgaatttagaaattagatagataaatccattaaaaaaaaacagaatgaacatgatttagaaatattcaagtaaataccaaaagaaatagcaagaggtgtaagtggttgcctcttgggaatgggagctggcataaggaggagagaactggtattgtttcttacatggtattttagtatttttagagtttttaaaaaccatgtgtattgctttgataaaaattaatagtaaaatatgaaactggatttagagagaatctcgctggtatgtatcaaatgaaattgaaggcacagggaaaacaacagtcttagatctcaggtgatgaacaactgtaatgactggaagggggaaccaaagtactggcttggaaagacattttaaaggaatataatgtggaattttaagacctattctgattggacaatgggagtgaaatattaggttaagatgcaaacaaacctgttttgaggcactcataacaataggggagaaggtatttatgcccatttcaagtggagttggaatggtaggttgtgctttggatatgttatagcttgcaatgaatgtaatataaacatttgtgatatatcctgtaaacagtttgaagtgtgagcctgaacatgtttgatctaaggtctggaggaagatgtgaagcaaatctgacctaaaaaaaattataggaaaaaagcaaattgttctggatttgtttcaccaaggaacaagtaagcagagaaccagacactggagaaaaaaaggagtcaggaagtagacaaggaaatgttaaaagaaataataggataactgaaagaatgtagcttccagattgctagctatcagcagatagatagaaacttttatacagcctttaaatcttccctagaaacctttttaaaagtagcttcttgattagatttaaatgggttttatttatgcttgtcattttacagatattgtaaatatacatatggtatattttctttttgccttttgtggacagttggaggtggggaacaggcatccatagtcagtatatttaaaggaagaaaaaacaacttccataatcttgttatattgactgtttctgttgatacattttccctttctttcttgtttcttagtatgatttgagggtcattttaaatttctgaataaatattttgtaagccaggtggttcactgactgaacgtttgggacagaggtaatgggagatgaggccttctctctctctctccatagacaaaggccttaatatgactaataacttagcgaaagctctatatgaccctctgctaagcacctgtatttatttcctctttcttcttcctcctctacctctaaaaaaagaaatccccatttcttttacacacatgttaaaaataaaaaattgtttctggtaaatttaatatgatttaaaataagatgaacattttgatgctttacttgcaaattctgctattaaaatgtgttttatttaaactattgccacttatacagtgaaaaattttaatgactaaaacagttttgtgaccaatgttataattgaaaagtataaatttgagaaaaccaagacagaaaaagggagcagtttcagaagaatgtaagtgaataaagtggcttagccctcaggggatttgaatgtggcattgtgtgtatttcaaaagtttccgttgaaaacagatgctgctgatgaagttgggaatagtaacttcatctgtggctgtttcagttgcttattagaagtgagaaagatcccaaggggtttatctggtgtagtggagttaggctcaggaaaggatatgacataaatatctggcagctttgtctgtgtggtctttaatccataaacactggttaggtacaagcatgattatctataaacatgcaattatcttatttcatgtggattctgtttctaccacagtgttatttcagtaatggcagggttgttttttgaagtccattttaattcttaagaactggttattacagaaattgtaagttttttccctaaacaaagagaactgtcttactgaatttttattatataatgatagttcattaaattatttactggcttatgtgccccaattcagaacagtacttattcatacagttgtccatatgaatgtttccttttttgctttttcttttcaattttattttctgatattattcatagtattcaagttattctgataactggatagataaaatagatatggtctcagtccatagagcactttgatatagagagggaaataaaatatttattgacatagcccttaatacagagtttaaaagtgcccaggatccttgaaaatatagataagatgctttcagactatgactgaaggagaatttacttctactactagagggaattcaaaggagatagaaatgttatttaattaattaattcagtaaatatgaatacctatggtaactaagcaatcatgctttgatgtttggaagatataaagatagaaattacacagttaagtccagatattacaaagttgtgagtgatcatcactgcttttgaaggggtaccagataagacttcagtggaggtgagtagggacttgatggccatatcccaattccaagtggatgaattgggggtgaattcaggtgttccacagaataaatgtataggcatagctgcagagaacaacaggaaactggggaaattattaggcatagctggaacattgggaccaggaaaatgaagcaagagaaacaagtaaaggccaaatcatgaaagtaaaggccaaatcatgaaaggcacattgtatagtatacaaaggaattttatgtgtatcctgtaggcagcaagggaccattcagggcagaatgtattcacatttatattttagaaattacttaagtagcagtggaatgaaaagcagtgtgtgataatagaaatagtcagaagatatttcataatctgggtaagatattaagtggtcctgagctaaaatcgtggcattgaggctattttggataccctatttatagtatttgatatgaaaagtgagagagaacctgagttgagctttctggtttggaaaacagactatggtgcaagtcattgagatagaagacatacaaggaaggaaagtaggggttttgtttttgtatctttaaggaagagaaaataattccattttagtgaatatgagtttgaaatacctgtgagacatccaagaaaagacatggctagagaagcaaatttggtagttctcactatgggcatatatgacataatctgggagaaaagttgtagaagaaaatgggtaaagtatggagtataccaagtaactagtgaagaggaaaccacaaagggggacaagagataggaaagcattttgttctatcagccaagagaattgtaaatgcctcctagaggtcaagtgagaaaactgctgaatattatctatttactttaggttggtgcaaagatgtttgggggnnnnnnnnnnnnnnnnnnnngttttttacattactttcaaaggcataaaccacaattacttttgcaccagcctaaatacattgattttgaggagctgagccttaaaagatattcaaagtttgcaatcatgaaaattgtactgggttgggtggaaaattgggcaaaaggtagacagtgttggagatcaagggaatgccatgaacaaaagtacagaactggaaaagcacattacagacatgaccttttgttttaaaatattacaaatgtaaaaaagatgtataaaaagaaggtgtggacaataagttttatgctattacttttatggtataactgcccaaatacttaagttaactggtgggagagttatttacaaccttttctacttttccttttttcttttttttccttaacatttcactatgttttagagcattgaaagaatgccatctcagatcagggagagttttggtttcatgatgcaagtacaggaatagatattgagaaagtccaaagttttggttccttaaggattacaggtatataccagctattgtttctttttttttttttccgaatctctaaccatgagctcacagtctataatgtataggcacacagattatttggggatagaacagttgctaacagacctacacacttagttttacttacttactttatttatttatcgcgaaggttgtcatgcgctgtcatccaggctgctggcacgcagtggcggcagtggcaccatgttggcttactgcagcctcaacctccagggctcaagccctcctcccacctcagcctccatattagctgggactataggcatgcaccaccatacctggctagtttgtgtgtgtgtgtgtgtgtgtgtgtgtgtgtgtgtgtgtgtgtgtgtttcgtagagatgaggtctcactatgttacctaagctaggctcaaacagtcctcccaccttggcctcccaaagtattggaattgcaggagtcagccactgcatctggcccacacttgttttagaagctatcttacatataggagactgttttagtgatgtaatcatcataaattaatttgttataggcagaattcagtattgctttttaaatagctcattttcccaaataatatatactttttgtcctttttaaaagcttgttgttaattaaattagccttctattgttaaaaattcaattatcatggttatttatttaacacagtcatgctttttaggtagcattagatagcacatattattctactatatggtaaattctttgagggcaagcaccatgtctaagacatctttctgtctccaaaaatgtcttttacatgagagagattcagtaaatatttattgaaaattaacttgacactattaaatggaaactttttaaggaaagttgcatttacattcttaaatcaccattagtggcaaattcaccattgatttgtggaatattaaattctagttcattgtatgctgaatcatacatacctaccttttggtgaaatataataatgagttttacaattttagatgtaacaaattaggatatctggaaaatgtaaggcatctatggcttccttataagaaggagctatatggaaattaggctgaggaaatgattcttagtctctggcacctgcggtgtagataaccaactggatatgctgaactgagccctctgtctcaataatctttggtgatctttggaaatacattttactagctactaccttctgtcagattgtccctaaaggtcatgataaccagctctgtaattatctgtagctactctcttagtaaaggaatgacgatcttcagctcttctaacacagccaaatgtaagcagactaagtataactaaagcttggggtgaactagcttctatctttcagaaatccagcccatattcttccccagaacgtttgaaatgtgaatgcagtctgatatcagtaaatagctaaattaccactgcatctccaataaaatacaagtcgcccttttttgccctatgttggaaagcacacacataaaaaagtgaacattagtgtaagcataatggacagggttgctttgaagactaaatgatgtttaaagcaatttatagccctggatcaccatgcacatataaagatgtttctcataactactatgcagtaattgtctgtatgtgtaataaagatagcagaatagttccacaaatgggggcaaagtgtaaaaaaatagactgtaggttatgggtcacccccatgacctagtcacctctgaccaggcccaacctccaacattggggattacaattcaacatgagattcggccaggacatatattcaaactatatcaatatcatcaccagatgaatagctaaacaaattgttatatccatacaatggaatactgcttgattataaaaaaatgaacaaattgctaatacccaacaacagggatgaatcttaaaaatattcaggaggaaatgagacagacacaaaatagtacataacgtataattccatatatgtgaggtcctggaaggggcaaaacaaatctatcgtgagagaaggcaaatcagtggttgcctcaggtgggggattgactgcacatgtgcacaaagtaacattttgggatgatggaaatgttctacatttgatttttatagtgattacccaggtgtatacatttgccaaattgaatcctactgtatttttacataggtacattttattacatgtaagttacacctcattagtttcctttacggccctgccttctgtaacttttttccttctctccctaaaattgaggtattatccattcttctgaatttaccatagcatttgtttggccttctcttactctttctttctcctttcgtttgtcaccttgtcctctactaaggctataagctctttacatctttctttaccctctagcaccttgctcatttaatcttccaatagatgtttgttaaacggagttgatttcatacaaagaaagaattaccagctactgctttgatcacggctctgaaatttgaacagaatcacaatcccagttatcagcaagaacaaccctataaaagcagctatgggttgatgacaggcattcttagggcagtcttaattttacaattcagggcagtcccatttaacattctatggcattgggtggtggacacatggaagatgagtgttcctgggccgtatggaaagtcctctttaaggcgaattaccttgtgctagttgcaaaggtctggaagatttaattcaggtaaattacacaacgtgacaatgtatataattccagtaatgagagaaaattagaatcagaaattcagtactagaaggtgccaccatggatgccatttattctaacccattgtcatacagacccagagatcttaagtatcctgcccaacaccacacagcaaattagcggcacagttaactctagaagccagatttctatcaagtaccatacccagaatttaacaagttggagaatttgctgtttgtggaagttctgaggagttgccctagacaaagctttccttggggtgagattttgagtttagacacaataggtaaagatcaagggcaggaagctgctgtcattactaggttcaaatcaaaactggaaccttggagccatggcagggacaagaattgccttatgtgttcctggtgatgtctttgcttcatataccacttgagaaatactgacttgatctattgttgaaacttagtttgtatacttgttgatgaattttctatagtaagaatatgaatatgctataactttttgaggagttgttagtacagttgacccttaaacaacacgggttcgaacttcataggtctgcctataagcagctttttctcaaccaaaaatggattgaaaatacagttttcataggctgtgaaacccacgtatatagagggccaactttttatatgtgcaggttccacagggctgacgggaacttgagtgtgcaaggatttggttctaccagggtagtcttggaaccaatccctcatatatactgagggacaactgtacacaagaatatttttgaatcccacaggattgttaaaacaatctgaatagagtcgatctccctccttcaaaccttccttttttactgttttctgtttatgtgtaaatttggagagtggtaacagttgccattttgcatttcattggttttatatttcattttttaagaacaattttaagtcagtcttatagttaacataatttcaagtggtcattttgaattttaatgatgaaagacattgagatacaaaaagcagctttgaaagttgtagcaaagcatgcttcatacatggatcctttgaatgaaagaataatagcatggatggttgatgaaggaatagaagctgctgctatttaatgtattcttcactctcagtacatggatacagcctccaaatgttacaaagaaaataatcatcagcacagcatctctgcatacctgtggattggtctttttgtaaagcagcctcatggttttcttagaaaagttttttatttaaaaatatatctctagacacttactcctggtaggcctgggaaaatgtagattacttcatgtctcttcaaaagcctttcaaagaaacaagtcaagcttgatttgtgtttttgagatagaggaaagtagtaaggtaggaggacagaggaaatcttagctttaaagggagaaaaagatctttcagtccttttgtcaacactttagtttctgcattagtcataggtcccttcccccttggccatgggtggaccaaaggaatagcagccatttgcacgtttgtgaaaggacagtggaaagaaaagaaaatagctgatacaagaaaatgtgggagattatttcccccactaggtttttacagttgtatttttagattaatcagtggtttctggatatttggcctccttttttttcttttattttgctgtttttgatgttataaaatacagtgctaagaacctaaccctattagtgagatattattcagagtctaatttttttattgttataatgaaagtcatgtagaatgcaaagctagtggacacagttaatactcatatttggtagaaatacttttcctctaccaagctgagttcaaattgtgggcctgcaagttaactgatactggacaggttaactggagaaaagataaggtttattcacacttgaaggagcactcaatatcagtaactctgaagaagagtttagagggttatagaagtaaggggttatgcctcttgctgtggcacaccacagatgccagcactttgggaggctgaagtgggtggatctcttgagctcaggagtttgagaccagcctgggtgacatggtgaaaccctgtctctaccaaaaaaattataaaaattagcctagcgtggtggcaagttcctgtagtcccagctactcaggaggctgatgtgggaggattgcttaagcctgggaggcggaggttgcagtgagccaaaatggtaccactgtactccagtcttggcaacagagcaagaccctgtctccaaaaaaaacaagaagtaaggggctatataccaacttaacaagagggggtagcttagggagtcaaaggacagaaagatctcatttacacaatttttttgttatgtctcagtgcccagtgtcagtcatctccctcctgtggatcctcctggaggtgtgagagggttgtgacagctgcctcagtaaagctctgctttagtcagataaaagaagttaagatttcattctgcatctgctgttgtatttttgggcccttcactgatttttttttgttttaatatttgtatgtagtctgatgcttttcaatgtattttcacatacctcattttattctcacaggactttttaggcagacagggaaaatactattatcccatttcacaggtcagaaaactgagactcagagaggttaagtatttgtccagggccacataattaataacagagccaaaataggaatttcaggtattcaacatttctcagtgtacctttggggtccaatttgagtactcataaattgtgtaatctattgtcaatctataagtcctttaaaagtgccacggttaagtaataatttatttgttttgtaggagaagatggtataaactggtccatcagtgacaaagacattgaggtaaaatcaaattgtttttaaaattcagaataataatttcctttgcttcatagtttattatgataacttttggaacattaataagtttaagtggcttataagaaaacatttgattttagcatatgagtgatttaactcttcagaaacttggttcagccttgagttttgtcagtgagttaatagctgtaatcatccagtcccctttccctttctgtttctctcctgcggtgagtcctctcagcccatatggcctggtaccactaaaaagatcaacaccggaaataactgcttcttcagtgtaaggaaatggttagtctatttttaggatgtggcaggtgtttgtctttgtcgattattagccttaattgtggcagatgctacaaaaagagaataattttataacttggttttgggagatagctagattgtacttacatgtggtccacttggccagttcagcaaaataacaaataaaagatgaaaacttttttaaagatggaattctaccaaacaagctaaagcatggttgggatttacagttcctctttagatattccatatgatatgcattgttggtactctcttacaagatcctagatttagattagaatatgggacagttagaattgggtcactctgtaggcagaatggatcttaaaaggattccagtggaaagaaattatctcattcctttatttctataaaggaagactggattatcagtcttttattatcatccagtcttgtaggcagtaaccctgtgctgttcaaaagaatggatatattgggtagctgtactaactttacaaaagacaaagtcataaaaacaccattccctaactcaaaatttaagtagccctcccattcagaaaaacatggtgtacattcagttatagaaatcagcagtggctggccgggcgtggtggctcacacctgtaatcccaacactttgggaggctgaggtgggtggatcacctgaggtcaggagttcgaaatcagactgggcaacatggcgaaactccttctctactgaaaatacaaaaattagccaggtgtggtggcgggcgcctgtagtcccagctactcggaaggctgaggcaggagaatcgcttgaacccagggaggtagaggttgcagtgagtcgagatcacgccacttcactccagcctgggcaaaagagtgaaactccgtctcaaaaaaaaaaaaagaaagaaagaaaagaagtcagcagtggctttgactgaatgctaccgcggtgtctaagtgatgcatgtcagtacccctgctcgatctgaaacataagtagagaaagattaaaaaaaaaaaatcacatggagaagtataaaagactcagcaggcgggaggggcagacaaaaagcagtagagttacctttatggcacctccttttatgtttttctacctctttttttttttttttttttttttttgagatgaagtttcactcttgttgcccaggctggagtacaatggcacaatctcggctcaccacatcctccgcctcccaggcgcaagcgattctcctgcctcagcctcccaagtagctgggattacagacctgcgccaccacgcccagctagttttgtatttttagtagagatggggtttctccatgttggtcaggctggttttgaactcccgacctcgggtgatccgcccacctcggcctccgaaagtgctgggattacaggcatgagccaccacgcccaacctctacctctttttaagagaacaagagagatcataaagttcccctgtggctaggttctaagttgaacagatataactaataattctcttgctttatcaaggtaatggaactgacttgaagcttgatgtatctttatttgcttatagttgtctttaacaagagtagtagatggcttttatttagcagtgaaacaatttttttaattcttgatttttttttcccttaggcccagatagctaataaccgaacacctggaagatggacccagcggtactattcagccaacaaaaacattatctgtagaaattgtgacaaacgtggtcatttatcaaaaaactgccccttaccacgagtacgtgaaatatgctttgcttctttccacatttgtaaactcaaaatctcaagggtgaggctgggcacggtggctcatgcctgtaatcccagcactttgggaagccgaggcaggtggatcatgaggtcaggagattgagaccatcctagctaacatggtgaaaaaccccgtctctaccaaaaatatacaaaaaattagccgggcgtgatggcgggcgcctgtagtcccagctacttgggaggctgaggcaggagaatggtgtgaacccgggagatggagcttgcggtaacagagatcacaccattgcactccagcctgggtgacaaagtgaaactctgtctcagaaaaaaaaaaaaaatctcaagtgtgaaaccctataaccttagaattcaaatctttttatagtatgtgtgttaaatttcatgtagcttacagcctagtgtcggagaaataataataaatttggagtcagaaaaatgtggaatcaattttaacttatcattactagttgtatgggcaaatcatttaaccctctgtgcttcttgttttcttgtctataaaatgaaaagattgaatcagatgattcctgagacccctttcacttctaaaccttgtacttcataagatagcttatttcaatgtgagataatttttatcgttagaaaattataatttggggcatttttaaatgtttattaatgtaagttacgttaagcaggtacatcaacctttggaacaacacagaactgaagatcttagacgtttcctgaccagataattagctcttaacaaacatttcttccatttctccttcctcttccaaatgactgcttttcaaatagttcagacacctcttatgctccttttttgttcttgcttctccagtcaaaacagcttcttctgtatctgttcctcctatgacttagcttctagatatcctcctcattctactttccctcttacatacctttcattttgtcaatattcctataagaagaggcataaggaatatatgccagctgctagtatgtacagactaagcctttttggcaaacaatatacatacagtgttttggacattttgtttgatttttacagttgtgctcaggattctacctttattgggatctcaaattagaaaagatttttttatgggattatattgaaaaacaaatactaatcttctaccttttgagactgaagagattttatgtttttttcgccacatagaaagttcgtcgctgcttcctgtgctccaggagaggacatctcctgtattcctgtccagcccccctttgcgaatactgtcctgtgcctaagatgttggaccactcatgtcttttcagacattcctgggataaacagtgtgaccgatgtcatatgctaggccactatacagatgtgagtatcctgcatataactaatttgtcaggctttggagggagtgtgcaagtttgtaattaatgtgcaagtttataactatcagtcagcatacctaaaggaatgtttactccgtgagatatatatatatatatatagtcatgtccattttgtcactgaacatgtatataaagcagtgctctaaataatataggggtaaggagcctactgaatcagaagacagcatcaagagatagcattaataaatattttaagcccattctagccctttttctttataagcttgttaaataaaggctgaatttaaagaggtaataaataacatgtaaaatttgtgtattcatatttatttatttatttatttattttttgagacatagtctcactctgtcacccaggctggagtgcggtggtgcaatctcggctcattgcaacttctgcctcccgggttccagcgattctcctgcctcagcctcccgagtagctggggctacaggagcatgccaacactcctggctaatttttgtatttttagtagagacgggggtttcaccatgttggccatgctggtctcgaactcctgaccttaggtgatctgcccgcctcagcctcctaaagtgctgggattgcaggcgtgagccactgcacctggcctatttgtgcatatttaaatgaaaatatatgcacaattagcagttatatacagatgtttaatggaagcctattttgatgcttctttttttatttttattttatttatttattttttgagatggagtctcgctctgttgcccaggctggagtgcagtggcgtgatctcagctaactgcaacctccaactcctgggttcaagcgattctcctgcctcagcctcccgagtagctgggattacaggcacgtgccaccacacctggctaattttttatttttagtagatacggggtttcaccacgttggccaggatggtctcgatctcctgacctcatgatccgcccgcctcggcctcccaaagtgctgggattacaggcatgagccactgtacccgaccttttttttttttttttttttttttttttttttttttttttttggagacagggtctcgctctgtcacggtggctagagtgcagtggcatgatcttggctcactgcaacctctgcctcccaggttcaagtgattctcctgcctcagcctcccaagtagctgggattacaggcgcccaccaccatgcctggctaatttttgtatatttagtagacagcagggtttcaccatggtcaagctggtctcgaactcctgacctcaggtgatccacccatttcagcctcccaaagtgctaggattacaggtgtgagccaccacacctggcctgattcttcttatcaatgattttgctggtctaatagtctaaggaaagaaggacaaggcagccattactttaaattgcagcatattaaaaatgctgttttggacactatttgcattgtattgttgtaaatgtatatggagtttagtcataatttcaaagaccagagggctgttgaaataagcaaatacagctttgatgtggaatatgtagttttctacattcagtttaccctaattcctaatgagtgtctcattaagagtctttcattttaggtcttaattgcgtttcttactacatagtaacatatgtttattttatattaacagctaatcagtacaaagtcatttttcatcctcatacctaagtggcaattctaattgatttaaggggtatttatgaaaggggtgtctctcattctcttttttaaagcattacttacctattttttaaaataataaaagtactttaatatgtacttccccaaagtcatgatacgaaagcagaaatatttttctaattttatttatattgaaatacacctatagtcttttttcttacagccctttttaatgcatgtctgaaatacacctataatcttttgctcaataaattagtatggctttctgttgaaatgaatttcagattaaaacagattagagtatgagtgtttggtatatatatgtatttctcatgtaaataacatgacaattatttattgtaattccaccagcaaatttatacttaaattgttacccattttttaaacaaacagtggtgcatttaataatgttttggtaagtcatattttataaatggaattgtgaaattaaaagacgtacacttatgtctggataagtattgtcaaattgctcttctaaaagattgtaccaatgtatctacctaccagcagtgttaagagaaatgagcactgcactcatcaacattaagtattatcagtctttaaaatttttggctggtcagaccaaaaaatgatattttattgttttaatttgtatttctttggttattaataaagtggtatatggttaattaatttgaatactctattctcaaggctatatagatagaagttgtcatttcattccaaagtactttagtcttattttttagtgtttaccaagtcttaaaaatgataaatcctgaattgtcctagcattatgttgttgtctgcattaagttgtcaattataattttcttagcaagattttctagtttggcagttatctttaatagcatctgttttttttttactgttttcttccaaagagctctgacaaatatggtcttatttgcctgtgataaagaaggggagtaagacattatcataggcaattttttaaaaacaagaaactgtactacagaacagttaaaaattacttgtaaaaggttatataatcatctgtgttaattctataggccattcctcttaacttcttgattttggcctctaatatatgttaaattattatctaaaatgagaattaataatcccaatgaatgtaggtttttttaaataagattaaaatcatggtatgctcctgtaatatcagctgctcaggaggctaatgcaggaggatctcttaatcccaggagtttaaaacctggtggctcacacttgtaatcctagcactttgggaggccgaggcaggtggatcacgaggtcaagagatcgagaccatcctggccagcatggtgtgaaacccagtctttactaaaaatacaaaaattagctgggcgtggtggtacacacctgtagtcccagctactcaggaggctgaagcaggagaatcgcttgaacctgggaggcagaggttgcagtgagccaagatcatgccactgcactccagcctggcaacagagtgaaagtctgtatccaaaaaaaaaaaaaaaaacagcctgggcaacatagtgagagcctatctcaaaaaataaaataaaatagggttgggctgtgaccagcttcagagaaggcagtactcttttccccaaatctaccagtatctactatatttgttgtaattacatggcgaaggttctggaagctggtctttgtagcctacacacctggtgtaggattccctcgcagcccagtcaagcctgggctctactgactccttgtggcaaggctcatagtccttccaccaccccagaaacttcatgagaattcacatggaagccgagtcattctggccccatgttgttggaactgtacatgctttaggtctgtcttgaaacctgggcctccacagaaaatttgtttcctctgcagccctatcaaatgcttgctgctcatcttccgtgaccctgaatcttaagagatgatatcagcctctttctcacatgccatggctgcttttaagtcattactcaaccctttttatgtaaatacctttggcttatttaaggcttataccctctagcaatactatcctctaccattctttgtcattttcatcttcccacctactggactttctgctcattcacagaggatttctaaccttttataaattgacgatattgagaaacttccaaggctgggcgtggtggctcatgcctgttacccagcactttgggaggccgaggtaggcagatcacttgaggccacaagtttgaggccagcctggccaacacagcaaaaccccatccctactaaaagtacaaaagttagctgagtgtggtggtgcacacctgtaattccaactactgggaaggctgaggcatgagaattgctagaacccaggacgcagaggtttcagtgagccgagattgcaccactgaactccagcctgggcaacagagtgagactgtttccaaaaaaaaaaaaaaaaatgaaagaaacttgcccttttactttatatattcccatagtcacacacctagacctctgtttggccagattaccagatatatgtatgcaaagagaatttgtagtgaaaactgtcgagtcatattcaaatcctttctgtaatgaaaagctttttcctaaaatctgttggaaattgctcattggttaactacttctgtaaaagtatttggttgaaattccagagttttatgaggtgaaggataaaaagatggctcaaggcctactaaagtcaacctgcatcattagtccctttcagaagacaagaacctggattatggaaagaatcctgtttctgaatctgctatagtttctctcctcacttgccaacaatttttaaatatacagagaatttttaaatgtctgtatacctttagcttgcacacagaaacctattctgtgagctatctctgacatttccaagataacaacagccatacataattgtgtgtttactgtgctggaggagtgcttcattcaccactatgcccttagcatatagtaggtgttcagtagatttaatcctcataagcaggatatgaagtgtaggtactatttattactcctattttacaaactgaaaactgagacattacaaggttaataagtctaaggtctaaaagctaaaatgatgctatactttatgactatgtggagaaagcttacatattggcaatcaaggaatcatcagtttatctcctactcggaggatctctcaactttctttcttaaatatgcagatattatagctctaataagcaactttaatataacactcatgacattggggcaacatagtgagactcccactctttaccaaaaaaaaaatttaaaaattagccaggcagggtggcacgcacctgtagtcccagctactcgggaggctgagatgggaggattgcttgagcccaggagatcaaggctgcagtgagctgtgatcacatcactgcactccagcctgggtgacagtgtaagactctctctttttaaaaaaaaaaaaaaaaaaaaatcaatatattataaaacacataaagaaaaatattttccaaacaaaaataaattttaccttaggttgtcagcactttaaaaaacccctggggatcaagaaagcagtatagaatgttgattttcagatacagagccaattctgtgataccatagagctttactgctcacaagagaccattgcagcttcagcaatctttattaattgttcagattgccatccttttttattaaagcataatgactgagttagtcagtgtcagatataatcaaaacccaaacctcctaaatttcctacctttattcagcaatttttttctcaaattccctgctcagtgtgttatcccagtccatgctaaataactgttaaagtctgattttttaatacagtgggagaaaataattcatagaacatatttcacttgattcctttatttatttatttttatttttatctttgaaacagagtctcactctgccgcccagggtgcagaggtgtgatctcggctcactgcaacctctgcctcccagattcgagcaattctgcctcagcctcccaagtagctgggattacaggcatgagccacaacacctggccaatttttgtatttttagtagaggtgtggtttcactatgttggccaggctgatgtcgaactcctgacctcaggtgatctgcccgccttggcctcccaaagcgctggggttaacaggcgtgagctactgcgcccggcctttttacttttttgatgctagaaaaatgctcccatatcagccatatactacaatatttttcacagtgcaaaagtttattttaaggagaactcagtttaaactgtgtagtatttaacatacacgtgagtgctcaatgatgtttcttcaataaatatatatgtaaaattgaaaactaatgtcttttatttagatttttattaaacttggagatttccagcaggaaatacaaagcatctagtacaaatcatttcatacttgtcaaatccagaatggagagttactagagcattatttttgtaaaggtaattatttaagaaacaggtatttattttatttttagtgtactccaaggagcactgagtagtattcatatgatttcctccccttatcctttccacagtcttactcagatatgactggccagaaataagaatggctgaaacatattattgtgctgaataactaagccaagatttgaatttaaagacttgcttaattcacatattttgtgtaatggcggttctacctttattcaaaaacatctccagtgttctaccacccaaataaactttctacatttgttcatttagcaaaaatttgctggttgcctcttatatgccagacagtattccaagtactaggggaaaaaaagatgaataaaacatgatccctgcccttgaggaactcagagtataataggaaaggtgggtgtgttaagaacagtgtaaagtgtaatgtgaaagtacatcagggtggtgataaataaaagagtcttagaagactctaaacttagtgacttgcagatgatgcatacctagaaaatgtagaaagtgtgacgtagacctaagaagggagccaagtaactgtgtctttttattttgacatgattatagattcacatgcagttttaagaaataatatagagggctgggcgcagtggctcatgccagtaaccacaacccagccctttgggaggccaaatctggaggactgcctgaggccaggagttagagaccagcctatgcaatatagtgagaccctatatctacaaaaaacatttttttaagaaatgataaaattaagattcagatagcaaataatcatgaacaagctaatttccctgctcaacttatttgaagagaaaccactgatatattcaaatctacttaatgaaaatgagaatgcataaataagaataaataattaaaattaaaatgccgcctccccaacaaagtaacttagatgtgtaaaatcacgatgtgaggaaggaatgaaggggaaaagaaaaactcatctctgaaaaaactaaaacactagaattatattatcgtgatagattggtatgtactttcagataaatatgtagttctgctgacagtgtgcattacacctacctttggaaataggaaaatcagactttggttagatatatgtactttgttccacccacttttctcaacattttaatgttatttataggtaatattggagcaagagggcaggctgcaattgattgattgtcttacaaaattgttgtataggcttaccaaatgtttatttaactgagagatcagactacttcaagaaagttaagttgatttctatacttgaaggtctcctcctgtcttcttgatgtacacaaaactcacgataatgttagtgaaaatcgcatacatgttcattgttcagggagtaaatcccaaaatcaggaattaataatttattggaactgttaccaagccacctaataaatgaatatctgaaattttcatggttgcaaatgtatgtgaccttatgtaaataattatgttctacattttaaacttgaaggcatatggtacagtttggttcaatgtccccactcaaatctcaagtcgaattgtaattcccaatgttgagggagggacctggtaggaggtgattggatcatgggggcagatttcccccatgctgttcttgcaatagtaagttctcatgagatttgatggtttaaaagtgtatggcaccctgcccctcatttgctctctttctctcctgccaacgtgaaggtgcttgcttccccttcaacctccaccatgattgtaagtgtcctgaggcctcctcagccatgcttcctgttaagcctgtggaacttgagtcagttaaacctcttttcttcataaattaccccagtgtcaggtaattctttataataatgtcaaaatggactaatacagtgtataacttagcacatttaaagtttgaaggagaaaccagttcttattttaaattgtactaaatggtttcctttctagtcatttctaagtaacctgaaaattcctccaatcttttcaactctccgtatagtacatacctccttgtctagtattagtcactttgagtggacttagcagcttactagcaagcttatcttgtctttatagaaaatgtaagaataaatgtgtagaagatagagataattcccattctgcagacccttacctttcatcaaaggaagggaaatattgtctacttctagcctgcctttataaactttataagctctcaacattaaaggataaataaactttagtttttcactgagaatcttatggcactgaggaatggactgacttactcttcagtccaatcacatttgggaagacacaggtctctgatgtataaagcagaaggccactaagaattttattaaatttcaaacttattatatgccacccctttttaaaactaaatccaggtataaaagtccatcatgtagacttgaattttactattaaatccactaatacgaacaaattctgggacataattatctgagttatgaattgagagtgaaaataagatcctcattaacaactctaaggctaaaagattcaccaaatcttacagaataaggtcagtgctgctgacctttatagatccctggatgtggtgggagttgcctatagtcctagtacgtgggaggatgaagcaggaagatcacttgagcaaaggagttcaagtccaacctgggcaacatagcaagacccgatctcttttaaaaaaaaaaaaaaaaaaagtatacattccagacagctttctgattgggttttgaaaatctccctcaaattacacagcagtgaagcaatgtacacaactgggaaagctttttaacctctaaaactattcaaagacttacttatagggatctgtttgccagcatactaatcaattctgtgtatgattttgttgtactaatcaatcctaggtatgatctggtcgaacccaatatgcagttattcatcttgaaaaaacagctgttttcttcagttgtctactagttaaaataattaggcatgccatctaaaaggtacacacagttcgtcttgaaaacttacaaatgcctgtagaatgattatatttcagttaaaaaaaaaaaaagaaaatgagctctgcataatctacatgtatatgcttgtgtgtgtatatatatacatatataaacaatgataaatgggataaagtatacataccaggctcttaacattgcttttcctcatcagactgggattgggttagaaaagagggctgagaaacacaattagcttgcctttatttgtatttttattgtattgtttcatttgttttaaaaagagagtaagataattatgcaggatttcagtttaatagtaagcgtgatcttcgtttgttgtaaggcattctactaattgttgacttgataaaaaaaatcataagcaatactaaactactttgagaagttcaagacactcaagcaaattatataataataaatattatgagctaatcagccttttagttatagaacataaaaataattctctctgtaatcatggatattaccagaaaaatatacatcctaagaacactaatcattacggtgaggtagtttcagatataaaggaagacatggctcaatttttaaattatttcatcagtgttatctaaacttttacttttttaagcccattatattttagacaggaaccagttctaatgtagcaggaaaaaattctaaagtaagctacagggtctcaatattaaacctttctctctcaccctgtcatccctggtttagggaagcttatatagagnnnnnnnnnnnnnnnnnnnntagtgggtagcaagggtgatgaactggttcctgtctaaaatataatggacttaaaaaagtaaaagtttagaataacactggatgaaataatttaaaaattgagccacgtcttcctcagtctcaaaaaaaaaaaaagggttcctttttgtttgtttgttttttgtttttgagacagagtctcactctgttgccagactggagtgcagtggcgctggagtgcagtggcgcaatcttggctcactgcaacttccacctcctgggttcaagtgattctcctgcctcagcctcccaagtacctgggactacaggcacgcactacaatgcccagctgctttttgtatttttaatacagatggggtttcgccatgttgtccaggctggtctcgaactcctaacctcaagtgatctgcccacctcagcctcccaaagcgctgggattacaggcatgagccaatgtgtctagccaagaatcttattcttataagaatctggcacaatgaaagggtcttttaatggtataaataacaatatccagtgatttaaaacaactcttcatagtacctgggactacaggcacgcactaccctgcccagctgctttttctatttttagtacagatggggtttcgccatgttgtccaggctggtctcgaactcctaacctcgagtgatctgcccgtctcagcgtcccaaagtgctgggattacaggcatgagccaatgtgtccagccaagaaccttattcttataagaatttggcacaatggaagggtcttttaatggtatagataacaatgtccagtgatttaaaacagctcttcacaggtctctgtaattgtaactctttccctgttcttaacaaaccaaaacttgatggtctctcaagttttccataaatgagttgatcagagacctatgcagtgcttggcaaataccacctgagctgccagtactggtgggatttcacataagcctcttttttttttttttaatataccaatagaaaaaaaattgcaggcatatataaagaattggtagatcaaaaaaaataataataatcagagatgtctccaaatgaaatgaattgtttgtagaaaataggaaacttgggaaaatcctaactctttcttcacagataatgtgaatagagaagacagacgaaaagcactgctgagcaaaatgatgaagaaaattatggacaaaatagttcacactcaatttgagtgagaaaaagacccatagtgaaatttctgaatgtcaaacaaaaattatactaatatccagagagaaaaacacacaaatcagattcacatcagacttctcctgtatagtactaaatgctgaaaagtaatggagaaatctctaaagcctagaagattctgaggaaaaaagatgatacaatctgttgctcatttgtgaatttaagggaaaagtcagagaaaaaaattagcaacaatgaacagtgaaagcaagaaagcctggaatatgtgtctgaatacttcttgataatctgttttttaacttaatataagtatttcctgggtgcagtggcacctgcctgtagttgcagctactcaggaggctgaggcagcagaattgcttgaggtcaggagttcaagaccagcccaggcaacatggtgagagttcatctcaaaaaaagacagaaaaatataaatagagcaaattttattttttaaattatagtaatgtggtttataggtaatttcagtaaaataaaaggttatttgtttcaataatcagaagaaaagtaagacaaaggaaactcacgtagtataacattatgggagaaaatgggagcaagaaagtataaaaaacaaaaagcataaagaatgagaaaaatcagaccaaatacatcaattataacaataaacattttcatagtagattaaacactcttatagatttaactgcctcccccactccccccgacccccccaaaaaagcctgtttatccaaagagacctttaacaaaagtaattggcagaccatggtttgggaaagatttttgtaatatgtatgatggcacaattatctgtaatatataaaaagctcttacaaatcaatataaagaaaggaaaataataatacccaatgttagggaagctgtactattaaagtacatttggatgggctttctggaattcagtgatgtatagttgcaaagatatagctataagaatgtttatatcaaagttgttaataataatgaatactagatgcaacccaaatatttgacgatgaggatgacttgccttacaatatagtcatataatgggatttattcagccgtttcgaaaatgatataaaaggccgggcgcagtggatcacctgaggtcaagagttcgagatcagcctggacaacatggtgaaaccccatctgtactaaaaatacaaaaattagctgggcatggtggtgggctctgtaatcccaactacttgggaggctgaggcaggagaatcgcttgaaactgggaggcagaggttgcagtgagccgcgattgcaccattgcactctagcctggacaagaagaacgaaactccatctcaaaaaatatatatattttatatatataaatgatattgaaatataaataagttgctagtacattaagtaaaacacacagattacaaaacagtatgtgaagtataattagacttctatatatatgtgtgtgtttctatatatgtagatttgcatagaaaaaagtttgagtgggccctgtgtggtggctcacacctgtaatcccagcactttgggaggccgaggcgggcagatcacttaaggtcagaagttcaagaccagcctggccaacatgttgaaaccctgtctctcctaaaaatacaaaaattagccaggcgtggcagcgcacacctataatccctcctacttgggaggctgaggcaggagaatctgaagtgggagaatcacaagtcagagaatcacttgaacccaggaggtggaggttgcagtgagccaagatcgcatcactgcactccagcctgggcaacagagtgagactctgtctcaaaaaaaaaaaaaaaaaagagtaaaatattccaaaatatttgctcttgttatgtcaggaattatagatgttttatcattttttgctttttatttctattgatctttatttgcgagttctatattagtcattctaatagatgtatactgtctatcttattgtagttttagtttgcattttctaatggctaataatgttgaatatcctttcatgcacgcacttatcatccttatttcttctttggtgaaatattaacatcccttcctaatttttaatgagtgttaattttcttcttattggctgttgatagttctgtctgtattttggatataagtcttcagttgggtatgtgatttcaaaatatttttttctagtccatagtttgtcttcttattttcttgacggttctcaggcagagcagaagtttttaaatttaatgaagtccaacttataaatttgaactctttacccaaccccagatcacacagttttttgtttttgttttttgagacagggtcttactctgtcccccaggctggagtgtagtggtgcaatctcggctcactgcaacctccacctcccaggctcaagtgatcctaccacctcagcctcctgagttgttgggacgacaggcacgtggcaccatgctcgtctgacttttgttttttgtagaaatgaggtttcattttgttgcccaggctggtcttgaactcctggactcaagcgatctgcctaccttggcctcaagtgctggtattacaggcatgagccaccatggccagccagaagattttctcctgtgtattctttcagatgtttctacttttatatttagatctgttatctattttgagttaaactttgtataatgtgaggtttagatcaaggttcattttgttttctttacatatggttgaccaattgttctaacaccatttgtcgaaaagactttccattctcaactgaattgattttgcatctttgtcaaaggtcaattggccatatttacatggattgattcctgtgctctattttgttgcactgatgtatgtatatgtcttgttgccaatgccatatggtcttgattactatagttttatagtaagtcttaaaatacatagtgagatttcttaaacttttgcttttgttttgtttttgagaccaagtctcactctgttgcccaggctagagtgcagtggcactgtgttggctcactgcaacctccgtctcctgggttcaagcaattctcctgtctcagcctcctgagtagctgggattacaggcgcctaccaccacactcagcttatttttatatttttagtagagacagggtttcaccatgttggccaggctggtctcgaactcctaacctcaggtgatccgccaaccttggcctcccaaagtgctggaattagaggcatgagccaccgcacctggccaacttcggttattttttacaaaataacttttgctgttctaattcctttcccccttcatgtaaattctagaatcaccttgtctgtacttacaataatttctgataggattttgattacagttgtgttccagtctatagactactgtagggagagttgactccactgtattgagtcttccaatccatgaatatggtatgtctctgtttatctagaactcctttagcctccattatcagatttttgtagttttaactatacatgttctctacatagttagatttatgtgtatttaagttgtaagtattttgcctctcttggaattataaaaaaaggtattgtcttactacaacatcagacctaaggatgattatttgtgtatctgacataagctggatgctatcaacatcttgggagaagaggaaaagataatttccccaagagcattccatgagatttagaactggatgacagggcatgattgtacatagaaggagtttaatgtagttaactaaggtgaattaggattggatttggtggttttaaacaatttgctctattaagtatttgttatttatgatggagtttatataattgggttttttcttttttctttttttttttttttttttgagacggaatctcactctgttgcccaggctggagtgcagtggcgtaatctcggctcactgcaacttccgcctcctgggttcaagcgattctcctgcctcagcctcccaagtagctgggactacaggcgcgtgccaccacacccggctaattttttgtatttttagtagatatggggtttcatcgtgttagccaggatggtcttgatctcctgacctcgtgatccacccacctcggcctcccaaagtgctgggattacaggcatgagccaccactcccggccacctttttttctttttccttttaagtagaggtggggtctcgctgttacccacactggtctcaaactcctggcctgaagtgatcctcccacctcagtctcccaaagtgctgggattacagaaataaaccactgttcctggcctataattggtttataagtaaagttctaaactttcactttaaaattatcttaccaggttgggtgccaaggcttattcctataatttcagcctttgggaggccaaggtgaaaagatcgcctggggccaggagtttgagaccagcctaggcaccatagtgagactccatctctacaaaaaaatgaaaaattagccaagcactgtggtccatgcctgtagtcctaactactctggaggctgaggtcagagaatcctgcttgagcccaggagatcagggctgcagggagctatgattacaccactgcattctagcctgggcaacagagtaagactctgtctctaaataaataaataaaaataaaataaaataaagtgaaactaatttacctttagtttacctcttttgagtctagtttaaaacttctggttcctgctagtatacttaaagaaacagtatagtatagaacctttgcagacttagtttacaattttctcaggatgtcagcgctcagatttcattattccaataccaaagggacaatgaaatcactcatggcagttgtaatggagggatgccatcaacattagtttttatttttgtttttcaggggatttttttgttttttaagaaatgggatatctgagtgagctgaaagttatgaagacaggaactcagaaagagttaaggtactagaaagcaggaagtaagacctctcttccatccatcgtgcacatggactatgtattcactaccaaaccagttagatggttcccagaattatagggatctacatctacatgttcttcctggtttccacttacccagccctcaggtctggtttgaaggtaatgaattatctcacttggttgttaacagtcagttgcagatcgaactccttgttctactgcttccccccttctcactactacacttgactaatcttaaaacccccccaaaagaggaggaaaggctagtaaggaagctggggccattaaacaatgtttaagcatagaaaaaaggaatacataagtttgagttgaattaaagaaagttgtcttaactttcagaatagtgtacttttctttttcatcaatgaccaaggtattttaagatttttgtattccagaattttaatataaaatacaacatcaggattatctgatccagtatttttttttaacaactaaaaacatcgagtagacttcggctgaatgtaaaaataggtacattgcacatactagatgcttattgatgtttctgaatttttttaagaaggtggccacaaacagctgtagtctaataaaatctgtattttattcattttgttcattgttttattttttcctctattatgtctttatcaacaggtcacctaaactgagtttcttctaggtttgggcacatccaagagttgaccttggtacagtagattcatttatttcagctactttattgatgccaatatttccattatttatttctgcatcagcagtatggggagtgccaaattgatgttgtcataacaatagttaatacagtggagcacttgctatatgtcaggcattgctctaaagactttatacttatcaaccccttaaatatcacaacaatcctttgaggaggtactgttagccccgttttacctatgaggaaactgagacacagagatatataacttgcccaaaatagtaaatagctggattagaatccagccatttttgctctggattttctgattttagctgctacattatcatgctacattttactagctcttacaaggttttactttacattaccttaggtcatcagtcagcagatttactacaaatattagcaactatttgtgaaattaaccttgaaatgtaatctactgataaactttgtgccttcataactgtacttaagttaggaggagaatatcaaagagaaaaatctttgagccagaaattaagcttgtcagtttccctgattacagaggattaaaagtataggaattgattaaaatttgaccttgggtggaaagatgattttatgaagtctggttcatcttggaggcagcttagagttaaagaccaatgcatggctttccataccgattggttaaaaaaattatgtagattttatacacattgccacttacatcttgtatgtttgtagctcctctttatcaagaatggcaaattttcatgcagaatagaagtataataagcattattaagacagtaacttgtcttgaatcttaattgtatatttctatgatttcagacctcagagcagtctttatgtggaattttgattgacggcaaatgctaggatgttcttttcaaaattttccttctaggagaaattatatttcacgtatactcaaagtatatgtacaataggatacaaaaatattttgtgtagctgaggaatagtgtatatgccagtgattaccaaagtatcgggacaatcagatgacttggtagctataagtctatgaagagcctggtcttgaggcttcagagtaggggcgttctttttaataaaggcacctaaacttatatttgtgtgcatatggaacagttaagatggtggttgagtccagagactagaatggttttcttgccatgtgttttcattcaacaatttttaaactgaattattctctttattctttatttatgttattcactatcaatgaatattgtttgttttattaaatcttttgttttgctgtagtgacttgagggggccatctcctaacaacagaggctttgacaaagcaccagaggattctgttaaaaagttgtgtttcgtaattgtagttgtcgtgtcagagcctaactgacttggagctgaaggatttttgtgagatgagtagctgtgccagcagggacccaagtctcctgggctggccgcgctctcattaagatttgccgctagcagtggcggtgttcagcatgtatgtgacgtgcattctgttattgtatgcttggcttgtcagcctgcagctttctgacactcacttatgtcactctttattcagagaggaagaagcttttgataatttgacaagacaagctcttaaacgatctaggtcatggccttcactgtctgtgattgtgaacatatttcctgaaagccctgtcactcatcacagctacattttctcccggggagccacaggcctgtcctggtctcttgtcagctcatacattttggttattcatataccaaatacagtattgggggtttttttcttcccttttgcaaatgctagcatgttagtaaggctaatcctttctcctgtgctgtgttcccagcagggctgcgttcaagggctctctctagtacaaggcagacaactggccaaggggagctgaggaggaggaaaggccgcttagtgctgtttttgtgtttgttcattgttgtggaaatatgagaactggtggcaagggccttgtctattgagcacttgagtcttggtctgctgtcaggggctgtttaagattgagtgttttattttctttgatgttcacatttgagaatagggaagtgggaattaaacaacagatgcactaagccgttgttctcgtaaaacaataattagcacctgataaaattcaatatgggtcaaaatgcacaatataaactctcaattcatctggtgtggcaaactgtgttgattcatctttgaattttatgaataataacactgatttatgtatggtttattatacaaaatacaatagacgggaaaactagttgggcagaagttggcaaacaatgtagcacattgctaaaacagatgtacaagtacactttgtatgttttcagttgtgtgatttgaggaggccctttgggttgccatccatctaagtaccagtaaggtgagatcaccagggtaaccaataaatgcaattgtattttcatagtttgttgaatttgcatcttagatgagttccacagctgactagtaattcattttaagtatttttttaattagaccaaagttagttgtaatagtaggcttcttgctttagaaattactttattttatgcaataggtatataattttccatgcaatagatacatacatttgggtgccatggcattctatttgataagaagaaaaatacgtgcaacgactagggaatggtaaaaagaagttgaagccataataagcaaaaagaaaaattagggttttaaaaattcattgatgatacatagatataaataaagatgtgtgccttatattgacacctagtttgaaatgaaaaatatttgtttactttttaacctcaaatataaataagtattacaaaaaatagcaaaatgaaactatgcatgagaatgttgagtaaaaatacttatgagacagtcaagtaggagtttttaaaaattacaatactattgtctaataaatgaaaagaagtttcatgtctctcactactaattttctatattgggcatcatcttcatgtacagagcaatcagatgattgttcaaaaaccaagtaattctttcttttattactaaattgctgcaacacaagaaaaggtcacatggtagagtggcattctgccagtgtatgacaactcagtgattgcgatttttcaaccgtattattctgaggacactgtggtaatcaagaactatccataactaatgtataaataactgcttgcttatttctacaataatccaactcaaattatatatacacagcaaaaagcttatgatagaaggtaggaaatgaatatttaaggatatattgtacattagatatttgtgtgtatacatgtttataaaaatagatatttcttgtatatattcttaagaacttttgtaacaaagtttgtggctacatttggtaactaacatgatctttgccttatgaatcaaccttttactttttaaaaatagttgtcttttcatcagtgttgttcatccagaaatgactggatataataagtgggtttttttagtaagacactttagtttccaggaatttgatattaaaactggaaagctgaccactaaacagtctttcctatagaaagctgtgtagactgctttctataggagcagtctacacagctttctataggaaattacacaggaaagttaaaatgcgtaaaggataaaatttttcagcatagatatgtttcagcatagttgaaacatatctacttttttgtctaatcacttatggtggtataatcagtagaggtattggcattcaaatgtttcttaaattattatcatagccatgatattttcagattgtatgaattacctttgttagtcttatcaatactttgaaaaataaatgaaagaggaatgacaaatcaagtaaagagttgtttcaaactaggtatcaaaaattacaaagatttcagaaagtcttactctaattttaggcatgcatctataaacaaaagctataaatttccattcgcttttaagaatcaccatttcctttgcttggtgttttaatttattccaaccatttatatagttacaaacaacacactttttgctcctgagaagatggtaaactgatcaactatacataagcagcttggttagaaaaagtgtccttaacaaggtcataatttaggcataagaagatttatatatgtgttcgtaagaaaatatattctaatcactgtttttgttgttcctgctattgtttatatttgcttgtttggttggttcttttgttgttacctattctagtttcaattagtatatcttttacaagattatcgacgttttggggatttttaaagttgtttttgctacagatgtggatatggaaagattagacagtttggactttagtttcttgcagtcgtttttgttcttgttgtttttaattctctttcttatagagtattaaaagttagcaccaagtgattccgtaaaagatgccaacagctatcacaaatatgtaataacagtgaagtcttcttaaagcagttactattaaattgttttccatcttactaccaaagttcaaaatgctgttttaaaaggtgtacttggtgagttttattgattttgaccactgctgttcatttatcagtttaactgagttatggctctttatcacatcttagtgcccaaaacttgtaacctgaaaagaaaaagagagaaaactttgttactggctttctgacaatggcggggagtgtgttaaaccagtgtaaaattcaattaaactgtctagccaggtttttgaagctgaaatgcagaccctttctgttaagcttcttattttcctgtgaccgacaccggtggatgctgggttatgccaaaaccaacaggctgtaaagtaccttgtttcatgctcccagctgatcaatatttttattttccaggcttgcacagaaatctggaggcagtatcacctaacggtgagtagaaacaccttttttattttccccaagacctagcctatttacccttctctgaactgctgaccataaaatatagacaagcatcttctgctggaagataataaacatctgaagagtttttgtacggagaaagcaataatacactttttctcttttccactgccccctaccctatcttcctgttcttaaaagaatttgatttttttattactcacatcatttaatgattacatcatggtatctcttagtcttccagactatattcattaaattaaagggaaaaagtatactgggagccttaaagagtaataatccagtgtctttaaaatgttgtattatccacagtccacaagcattcagtccacagtatcttcagttgcttttactaaaacagttactgatatttttcaatgaacctagaaaaagcttagtgtatatttcatatagaataattcaactgtcatatccttaagcccttcttgacttattcaaaatgtataaatatctgcttaataccattcaagttattcaattcctagtttccttttattgtgattttaggctaagtagaagcagaaaatacagtttgctagagaatctaattgactggtgctcaatattatgaagttagtttacttttaatgttcagcttaaatcatttcagtaattcaccatagccctactactcacttcttttactgtattaaatatgttgtgctaagcaacagaccattattcttttaattattacagttatataacataatatatattaattaaaagttgttaaacattgtttcttaaggtttagcatagttaaaagttttgtttacacaaagacaggttgtaaaaatacaaagggcaaagttctttcaaaacatgacttcttatcattctccttagagaaataaaaagtaaaccaacaagtagactcaaactacctgtctgtctgtcacaggcccaagaggccataaattatataaggtggtttgttttcacattttgtgattaccatttaatttttttaaagattttcagtagaaagctgtaactcctcaactattcctcaaatctcaaattaggatttgttaaaaacttaagtgttatacccaaaaatatatacatacccatgtatgttacacatatatattacaaatgtaattcatctgaatacattgtttgtgcttatgtagcagtttttttatcctatcataatatagtgaaatcattacagcctaaacttaattagaatctaattatatgttatacttttcaagatgacagagctactctttgtaactgtataaagtaatatccttatagatttgacattgcatttattttagcttttcccctaatttaaacaattccaatcttgaagtgtaggaagtatgattttaaagctgctcttttgattatttacacctgtgttcgtttatatacctatagttaaagggtaaaaatttgtttcaatgtaacagaaatatttgaaggtttgcttaatattttagctgttcagaaacataaattttaaaaagaatcattaggaaaaaataatacaaaataaatttactttttaaggaattacaatatattctatttataggtataacaaattcaatttgaaaactttgtttgttccaatctggaatcctggttaattttttaaaataatattgaagttgccatcacagtttataaattatcaagttgaaattaataatgagtttactatgcaagtataaatataaaactagcatgtttatgaacttgtgcatatatcagtgtctctaaaataaaatagttaagtaattatttaaattatcagtatatggacaatatccaaatgtatgcaatgaagcaatattcagtcttgaataaaaacaagatgcatgatgattttagtcatcttcagctcttttactaggcgatggactgccatctattgactcctagtagccctcacacatgaatgttgagtcaatcagcgcagtgaccaagtaatgaagcctcagttagaattgttactacttattcatttaaaccagtctgcttaaaactctggagctttctacacttaagcattgattaattactttttctaaccaaaattgtcatatttcttaccccaaatgatggcaaagatgattagtatccagtttggagatgtttatatttgggagctttacagttgcttttatctgcctcccaactagagggtcatttacagaacgacttaaattttaacagtaaattaatgtttatccaggagtcgttttctttaaaaaccaaaaaagtctataggttaaacagaatattgtttctcaaacacataagaaaggtggtgtagttgattgttacaagtggacttttgaaatattccaaataaaaaattccttaaaacactttcagaactaagaagaaagttatagaagtgttcactattttcaacaatttcaagaaaaataaaatgaaatatcttcaacaacctgtatatgaatataatagctttttaatcagctagactcgactacattaataaaagctaaagaccatcattctaaagggttcatgctaataaaactaaaaagactacatatacacaaacatccatattataacaaccatctggtgacaccatctttctatgttttaatgattctaaaattatataatttaatgtctttatcaatttggagaccatgaaaaaaagaaaaaaatattgtttttacttaacaagtacataatttcctcaaatagttaatatttttacctccttcaaaaatgtttagaatgcttttaaatgtttaataatatagctaaaatataacttcttgtattttcatttctgctacattttcagatttttgtagagcctgacttttaatgttctttttcatctttcaaataactcattctagataaaaatttccccctttattcgagaaagaatgtcccttcccccaccccctgtcatttctactctcatttatattaaaaatcctaggccaatatggccaccaacagagttttacaaccaacagaatttttaactagtagaggctatgatttgacatgagttggacatttggttaatcttgtttttaatctacttactttaaaaagtaaccaggagtttgctatttgagggctgtatgtgttaagaatcgaaaaggacaatgcatcttttatgtttaattttgcatttgatttctttgtgtgcattgttaaaatgtatttcaaccctactgccttttattttaactgaaggtttaagcaggaagcaaatgtaactgttttagaagaattaagccttaattgtttttttatatataatgttttgaatgcctagaattcacacttcaaaaaatagactatttgttatccgggaaatggggaagagtagagaaatgagtgtgcttgacttcctttctggcctaagaaaggcttatggccacagtttgtcagggtatatcttataaaccataagtaacaatattacatttcattttgccacttagttttctgtccttacctggaaatacccatttagaaatgtattttttgtgttttcacagtttggagttttatactgagtgagaatgttattctctaaagcattctatgccatactacagagtgggtacccctaaatgtcaacagatttggatttaactctagaactatgttttacactccagaaggaaggaataagaaggtggttttggttctgagactatagctatgcaaaagcctttatcctgagattgtgatgtaagataggatagataattttctaattgcctaatgctaatatggaatgtttttcctttaaaataacttaaaatgtgaaatgaagagattcaaaaagtcagccagaatcttttcttttcctggttaattggatatatgttgggattcctaaatatctttctgagaggtccttggctacataagcagatctgtaaaaaccataataaccccatccacacagtagatatcaagtgataggtctgtttttctctgtgtgcgctttggtgtgtttaagaaaatagaactggttacatactgtcttgtaaaatgctatctaaacaccatttttattggtaccatttttgaggcctagcacataggttttcataagctaatacattataagttcattttggaagcttttgttttggtagttcaacttactttgcctacttcctcaagaaccagaaatactcttgtataaattatagtttttttcctctgtatctggtattgctgttttaatgttttgattgatcaggtgttgctattgagacattacatctctgccaaattgtcagaggtttagttttcatttaaaatgcccttagtactaaaatactactgaggtgaacgtgattgtgctctgatcattcagaaggcacatgactcttttgtagtgcttcagagccatctttccattatagtactataaaataaatcagactggtttatcttttgagttacttggtgtttgaataacaagattttttttttgaataagcattgatgacttgtaatagtccatctctgataacagagatggaaaatacatttggagaatgactaaaatttttaaagatttttcaaatgcaaaatttatatgaatagttttatgttatttaaatacttatcttgttcttaaagaatttgctgttaaaattatcatcataatttttacttcagtcttctcatattttgagtttagtaggaatgataattactacatttacagagtaagtcaactgatttttttttttaatctttatttcactggcatgtggaaccacattttgccagaacttatcattggaaaatgcaatttcaaagcaaatgaaacctggaattatcaatctcaataaatgagattcttttaaaaataaataaaatttgctaaatcatcaaaaagcaattttctaaagctactgtaaaggaaagggggaaaaatgaatgttgtgaattataaatgcatgttatttttcctcacataacatttcctcagatatttagaaattgtatgtatgcatatttatttgtgaatggagttagaataagatcatttagatttgggtgtaatttttatttattggagcacttgtgagaaccttagtattttcttctttacaaagaaatactgaagtgttcactccttcaattctgaagttacttgattctcagtattttaatgcaaatactaatttggtttaaatgggaaatcaatatggcatattttgcatagttttttccttgcattaatatatttagataatatcaagtactttatgatggtaatcctaatgtagatttaagtgtttcagataatgaagcaatgagaagtatgcagccttcactcaatttaggaaagatttatcataaatgttttggcatagaagcagctgtgcttttgccatcttctaaatatctttaatgacctactcactagtcatcatgaatttggctcatatttttagatattagatgttcaataatcaaataattgaatctgaagttctactataaatagtgacttcctttctttatttgacggaaaaagtccctgtgctttttattcctgcccctagtggctaggggcaaagaccagtatatttaggacttaaatatgtctcacatggccttaaagttgtacttctgttttaaaaatggaaagaagtacttgttgtggtcatctgttttcttatctgttaacaaatgtttatcctgaggatgacaaatggagcatcacgtttgcacttttttttattaccctttcctctcttccccatgtgtgttcagcattacttagaaaggaattatagttagtcattatagggacaatttattcttgattattaaatactgtggtaattaaatttcatttctaagtgcttcttgttttaacatatataacacactttaaaaatcttttttaaaacccacagtattcatataatctcaaagaaaactacatttctttctttaaaaaaattaaaatatggaacacttcatgaatttgcgtgtcattcttgctcagggacaaaactacgtttctttttacttgcaactctgcacttttaaagagtgaccctattacaataaaaatgagtataaatataaacaaatagtcttagattttccaaaattaatacagtttaccattgtacagtatctaactatataataaattaacagttttaaaatcttgagtgatgccaattctttgtcgtgttacgtacacataaagagtgtagaagtattatgtagataactttagcatattcaagtgattatttcgcatatgtgctttgaacaggtatttcatgccatttattaattatattccgagtgatcaaacttgtcatagtcttttctagacatttcagtccaacagtaaatgtagataaaatatactagagcattgatatttgtattagacattcattttggtagtcatgcatgtgagtgacatggtagattacagtaattcctaaaggtctgaagtatttaggaatcaattaattactcacaatcatgatcaaccataacctttaagggtttggatcgatcgtttgaataatctgcaggaaaagactccttgacttgttaacatgaacagtctctctgaactagtgttatattttctgttacaagctgtggtgataaacttaagttttaggtttcaaaagcacagtcttttcagtgactgaaagttaatgaattattgttaaaatcagtcagattttagacttaaaatttatcagtcatttgatccctatatatcagaaattcaagggtgttatgtgtgggttttttggtacatttataagtattttcttccagctattttgagttggtgcaatgatcctccaagaccaacaactctggtgtttaagaaataccgaaaacaagtgaagaaatatattacctctttagaaagcatttaacaaaaaaaagtttaatatctttgggattaaattagaacttcaccttaattggtacaccagtacatagataccgcacatttcaaaacaagaattatttaaagtgagtgtttagaaatttttattagctttgtaaaaggaatgcacatgtgtgtatcaactggtaataaagctactagataattttcattccatttttcaataatcatgtagaactgaatccattgggtaaattataagatcatctttataattttgtaatacatccattttacatagatatgtttctttacattgatttgtggattaccccacatttttgttcagttaggaaaactaagttttgggttgtgtcttaactttgtttatacaatatcaattttgttttcttggatctctcacatttcctttgtttacagttgtacatttcctccctgtttttaccaggccttagaaaactgtgctatacagttgggccagaagggcaagcaaatttctgaggaaattactaggtggcatttttttttatcataatagagaaaagaatgccagctttgggattggactgtggttcagagtctgagtctttcgtcatatactaaatgtgcaaacatagttaaaatatttaacttctaaagccctcagtttcttcatctgaaaaatggggataatgccttgtaggattttgttaagtatacgatgagatgataaatataaaatacaatacctgacagacagagcatgttaaacactatgcaggctgtactacagcaaacccaaaggcatctcacacctgtggagatggcctctggactgacgtcccaaactcaggttattataatgtcttctgcccaacattaggagattcctaaggacctctttactctgtctcctaacaatgtttccttcttatatttattgaagggaatcttttgttgacaaaattatttacctcagttttcattttctaattatttatacttgtcttattcttttccatttaggctacttcctttcctaatgaaaataactatataaaatgtgtatcataaaaatgcaatatcactttgaaaatacatattaataaatgtgtgagtcttaagtgataacttcagtaccatctgaatatagttctctatcataagcaaataaattatataaatatttgctctctatacaaatgatgagaataaaacgaaattgaaaaattcacccaaacataaacataccccaattagaatactttctgctaggggtagagggcttatgttaatcagataagaaatgaaacaaaatagcatagcagttttttgcactttaggtaaaactactttatgccttcacatgattaacaccaaaaaccagcctgatttcatagcaaaatgtagtggtataagagctgggtcagttctgcagacttccagctgtattctcagatacgtccagcgaaaaaggcaactcaaacttaagcactttatcagtacatgcagtttgtattctttcaaagagcattcctatttcatgtttgttccttgttttaagacaagcaaaggctcagatggaacatattgtaaaagcaaaagaacattacttcccccttctaacaggtccttgcagctgtggaattccctgcctttgtgatcgatggttaagagtattacagtggaataagcagagttgggatggcaggtggtgggagggccatgtgttgtaagtcatgtggagttatggtaaaaatgaaaatcttggggtttatttggatcccccatgtattagctaataaacgtaatagagctatggttctattcttttataatttttttattggggttcatgtacaatcacatgcaaaatatagtagcagatttgaatatgttaagcattttgtatggttggaagatgtatattagtgtgatttctgtgttttatagtctagcccaataaacattcagataaaatgtccatggatttacacatttatgtgttcttttctgtcccttccccctacatcctgtctccatgccttcatccctctatcctgcatcaaagcttgtggtccttctccatccatgtactaaatggtttctttgtaaaccaagccatttgtccatcattgtttggggtccaaacagtggtaagataccctgtcaccgatcccgcatgctatgaatggcagctcctctccggacaattggcggaggggccgagaaatattcctgagaggattatttaacctttcaatttagagggcacaaagcctggctgattaatgaactttctgatgggtgccgataagcggatctatttctttatttcccctaaaagtgattccttcttctgtccatattactataatcttaaacataaaatgtggcaaatagattaaaaaacagcactaaagagtttatctggctggcaaactgaaggagctaaattaaaattggtaatgacagcagtggctcagcctcatatatggtttttaaatgcactgtgtattttgaagagacttattctccagctcgcctggtaatgactgcttttggtgcacagtctggggctggcttctgttatcccaccccaccctacccacccaccccccccccccccaaaaaaaatgagttgtgttatctggatggctgcagacacatacgcatccccctttctcactgcatgggcagacaaggtcgatagcattacaaggtatttgtggcagtgcttgtttcagttttcagagctgccagtttccaggcggatttgaattacaaaagaagaagctggcatgaaaattgaaaggttttatcggctggtctgaagcctcatagcacattgcttatttatgcagtccatttgcaccaggaaatataaaaaggaaatacatttttaaaataaggccataaagactcagatatgtttaagatggcaaataaaatatagatacctataatatctttccaggaaacgattttcacttaatgttgcacattacttcagaagagcatttatgttgctgtcataaatttgtgcgtttgtgtcactatgtaggtagtctctggggattaagaaggaagcctttgctaacttactttaaaattaaaatagacggagggatagctctgcagtttgagagctacattggaaatatttaaatagggtggtatattaaacttaaactaacatttttgcattccatgtaaaattagctatggcccaatgaataaatgctactacctttagagaaaattgggatgctttttaagccatgaagatttggagcattcaggaagtgaattactctgatccttactgtgttgcgtgtgttcattgttctctgcttactgaggttttctttctgttgttggagttgttttgatagggggagtgtcctgtttacaaaaagaaaggttataaattaataagcttaatagctcatttttataaaactcgtgcttctttttagttttcagatatattttagattttgcatagtggttaatgttgtgaatatataaccctttcactattggaagttataccaataatttatatctatttacattactttaatgtagttttcgatttactgaaaaagatacaatgatgtaatcccttatactcttgactacataaaatgaagacataagtatacaaacataaagtagtgcaagaccttgagtgattggtcattcgcagcttttcaacccattggtttataaaatttcagtgtatccaaaagagaagtagggaggaagttacagagatacaggaaatatcaaataactaaagcaacacacgttattctgcagttcaaatgaacactctttaagaatcttttttccaatatggcaaattactctcaggtaaaccatgagagatgcatttttttactatttttattttcactatttttaccagtatctgggtacctttcccatgttttcacgacctcgactaattacttcatgtagttgttttttgttttctttttaaacagagaaaatatcaaaagcatacatgtctgttgcatgctaatgatgtgctgtacattttttcatgaattttcataaggattttttctacgtagcatgtgtggcttaatgatgtaatcacccgatagactagaaaatgctccaaaggagacgttccggtctgttgtgtacataatacatgtttcaaaaatctgcctaattaaggaattacccaatggattgggagtctgttgggtacatgacatggttttttaacacataaaagtattatgtatatatggtacacatggtacttttaatgccatttttaacatatgaggaaaattagtagcaatgtccactagaatacaggggaattctgttttttcactaagcaaaaataaaagctttaaaaacagcactcttttaaaataattctaaagccattagcttggagaaaattcctcctagtattcctgaaagggaagtaatactgtcaatatttgccagaacagtgtacaaatggaagactttgtccaaaacctcagttgaagtaggcctagagttcaggtcccaggtgtgaggatccacctcagaaaaacaccttaaagggaggaaagggaacagtttttggcttttttgtaacacagcatcatctttgttgtctcacagcctctgctttggttcagttcactataaaacagtttgcctaacttttaggtttctttatttgattcttttaggcataaattgatttggaaatatgaaagaataaggttgttctcaaacatgaaaatcatattgattgaagaggtgcctaggcacatgtgatttagtcagtaagattggagccaagctctacttttctcagtgttatatttggttatgaatgcatttacctcaggtatttaatatatttgctttttaatatatgtcatatagcaaactggattaataaatagaaacacatagtgtagtctttaagcatatgtgtgattataaaaataaatccattttgcattcacagaatagaaaataccctttaattagtgaaattgattacatatcgtatatagtaatgagcttcagctagatgcaagccctcattggatcaaagtcagtttagataagggcagctgaaggtcacagagggagatgcccagcaggttcatttgcataaaaaattactgttagaaataggacactgaggcagctctagcattttgatctcttggcctttgtcatggagattcctagtagtgaagggagtaaggccagtgtcccagataatgattaactgttttaatggcattcattcattcattccacactaactactcatgcagaaaaaagggttatgtaaaatgacattagaagaaaatcatttgtaatcgttgcatcgggctgcactttgaggagacattaggagtaaatccgtggcgtggtaggcttatgctttatcttctgatatttactgagtttactggtgcatgaaaagctttcagcaagaatagcagatgggatggacctttcataggtaatgctatctaccaggttattacttctatatattgatagtaaagtaatctccaagatatcaccctacaaatatagattatttaaatgtctgcaaccaaaaaaaaaaaaagaaatacaaaaggcctgcttttataagtaattaatttggtatccgttgggtcaaagtctttagatgaaattttgacttaaaaaagttcacaaaaactacattcattgccttgcatttaactttttgtcagcagtacaggcacgtatgacagaacactgaacttagagctaatcagttgacacattctgctttaaattggacctttactgttaattaaaaataaagacatgctccaaggcataagtattgagtcacaaatttatatttctaacacaatagcttagagatttttgttagatcatagtatgaaaacttgtccactggaaaccactattgagttttcagtagtgtattctaatacagaaatgttctctaattaggtaagatctaggctgatttcattcctattaagccctagtacatgatagtttattaaaatgagagtatgtagatagcgtttgtcatgtcatttactaattaattattgtgaaacagtttagaatttcatagcacaatatactgttgctatttttattagtaataatggaagtttttaactactgacattattcagatgaatgaacatccacatgtttacatttctttcaggggctaaatttgagattcctttaaaataaaataagaagtgtcaacatgaaacatgctttcaaaatctcgattaagaaggatctctttgtccctggtactgtaagactgagttcctgttcacttggcattactaattccttcctgattttgtcagagtatataccacattctcagtgtgaagtaggggagacaataaggaagctgtattattaatttattcaagctttttaatatatttaagcatgatttgataggttttcccttaatgacataaaaaattaatagtttcccaaagtatgcaagtttttattaacaagagctaaatcatattggatgattactgtaggccatgtgctttacttatgcattacctcattattcattcattaatatttactgaactactactatatgcctggccctattccaggagctgaagtacagcagtgaacaaaaacagacaaaaatccctgccctcacagaacttactttctcctagcctggggatggggttgggagtggataggtagtaaactatatagtatgtcagatatgataagtgccatgttgagttttgtttggttggttggttggttggttggtctttttaaaataaaatggcagtacagcaggatagggagtacagattggagggagctagccattttaaatagggtgctcaggaaggccttactgagatgacatttgagccaaggcttgaaggaagtgaaggagtgcactatattaaatctgggagaagagtgatgcaggcagatcaagtagctggtgcaaagcgctgaggtggaagtttgtctggggtattcagagaacagtgaaaaggccagcatgacaggcttgctgtgagggaaagtagtaggagatgaggttagagaggtgggaggatgcaaattacaggccattgtaaagtttttggctttttctctgagatgagaagctgttagagagttttgagctgaagagtggtatgttctgatttgcaggctataaggatcatctttggtttagagtatgttgtagagggcagggatagaagcggagagaccagttatgatgttcttgtaatcatccaaacgagagttgagtaattggaccaggacagtactggtagagtggaaagaggtggatgtatttgcagagccaacaagctttgctgatgggctgggtatgaggtataagcaagagacaagttaaggttgttcgtttttggcctaagaaactggaaggacaaagttgccgatgagatgggaaagattttgggaggaacatatttggggtgggggaagaacaggatttgattttaactaactaaatttgaggtgcctgttcgacattctagtagagatacgtgagtgtagagttaacagagatcaaggctgaagatagaattttagaatggcaagcgaaaaggttaatgtaaatctatactattagatgagagcagattcaatagagaagaaaagcagtctaaggactgagccctggggcactgcagtgtaattggacagagagatggatagaagccaacaaaggagactgcagaagaaatagcctatgaggtggaagaaaactaggagagcgtgttgtctgggaagctaagtgaagaatctgttgcaagaggaagtgatcacctggtcaggttttactgataggttgttatgtaagatgagtatgtttcatttatgcctcacagcagtgttaatgagggagcactcttactgttattattcccgttttacagatgagtaaaatgaaggaaagaccatgtaaataacttgactaaggtcacatagtcagtaaatagtggagcccacattagaacataatcccaaaatgcattggataaataaattttatcagagcatctgggtcttaggaagagtttgccaattttgcccttgattgcccccagtcgttaaaatacttttcttccatgctttttctttgaataagccaaacataatctttgtattatgtgtgtgtacatatatagtacatgcgcatagccatacacttgtatatgcctgtactgtctctgtgaacacgagaatctcgtaacagtaattgccattgaggaaaggggaactgagtgagaacagaagtgggagacagacttctcaccacacctcttagtgtcttttgaattgtgtgccatgtgcatgttactgattgtaaaatatttcattctttaaaatctaaataactcatttaggattcattctatagcagcaagacatatgatttgttctttcaggctctggcctaacagcatctcagaagaaattgtgctgatgcagttttttagtagaaaatatgtatttgatgcacacttaattccattttgtaggcctcagcctccctagtgctttcatctttaaaatctttactatatttgctctttcatctattatctccgtattcctcgcagtgtctattacaatgtgttgtacaaagtaggaactcaataacttttgaatgaaaaattcctactaagggataaatcatgagaactacctgttatttcctcaaatttaggcaataaagtaactaaattcggaaaaattccatgaaactttttctcaggcactcaattagtagcagagattttcagtgtttgtatctactttcaccacctttattggtgcataacttatttccactctctgttgaagtccttaatacctactcattcaccacctatttgtttgttgagcacttcctatgttctaggtcaggggtcagcaaactttttctataaagagccaggtagtaaatattttagcctggcaggccatatggtctctgttataactctatccttatagtatgaaatcaaccatagaaaatttgtaaactaatatgtgtgcctgtgttccaataaaactttatagacactgcaatttgaatttcacataattttcatgtgttgcaaactattctgtggtgattattattattttagccattaaaaaatgtaaaaccagctgggcacagtggttcagttctgtaatcctagtgcttttggaggccaagtcaggaggattgcttgagcccaggagttcgagaccagcctcagcagcatagcaagacccccatctcctaaaaaccttaaattaaaagataagttatgtcttatatttgcacaaacaaacataaatagaaatatttgtgaacatagaccttttcagagagcatttattatttggagagtggatgatcctttttatcatcacaatccctgctgacagctaccaactagttattgatcacctaccattagcttcaaacccatcatgggcatcccatgccacttaaaacaaatccgatattcttcaccctaatttataaagccctaagtgatctggtccctccctgtcctctagagcctcctctttcactcttccttcacctactccacttccaaatttacaggtatttttttcaaatcctcaaatttggtaagtttgttcctaccataggactcggtactactcgttccccatgccttacgccaagagtggtgtttcccagacatcacatacatggcttttcttgttatgagaaaggaccttcctagttgaggcttcccccaaaaagtcaatctaagtcatcactagtgattctcattcatataactattttaattgtttgcatactatttttcgctaatattttgtatgtttgtgtattattggctctatttatcttccaccactggagatgtgagcaatgacttttatcttgctcacttctcagttacctgatcttagaacaatatctggcatgtattaggccctcaataattattttttgaacaaattaatgaaggaatgcatgcatacactcatgccatgggcccagcactctggtaaatctccctgatggaggcatccttcgacttgtattctgctctacttgtccccttcccttcttgcatacacagcctagtttctaggaaaagtgacctatgttctgttcttcagcagctttctacttataataaatccattacaatctggcttgtacctctacccctcgaaagaaactactcacaatagtttctccacttgccaacaacttcctatttgctaagtccagtggatttcatagtcttcatcttatataacccatcagtagcttttaacagtttcttccttgaaacatccattctgccttcatatctatgacatcatctcttttgtttttatttctcttaagccatgtatgcttgtggctgcaatttgatgtcacgtcaaataatatagctgtctttgtgggtggaaaatcatttctgcttaataatttcatgtcttcacagtgttctatctgaagaaatttgtgaaccactgcaataagggatacatggcttacatgcgtacctgttaaaactctgtttaggctgggtgtggtggctcatgcctgtaatcccagcatttggggaggctgaggcaggcggatcacttgaagtcaggatcaacctgaccaacatggcaaaacctcatctctactaaaaatacaaaaattagccaggcgtgctggcatgtgcctgtaatcccagctactctgaaggctgaggcaggaggacaacttgaacccaggaggccgaggttgcagtgagccgagatcgtgccactgtgctgcagcctgagtgacagagcaagactccatctcaaaaaaaaaaaaaaaactcttgtttaatgacttttagctagtcttaatttatgaaccccatttttaattgcagaatataaaacggttgttatttttattatatctcaattgataatacctgaggttgtaaattccattttgtgtagctttcagtaggaaagattattgaggttattgttttgctacagtttttcattttagggaataagagctgaaagtaaagttgtttgaagtagttttttttgttttggtttggtttggtttggtttggtttgggtttgcgtttgggttttgttttttgcgacagagtttcgctcttgttgcccaggctagagtgcaatggcacgatctctgctcactgcaacctccgcctcccaggttcaagtgattctcctgcctcagcctcctgagtagctgggattacaggcatgcaccaccacgcctagctaatttttgtatttttagtagaaatgaggcttctctatgttggtcaggatggtctcaaactcctgacgtcaggtgatccacccaccttggcctcccaaagtacagggattataggcatgagccactgtgcctgacctgaagaagatttttataacctatttattattttcctatatcaaggaaataagacctttacaaaacacctgtttgcaacattaaaaacaaaattagggggcctgggcacgttggctgtaatctcagtactttgggaggcgaaggcaagcaattcacctgagcccaggagtttgagaccagcctaggcaacatggcaaaaccccatctctactaaaaatagaaaaaatagctgggcatggtggcaagcacctatggtcccagctactcaggaggctgaaacccaaggattgcttgagcccaggaggtggtgttgtggtgagctgagattgtgctgctgcactccagcctgagcgacaaagcgagacgctgtctcaaagaaaaaacaaaattagggctggccatggtggctcatgcctgcagtctcagcactttaggaggccaaggtgaaaggatcacttgaccccaggagttccagaccagtctgggcaacatagtgagtccctgtctctaccaaaaatttaaaaaacaataatataaaaattaaagtagccaggcgtagtggtgcactcctgtggtctcagctacctgggaggctgaactgggaggatcgcctgagcctgggaggtcgaggctgcagtgagccatgattgtgcctccgtactccaccttgggcaacaggggaagaccctgtccaaaaaaaaaattagttggcagactagcactgtttgttaaagactttcaataaacaacataagaaataaagtgatccacgtttaagccgatccttaacttttcttccagtctccacaaagcgtgggggtgtgcaggggttaggtttttctccccctgtttacagccaccacctcctcagaggtctgtgtccatcatctcctttcctcctctggtttcaacttctccatctccattatctttcccagatgttcaagtctttcccattctataaacagattccaccaaatccccttcctgggtactgcttcatcttattctgccgcttcatgcttctcaatatataacttctctctcctacaacttccattcaattttttaaaacattttttgttctgaaataataggttagtgcaaaggtaattgaggttcttgctattaaatggcagaaactgcaattacagttacctttgcaccaacctaatatacatactgaaaagtatgtaaaatacatgtgcaaaagaataaattagttatgtaatacacacacaagttaactatcgccatgttgaagtaacagaaaatttcagctatgccaatatcctgtgtgctgtttctcctcactggaagtaacctggctttaaagaaaaaaaaaatccgggttaagttcacagatcctggcttttatgagtaatgatttctttgctctttttgtagttttaccacctttgtatgcattactttactgttcatcctgctgccttgtactctttctagaatatctcagaattttcacagtaaggttatctgtgagcagttgccacttcaagtggatgtttctcagtcctaatctcactaggcctctctgctatatttaacattgtagatcagttcatccttcttgaaacaactctaaagtctgttactgtattctcctatgtctctgcatcctttaaccttcccttctatgtccatttcacaggctcctctgcccaccccttaaacattgatgtcttcagggttccttcctcagcccacagccactcttacactgtccatggtgatcctgtgcactctagtgatttcagccttcactcttatgctgattactttcagatctactcttcagctcagactcttctgtctctacatagaaactgcctcctggagatccttacctagatactccatatccaagacagtcttcatcaactttgcctctaaacttgctcctctttctttttctactttttctgaatcaatccttgttcacccatgttcaaaatctggaggcatcctgatttttcctttccctcattccccacgtcttttcaatgaccaagtgataccagttcgttctttctttctttctttctttctttctttctttctttctttctttctttctttctttcttttttgacatggagtctcgcttttgtcgctcaggctggagtgcattggtgcgatcttggctcactgcaacctccgactcccaggttcaagcgattttcctgcctcagcctctgaagtagctgggactacaggcacacaccaccatgcccagctaatttttgtatttttagtagagacgaggtttcaccatgctggccaggctggtcttgaactcctgacctcgtgatccgcccacctcagcttcccaaagtgctgggagtacaggtgtgagccaccacacctggcccaaactacaactatcctaacttcgacacttaaaactggataaagctcatgctcctttacttgacttacaaggccctccattcttgtgccctgctttttccaccttgtcttccatttacacccggctatgtatgtcatattttggcagcatgtatgctcttttttagttccatgtcactgttcattctgttccctctgcctaagattctccatttgatttacacctaatttgagagtaaatttaagttttacacctgcagggaaactttctctgacccttctttaaccccatccgctggtgggggagtccccctcaccactccattaatgccttgtacatactactgtcactgtattgacattgttttgtaattatgtatatgcctctcatgttctgctggcccattatactgtgttggataccgaacacagtacttggcacaatgccaaattgaatgaggagggaagaaggagagggaagcacacattgacattaagagtaaaagaattgttcttaccatgttatatactttaatatatggaatcgcctgaatacaggtctccatacaaaactctaagaaacttctaaggaatcccttacctataaagctcttttggaaagaatgaggttttaattttcttctaacatcaacaaaccctcacaaatattcatgttgcagaccaaacctggaccacccaaaaagccgaagaccccttcaagaccatcagccttagcatattgctatcactgcgcgcaaaaaggccattatggacacgtaagtttgagtgacatttgggcatgaagcattctgttgtcagggagtgttttctgaaagatgaactcaaaaagaatgtaactctaaatacttactttttaataaacattaaagtaagacttaatatattttcaactggtttacccctcccctccctgctagagtaacaagctatcagagcatattcctctaattatgttacatgtacatgaacaggttgggataaaactaatatagttcataaaatcaaacaaatataatagtcaacagtatgatagcagttctcatgagttcttacaaacacaattgctttgacaccgccatagcatgattttagattttcttttttttttgagacggagtcttgctctgtttcccaggctggagtgcagtggtgcgatctcagctcactgcaacctccttctcccgggttcaagcgattcttctgcctcagcctcccaagtagctgggattacaggcgcctgccaccacacccagctaatttttgtattgttagtagagatggggttttaccatattggtcaggctggtcttgaactcctgacctcaggtgatccacctgccttggcctcccaaagttctgggattacaggcgtgagctaccacacctggccgattttagatttttgttgtgttttggggtttgttttttttttttttggttttttttttgagacggagtttcactcttgttgcccaagctggagtgcaatgacacgatctcagctcactgcaacttccacctcctgggttcaagcaattcttctgcctcagcctcccgagtggctgggattataggcgcatgccaccatgcccagctaattttttgtatttttttagtagaaatgaggttccaccatgttagccaggctggtctcgaactgctggcctcagatgatccacccgcctcggcctccaaaagtgttggggttacaggcgtgagccactgcgcccggcccaattttagattttctacttagttctcccgttttccctggtacaatgttcagttaagtctacatcacatacatgtaaaccctggcattcagtggtgaaaaaacagatgctgcatcattgacttgctcacctaccccacaaatgcccagattccctatccagccaacatattccctaaccccagctgaaaaggccaaactgtgtgtgttctagatgctgaggtgtcaaagcagaagaagcttcttgctgagagctgggcatgaggccactaggcagatgccacattaagtatgaagcagcagcagctcatttcagagaaaggatgtaataagaataggctcagagcccatacttctgggaatcttgaggcagtggaggaaaggcagtggcacagaaagtagaaaattcttaaaaaagaatgtattattcccagtctccaggtaggcttctagtagcctagaaaccaagataaactaatatcaaaccagatctggtgtcaggaggcagaaagcatgcagtgttgggagtcctcagactgagaagtatgagcaataggatggggtgagtggtattgcaggttaccacttgaattccaactatgacacatcactggtgtagatcttgggagctggagacctacattgtagggcaacgaagaaaagtgctgaacagaatccataaacagataaagtttatcttccatattggggcagcagcaaccgtgggggtgagacataacttatgaaagccaggatgaggctctgagcctcagttgcagtttttgctctgctactgactcaaccatgtgatgtaaacaacccattttttctctttggtcccatttctttatctccaaagcagagaagttgtacaggaaatctctcagcaccaagtagtgaagactttttttgagacacggttcagagtgcagtgggcactatctcagctcactgcagctttgacctcccaggctcaagtgatcctcccacctcagcctctcgagtagctgggattacaggcacacaccactgtgcccagctaattttgtttattttttgtagagacatggtctcactatgatgcccaggctggtctcaaactcctggcctcaagcaatcctccctccttggcctcccgaagtgttgagattacagaagtgagctaccatgcccagccaagaagacttcttttacagaattatcatctctagatcttttactgctctgtccattcctcattactaaacattcagatgttgtcaacgtcttttagggaacatattcacataagctttccattaccacacaaatcacatagatgtacaatttttgcttgcttacctctgtaaagcagaggggtataattttagcatttatgtttgttcaattaaagaaaaacaattatagttggatgcttactagtcacttctgttaaggcagataggaaatatattaaaagcatgtggaatttatccctaaaatctagatgtagataatttttaatttacaataaagcaaatttggcagcctcatgactgccatagatgaggaactctagattatttacactaatgaagaagatcattggtgtggctaatccagaatagtagataaattatatagccaactatcaattgtctgtgctaatggaggggaccagcgatgtggataatcaaaatataatttacatttagctttggaaaacatttgtagtattatatagctctgtgtagtcacatcagtctagaccatacaagacccaaatagggaactatgcaggtggttaaagatgtctgtggaccccttccctttcaatgtcagaaatccagccttacagatactattattgaatggattcctcatgtgaaagactagatctaaggtgaatatgacattgcccttccctaatttcactcactctctagctggggaagcaaggacaacagtagtcactgtacaaagattactccaggagtgtgtgaaagggggagcacgggctgggagagttaaagattctgctgaaatgagtattagttgagtgtatcaagacctctgttacctttgcataatcacaatttgctctttttttttttttttttttttttttgagacagagtttcgcccttgttgcccaggctggagtgcagtggcgcagtcttggctcactgcaacctccacctcctaggttcaagctattcctacttcagcctcccaagtagctgggattacaggcatgtgccaccacacctggctatttttttttttttttgtatttttagtagagctggggtttcaccatgttggccatctgttctcgaactcctgacctcaggtgatccacctgcctcggcctcccaaagtgttgggattacaggcatgagccaccatgccctgccaaaagcgtttctttatgttaccatgtaagtttgccatataacctctaggaccctccccccgacaaaaaaacaatctaaataatccaggtagtcacaacagataaatctaaagatagcagaaggatggaaatgataaagattagaaccgaacttattgaaatagaaaagtgaacagcatcaacaaaaccaaaagctgattatttgaaaactctttttttcaaacaaaagagaaacttctggaaaaactactgaaagaaaaaaggtactaataaacaatgagtggaaagtgtgagtaacttaagatactatataaatgtttttaaattataagactacttcataaagttaaatctgaaaaggcaaataactctaaaatatatgtataaattaaccagactgactcaagaagaacaaatcaactgaaccaataccattaaagaaaatgaataaggccaggcactgtggctcatgcctgtcatctcaacactttgggatgccaagttggaaggaccacttgaggctgccagtttgagaccagccttggtaacatagtgagaccttgcctctacaaaaaacaaataaaaattatgaagtctgaaacttaaaacttacatcactgttcattggaatattcatcagtaagagtataaaaacacatgagaatggccgacttcaacttgatgacagtggtaacttctggaaagggaaggagatgagtgcaaaatgggaaggacttacatggaggatttcagctatatcagtaatactttattcttgggggaaaaacaggcaactaaggtaaaatgttatggttttatatgagggtgaatataggtttttaattatttttttataaattgtgtgtttagaatgatttataattttttaattctacaaattaagtacataaatgtttggctgctagcttggctagttcagacttggcttaattttatgtggatttttcacctactctttaaaatatattctaattgtttttcattacttagctaagaaacaacattttaaagtaacttttaggcaagatggcagaggcagaaaggggaaagttccaaaagaaaagatttcaaacatgctgaatggatctgtgtcacagatcatgataaacaaaagcctgctatgtggtgagtggttcaggccaaagcctatggatttgggaaatactagctgggtagaggccagagtcatgagagtaggaagctgtcctgggaaaatgagtaagagtagggatttcaacttgggtggcggaagcaagaagagaaacttcttttggggtgtctcacaattacctaggaacaattttaaactaggcataacctaccaccaacctaccccccaccgttaagaatcactacccctataagcagtgaatgttgagttaaaataagcttgcaaaccatttgtctctagaaaaaaagatcaaagggcttagaacttatacccacattttggggataggaagaagagatggaaaagaacttgataaaaggctgttggaagtgatggacaagcaaaggagtaatactaacatgaggccgaataacataaacccactaacagagcggcaaggctgctacctcagactgtgaaaggagttaggcagaaaaggctgaaaaaagatacgaagggtttcataggtaaagaagtaagggaagaaaactcaagcttgaaagaatatcataacacagtggggtttagggctgggtgaccctcccaacaccccagcaaggaccatatcctacagccaccacatgaggtaccagtgacatggggctcatttctaattaacatgctccagaatcttgcaaaaaggtttttgaacagtgtgaccatgtgacatcataattttacatacaatttataggaatgtccagaaagagaagtgtatgacccgtctccagtatctccattcatctgctactatgatgacaaatatgaaattcaggagagagaaaagagactaaaacaaaaaataaaaggtatgttgctagacttcttgttagatcacatttgcagtagtttctaaatttctttgtttgtactgtctttgcctgctttgggggtcattggttagcatagaaagtatttttagtaattaccaaagagactggaactttcttgatctccagaaaccaagcacccacttcagaaataatcccatgttgcaatctcctcacagtaaacatttttttacagtgatcattttaggaaatgtccagaaaatattgctgtccatctatataggcagagtttttaaaggctcctttgagatttttctgtttgacaggtaattatttttttttccatttgtatttctccagtatttttttatggaaagaaaggctttcctgctaagttattcctggagcttccctgaagaagtcatttgttagaggccaccgctgcaagcagagctccaagttcacaaccacctctgtggtttctgtacttactgttgcaaacattgttctttatcaccaaattaatatcttatcatttaagttttctctacctctgttctttcttgttattcacttcaaggtggttttccaagttatctttcttgctttaaaaacaaaacagttctgtatttttttagtttgttctataccttattttctgactcttttggccttttactcttctggattcttagttcaggacctttccaaaatgaaggtactaattctgaggaaaatagagttattactctcccagctcctgcatattttacatatttaatataaaatgtatgtcatctacagctatccctggatattggttccaggagcctcctcatttaccaaaatctgcacttacttatgtcccatagttgactctgcagaacctgattataggaaaaagtagccgttcgtatacacaagtttctaatctgtggaatggtgtattttcaatcctcatttggttgaaaaaatccacatttaagtggacccacgtagttcaaactcattgtgcaagggtcagctgtgtggagaagttatagtagttgtagattatgattaggcaaccaaattagagattaaaaagaattgcatgaaaatgtcatctctagattaaaggattatatgtgctttctgttttttatgttctttgtacttttctgttttttccaggttttctataatgagcagttataacttttataattagagaaaacccattttggtttttttttagctagttgtatcgacgtctgtagcataaatccactttgaggtgttcactatgatcctttgaaatttttataataaaagtctatgctaaaagtttttattggccacttttttaatctttaaagattctattgactgctagttttcatctctcactgtaacctcatctcccacctacccgtatcagaatcactatcagagatccgtattaagcgtgtcaagctctgacaaaacattaacatcagctttatcactaaaacctctaagatacccgcactcacgtgcactcacacacactcctcaaagccagtgatctctaccctggaggaataatctcttgggcagtttggcatccacctaaaagtactgtggccaggccttatctttagagggtggttgaaatgtcatatgagaccatcaaaaggccattttataaatcttgctttgcctcattttcaaaggctgactcgtcatcattggggaaactcgtattggtcagacatgacttttcttcacaaagctaagatgattactgttcttacaggtcctcatctccattgcttaaccttgttaaactgttgaaaaggataattaactatcattggatttctgaatgtgtttcatttttagcaatcagaaacttggagctacaactatttaatttttagtgagtgatgtcatactgttaacatgtttaaatatctagcttccctgtctgttaagttatttacacttaggaaagctcagcatggactgtttagctgctgaatatgcaaaaatacttttatatttttcagtactcaagaaaaatggggttatcccagagccatccaagctaccttatataaaagcagcaaatgagaacccccaccatgatataaggaagggccgtgcctcatggaaaagcaacaggtggcctcaagaaaataaagaaacacaaaaagaaatgaagaacaagaatagaaactgggagaagcacaggaaggctgacagacatcgtgaagtggatgaggattttcccaggggccccaaaacctactcttctcctggcagttttaaaacccagaagccttctaagccctttcaccgttcatcacattaccacacgtcaagagaagacaagtctcccaaggaaggcaagaggggcaagcagaagaaaaaggagaggtgctgggaagatgatgacaatgataacttatttcttattaagcagagaaaaaaaaagtcttaagccgtcaggcagcctctgatgtggcttttcattgttcatttggcctttgtgtctataaccttctggcactgtgtttattatctatgattaaataaagtgagtttttggttttgtttttttaatttcagccattcctagagttactgaatatccatggagatctcaattctctgtgtccaacaggatattaggtaagaaagtacaaagataaacctggacttctcctattccaatatgtcatctttactcagaatcctagggataggtagaagaattcatcttttcaagaaagtgttttaaaaatactttgggaaaaaaactgcatcaaaggtaatttatcctcaaattaaatccttgcaggaagagaaattaacactaagaaaaagtcatcaatatttttcaactttttttttttttttttttactttggaaaggacaataactataaacctatatccagattttctttctgctgaagctgttgtcagaatcttcctttggacaaaacatcactagctgactataaaaacaaaagtgtcatcattgaagccctgaagaggcagggaattgagcttcagcaaaatacaggaaaagaactatccagtataaatgtcagaagacagatttcctaaacaagtaaaagagacatcaaaaattttaacataatcacaatgaaatcattttttaccacttttacagcggtgtttcaagcggactgtcactcagatctgcagagatgaatattactcaaaaaatttttttgttctcttgcatttttttcaactaccgcaaagctatacagatttttttgtacttgtggatcttttgtacttctcataacctaatgtcagactaagaaaaataaaatatctgagagtaaatacatgtgtttattatgtaaaaagacaatgagagtttgagtgacaaagagcatagttaatgtttattttgtttgtttgtttgtttgttgtagagacaaggtctcactgtgttgtctaggcaggtctcaaactcctgagctcaagtgatcctctttccttggcctcccaaagtgctgggattacaggcatgagccatcactcccggccttggcatagttgtgttgggcaggtggataaagttataaaatccctgtagactggagtcaaaaatgccatttttgcccaagtgcaagctctctgccagaataaaatggtatgaaatcaattaaataggacaattttataatgtcaggttcttaaatttgtattttactctttgggaagtatgcagattcctgtatttctggcagaatcatctctcatctttctgagaggaaggaagaattctgtcctctcaaatcagtgctagtgcaaattgtaggatcacagagtttagtctaccactttccctgttgctgcatagatttcagctaactttattatatgttgatgcatagcttcctaatagctagagttgttttcaccctaaagtaagcaaccagggttttttttttaacaacttgctaaatgtggcagccataaaaaaagtttcatggaagtggaaaaccttgagataattggcattattctccagtaggacttgaggcaaacatggcttattactcatatggtataacaagtaccccttctgatcctaaggcatctcctttcagggcagaaataggattgacgttctttaggttctttcgtacatagcagattgtttggagaaggagagaaaggaagcacttttttttctgtttgtctctgcacattatcttattttttcccaaaacttacaaacattttgttctagggtataatttacctattgggtccatgtatttacatgcagataggaaaggatgctgagctacttcacctgtgggcatgaagatacagtcttcatttcctggtaagagaagaacagaaacatggaggagtctttgcttcatttcctcttcatttcccttgcccccagctgttacaccaaatgttcagttaaggtgaatcagtcagtcagtttattaacatacagactcttcatacaacaatggggagtttaaaatatgtatagattcaaccattaattaaataagactttacatggataaatacaagagaagaaaagcaaatgtccaaaacagtaaagatctgtatagttggtaggattaagaagattctaaacatcttacctctggcccaactttgatttgaagcagcttgagtggctcctatcttgggttctaccttggtttgtgtttggccttctcaaaacagagcaaggggaaccagtctcccattttctccatggaaagtcttgctttcatggaccttgctatttgcagtacttattagtagctctttatttttctgttatacaaagattatgtaatcattttaagggggaaaaatgttaaaaacaagtcatatgtgattctttcacacaaaaatgtagttaaaattattagtgtctattttttcagacttttctatacctatgtatacattgttttgtaacctgtttttcacttactttgggaacaaatacatgtctgcacttttgcatgatgttctattatatggctgtgccatgatttaatcagctccctgtcgagcattttgtttccaatttttattatttttgaaaaattcttctacataatatcttctccatttattcaattgtgataaaatggaatttagggtcagagagcatgcatatatttcataaaagttttaatacatgatgccaaattatattcccaagtcagattcttccccaatcatttatatgtccctggcagtttgtgagtattcatctccccattcccacaatcacatggaatattgccattcccttgtctctttgccactctgatgggcagcaaagaaacattattcattagtgctgcagtgaaaagattgatgtgggtttgtctgtgtaaggagagacaggattagcaatatagggaaaatctgtttttaaaagatgtggagagaagcttctcataggaaacaactgaaaattcttctgccaacaaaaaattacatacaaaataagggagcctttcatttgtttatagctgtcctgatcccctggtcttatgcttcgctttctcaacaaaaggaggatgctgctggcatctaataagtagaagccagagatgttgctaaatatcctacaatgcacagactagcttcccacaatgaatctggcccaaaatgtcaatagcgctgaggttcagaaaccctagttgaaaccccagctatttctcaaatggaattctgttcactcgagagagagttcacgttgccttccacatctaacaggatgtgcccttgtcttacaaggctttgcatttcatcatattgccagtgtttgagagactggttggacatggccattcatgtgaaataaggaacactagttccatggcatgaaggtctacagtctggaccactttgtggaggatctgggccactggagactcagccagctgagggaaattaatagtttaggaatcatggaaacaaacactagagtgccaggctatggcttgagccctggcaagaaaaatatagaactgtggtgtgagaacaaagggattcagctagtgaggggaggaaagagttggagactaatctgatgggacacttaattgggtcagaatgtcattaggctgtaggaaggaaccctcaccaggatccaaatccaacataggcccttagatctcacagttggactttccatttcaaagaagcaccaatgttttggtgatttattacacattgccatgcagtgaatcacaggatgaagctgattggtgtgtgatttgagccaaaagtttttctgttcgtttaatatatgttactttttttttttttttttttttttgagatggagtctcactctgtcacccaggctggagtgcaatggcatggtctcagctcactgcaactccacctcccaagttcaagcaattcttctgcctcagcctcccaagtaactgggactacagggacgtgccaccacgcccagccaatttttctatttttagtacagacggcatttcactatgttggccaggctggtctagaactcctgacctcgtgatccacccacctcggcctcccaaagtgctgaggattacaggcgtgagccaccgtgcccggcctaagttacctcttaaaatgatttcctgggaaatgattccatgaaaacccagtaaaggagtggggagggaagtgagacagggaaaagaagagaaggaagccaagctggatgcttatcaagtcatgtctcataaagaggaactttcagactcacagggaacgctagaaagagtgtaggccacacctcaaagttgccctagtaaggggcaatggagctgtagtgtgtgtatctttttttttttttaattagtcattgtttaagccaggtaaattgggtttaggcagccccctgacggatggagatatgaatgaaacaccaatgtcattcgctacagccataatctcagaacagttcttcttacaaaaagatacttggggctgggcatggtggctcacgcctgtaatcccaacatttgggaggctgaggcaggagaatacttgagctcaagagttggacaccagtctggcaacacagcaagatctcatcgctactaaaagtgaaaaaaaaaaaaaaaaaaaaaaaaaagattggccaggcatggtggctcacccctgtaattccagcactttgggaggccaagatgggaagatttgcttgagtccaggagtttgagactagcctgtcaaattagtgagatcttgtctctccaaaaactaaaattagccgnnnnnnnnnnnnnnnnnnnnnnnnnnnnnnnnnnnnnnnnnnnnnnnnnnnnnnnnnnnnnnnnnnnnnnnnnnnnnnnnnnnnnnnnnnnnnnnnnnnnnnnnnnnnnnnnnnnnnnnnnnnnnnnnnnnnnnnnnnnnnnnnnnnnnnnnnnnnnnnnnnnnnnnnnnnnnnnnnnnnnnnnnnnnnnnnnnnnnnnnnnnnnnnnnnnnnnnnnnnnnnnnnnnnnnnnnnnnnnnnnnnnnnnnnnnnnnnnnnnnnnnnnnnnnnnnnnnnnnnnnnnnnnnnnnnnnnnnnnnnnnnnnnnnnnnnnnnnnnnnnnnnnnnnnnnnnnnnnnnnnnnnnnnnnnnnnnnnnnnnnnnnnnnnnnnnnnnnnnnnnnnnnnnnnnnnnnnnnnnnnnnnnnnnnnnnnnnnnnnnnnnnnnnnnnnnnnnnnnnnnnnnnnnnnnnnnnnnnnnnnnnnnnnnnnnnnnnnnnnnnnnnnnnnnnnnnnnnnnnnnnnnnnnnnnnnnnnnnnnnnnnnnnnnnnnnnnnnnnnnnnnnnnnnnnnnnnnnnnnnnnnnnnnnnnnnnnnnnnnnnnnnnnnnnnnnnnnnnnnnnnnnnnnnnnnnnnnnnnnnnnnnnnnnnnnnnnnnnnnnnnnnnnnnnnnnnnnnnnnnnnnnnnnnnnnnnnnnnnnnnnnnnnnnnnnnnnnnnnnnnnnnnnnnnnnnnnnnnnnnnnnnnnnnnnnnnnnnnnnnnnnnnnnnnnnnnnnnnnnnnnnnnnnnnnnnnnnnnnnnnnnnnnnnnnnnnnnnnnnnnnnnnnnnnnnnnnnnnnnnnnnnnnnnnnnnnnnnnnnnnnnnnnnnnnnnnnnnnnnnnnnnnnnnnnnnnnnnnnnnnnnnnnnnnnnnnnnnnnnnnnnnnnnnnnnnnnnnnnnnnnnnnnnnnnnnnnnnnnnnnnnnnnnnnnnnnnnnnnnnnnnnnnnnnnnnnnnnnnnnnnnnnnnnnnnnnnnnnnnnnnnnnnnnnnnncctctcatgcttgcgtggaaactacctgacgcaaaaaagtccatagcctgtgcttgctgtggagaaatctcaagcctcaagggctaacaagcaagagacaaacacgaaaaccagtattttgtcttagaggtgaggagtgcagtgagagatacgggtatgatggtaacaccaaagaagcatgattggtcctgctacagagaggggagactgggcaggacttcccgatgggtcattataacagaagaaaagtgttgcagcttaacaaaaggggaggagcatgaaccatgtgtgtgaggcgtggagctgtgaaacagcaaggatgcactctgtattcgttgcctggagctactgtcccaaaataccacaaagtggtggcctgaaacaacagaaatttgttctcttacagttctggaggccagaagttcaaaatcaaggtgtcagcagagttggtttcttcttgttgtgctgagataattccttccatgtctctcctaccttttggtgggcctgagcaatccttggcattccttggcttgtataagtccagtctctgcctctgtcttcacatagggttctcttctgtgtctccttgtgtcttggctttctggcccacactaaaattatctagggcaattttatcccaagatccttaattactctctgaagaccctatttccaaataaggtcacattcacaggtgtcagggattaagatttggacatatcttttggaggaacattattcaacccactcctacctcaaaaactataagaattgctttgcctagttgcacttttgtttttattccaagcttttatcgggggattcggtcttccatatgttctttttttcctctgtccgactttccattctgatttataccttcctcaagacttttaaattagtgataatttctcatcttacatatgtccttatacttcagtttgtgaaatgtgtgttggacaaaagcatgaactggaaaacacctatcaggtttagtggcagacctctgccaaaggagttccaggatagcagtgagccaagaaactagattgcagtgcattgaggagggaatgagcagctatgaagaggagggtgtctgtctctttaaacccttgcctgtgaaaggctgacagtacagaacactggctggagtgaggctgacattgacaggaagctgccgaaagagagagggatgctggagaaataaaactcaacttatggcactcacatcaaggaagtgggaagggatggatccagagggacaagccaatggagacgggcgagcagggtaaggagatggtatcctcctccttgatggagaagctttttccaagaacaatggaataggtgtgcggggcatagggagacttggaaggacccccaaagggaatagaaaaggagagcctcttggccactaggatggtgttagggagccaggggaggttggagcctctctggaagtgccctgtggctgcccaagtgaggggagacaatgagtacacatgtgaagaaaggatttcctgtgggaaaaccagattcatgtccttcctgcccagagttatgttcttcaaggagttcagtcctgcacacactagtgaataatccttataaatgtccacatatgccccccaagtacgtctaccaaacatagctcagtcttacataaaacagtgtacacatgttactaatcagatgctctcataaggaatcatgccattttgagagggcccgaagctctaacaacttgagacctcctatctgggccgtagctttctcattataaagttggaagtggtaggattagcctggatgggttctcattacctcccaactctggtattctgtggttctaatggtagttggtagcccttggcatcactcaagaataatccttgatggccagtgtgcagcactgcctccctgtgggcacccctcagtctaacagccacacagcaagtccccagcctccccagctctgccccattgtatccaggtaagcaaggtgagcccttgctgtaagcatcaccctggttgccttcccatgacccagcttctgagaatctccttgctgtgtgcatagccctcttcacccatctctccagctcttcgtgttgggctccgcccttcttctggtagtcttctgattccatgtggccccatgagccactctctgcccaaccagtcatgtagatgtggcttgtgcacagtctagagactatataagcaggccatgatggttggttgtgatcatttttaggtatcatgctcttgataatgaacatatccctcgatttgatactgttttgatgggaaaatcagttttatcccctcaccatccctttgtgagcatacacctagccttaagtgcttagaagtggctgttctggccaggcgcagtggctcacgcctgtaatcccaacactttgggaggccgaggcaggaggatcacttgagcccaggagttcaagaccagccggggcaacatagggagaccttgtctctacaaaaaaaaattaaaataaattagaaataagaaataaggccaggcacggtggctcatgcctatgatcccaacactgggaggctgaggtgggaggattacttgagctcaagaatttgagaccagcctgggcaacatggtgagaccccatctctacaaaaaaatttaaaaaattagccaggtgtggttttgcacacctatattcccaactacttgggaggccgagatgggaggatttcctgagcccctgcagtgagctatgattgcaccactgcactccagcctgggtgacagtgagacctggtctcaaaaaaaaaaaaaaaaaaaattctgtggcaccctcctggagacgggtctgtttttagcttccacaccattaatagtttaatctcttaagtcacaagtaaggaaagggagtcacatacgacagcaaaagcccgcagttcccagcaaaagccagaggcaaatgagaacccacgaagaacccagagttcacaccacaacctgtgcgctggtcggggtgacccatgctggacctccacagaacatggggccattcagctaactcagtaaacacttgctgagcatctgacctgagccaggtcctgtgctgacatctaggactttctacccttaaggagctgtggctttttctctagttggtgagacagatggaaaccccttcagttccactacagatatttttgaaatacctgttatgtgccaggcactttctgaactcgaggtaccgcagtgaaccagacaggtgttatctatgccctcctggggcttctaagccttcagagaagatagacactgtacaggtgagttaagtgctccaaagagtatggctcctggtgtgtaagggttcaaatatctgttgatagaaaggataaaggccatgtcatctttattctttctcacagggcccagcatggggcctaacacagttagacttaagtaaatggattcaactcactggtccccagcactgtcctctgcatgatgttaccgaaatggagacaaccaaaactaactggacaacttagtcagctggactggaagactgcacttccaaatggaaaggtttgcagtggctcctttggaaatgtggcttcaagggtggagaggggggaagtgaatgtggggctcgcattataggctttgggggttacagagcttgctggtgttgcttgcccttacgctctgtcaaatctcaggcagatgaaacaagatgtaagctttctaaattatcaatagagggcctgtcattcaaatggaagataagaccagagaaaataaaagtccaccaaaataatgccagagaaaaacaaccctggtctttcaaaaaaccatagatacaatttcttagagaagtttaggccaggtacagtggctcacacctgttatcccagcactttgggaggccaaggcaggtggatcacttgagcccaggagtttgagaccagcctggccaacatgtctctaccaaaaaaaaaaaaaaaaattagcctgttgtagtggcacacacctgtagtctcagccactcaggaggctaaagcaggaggatcgtttgagcttgggaggcagaggttgcagtgagccaggatcacgccacttgactgcagcctgggcaccagaatgagaacctgtctcaaaataaaataaaataaaataaaaaaggtttagtccaggaggcctatttgtgttttgaatcaaaattcactgctttagaaagaaactgcatggatttcagtgttctcgtctgtcatactctctcagacttctttcctaccctcagaaagcttccattttaagataggaaagagaagccctgaaacaagaccagtgtaacttaagttacaaagaggcattcatgtgggtctatgtgtgtggagagaggtcacttctagtgtcactggtggtggagacccaggaaaacttcacagaggagatggcattggaattagctcttgaagcataaagaagactaataattaggataagaggaaatgcctctcaggaggaagacaaatataggcaacagcctggatgtaggataacctaggacacacttaagtaagaaggtctagtataatttcccttgactctagttcacatgagggtaatagagggaggtaaatgaaccagatcactgaagtctgaatttcaagctaaagagtgtggtttcattttcctcatctataaaatgaagataatatctctgtctcttgcaagaattaaagtgaggccaggcacagtgcatagccctcttcacccatctctccagctcttcgtgttgggctcagcccttcttctggtagtcttctggttccagataatggctatgattccggcactttgggatgctaaggtgggagaatcacctgagccaggagtttgagacgagtctgggcaacatggcaagaccccaatctctacaaaaattctaaaacttagctgggagtggtggcgtgcacctgtggccctagctgcttaggaggctgaggtgggaggatcgcttgagcccaggagaacaaggctgtggt

SEQ ID NO: 321 - DNA, 2946 bp, Homo sapiens
tgtgttgtccccggaagtgccttccctcccgggtctgcgcggacgcggcctccttacctcatttgtcctcgcccctccccgtccctctacgcgttttggttcccggttggtgcttcctgttcgcagctgcggcagtgagtatgtgtgtgacggacccccgccgcccgcggctcgggacccctgcctaccctccttcttgcccgccgggctgtggaactagcgcgtgccccctcgccggcctcgacgtctcccgtccgcccctcactcgtggcagggcgcagctcctggtccgtcacctgcgcgccgccccacgcggccgggctgcgggtctagggggtccgcgtctccctggctttccaagggctaatgccgtgattctagagcggctgggcgtctagggcctcgcttcaaggttactgactttttatgatgtttggtggctatgagactatagaagcatacgaagatgatctttatcgagatgagtcatctagtgaactgagtgttgatagtgaggtggaatttcaactctatagccaaattcattatgcccaagatcttgatgatgtcatcagggaggaagagcatgaagaaaagaactctgggaattcggaatcttcgagtagtaaaccaaatcagaagaagctaatcgtcctttcagatagtgaggtcatccagctgtcagatgggtcagaggtcatcactttgtctgatgaagacagtatttatagatgtaaaggaaagaatgttagagttcaagcacaagaaaatgcccatggtctttcttcttctcttcaatctaatgagctggttgataagaaatgcaagagtgatattgagaagcctaaatctgaagagagatcaggtgtaatccgagaggtcatgattatagaggtcagttcaagtgaagaggaagagagcaccatttcagaaggtgataatgtggaaagctggatgctactgggatgtgaagtagatgataaagatgatgatatccttctcaaccttgtgggatgtgaaaactctgttactgaaggagaagatggtataaactggtccatcagtgacaaagacattgaggcccagatagctaataaccgaacacctggaagatggacccagcggtactattcagccaacaaaaacattatctgtagaaattgtgacaaacgtggtcatttatcaaaaaactgccccttaccacgaaaagttcgtcgctgcttcctgtgctccaggagaggacatctcctgtattcctgtccagcccccctttgcgaatactgtcctgtgcctaagatgttggaccactcatgtcttttcagacattcctgggataaacagtgtgaccgatgtcatatgctaggccactatacagatgcttgcacagaaatctggaggcagtatcacctaacgaccaaacctggaccacccaaaaagccgaagaccccttcaagaccatcagccttagcatattgctatcactgcgcgcaaaaaggccattatggacacgaatgtccagaaagagaagtgtatgacccgtctccagtatctccattcatctgctactatgatgacaaatatgaaattcaggagagagaaaagagactaaaacaaaaaataaaagtactcaagaaaaatggggttatcccagagccatccaagctaccttatataaaagcagcaaatgagaacccccaccatgatataaggaagggccgtgcctcatggaaaagcaacaggtggcctcaagaaaataaagaaacacaaaaagaaatgaagaacaagaatagaaactgggagaagcacaggaaggctgacagacatcgtgaagtggatgaggattttcccaggggccccaaaacctactcttctcctggcagttttaaaacccagaagccttctaagccctttcaccgttcatcacattaccacacgtcaagagaagacaagtctcccaaggaaggcaagaggggcaagcagaagaaaaaggagaggtgctgggaagatgatgacaatgataacttatttcttattaagcagagaaaaaaaaagtcttaagccgtcaggcagcctctgatgtggcttttcattgttcatttggcctttgtgtctataaccttctggcactgtgtttattatctatgattaaataaagtgagtttttggttttgtttttttaatttcagccattcctagagttactgaatatccatggagatctcaattctctgtgtccaacaggatattaggtaagaaagtacaaagataaacctggacttctcctattccaatatgtcatctttactcagaatcctagggataggtagaagaattcatcttttcaagaaagtgttttaaaaatactttgggaaaaaaactgcatcaaaggtaatttatcctcaaattaaatccttgcaggaagagaaattaacactaagaaaaagtcatcaatatttttcaactttttttttttttttttttactttggaaaggacaataactataaacctatatccagattttctttctgctgaagctgttgtcagaatcttcctttggacaaaacatcactagctgactataaaaacaaaagtgtcatcattgaagccctgaagaggcagggaattgagcttcagcaaaatacaggaaaagaactatccagtataaatgtcagaagacagatttcctaaacaagtaaaagagacatcaaaaattttaacataatcacaatgaaatcattttttaccacttttacagcggtgtttcaagcggactgtcactcagatctgcagagatgaatattactcaaaaaatttttttgttctcttgcatttttttcaactaccgcaaagctatacagatttttttgtacttgtggatcttttgtacttctcataacctaatgtcagactaagaaaaataaaatatctgagagtaaatacatgt

SEQ ID NO: 322 - protein, 537 aa, Homo sapiens
MMFGGYETIEAYEDDLYRDESSSELSVDSEVEFQKQIHYAQDLDDVIREEEHEEKNSGNSESSSSKPNQKKLIVLSDSEVIQLSDGSEVITLSDEDSIYRCKGKNVRVQAQENAHGLSSSLQSNELVDKKCKSDIEKPKSEERSGVIREVMIIEVSSSEEEESTISEGDNVESWMLLGCEVDDKDDDILLNLVGCENSVTEGEDGINWSISDKDIEAQIANNRTPGRWTQRYYSANKNIICRNCDKRGHLSKNCPLPRKVRRCFLCSRRGHLKCPAPLCEYCPVPKMLDHSCLFRHSWDKQCDRCHMLGHYTDACTEIWRQYHLTTKPGPPKKPKTPSRPSAYCYHCAQKGHYGHECPEREVYDPSPVSPFICYYDDKYEIQEREKRLKQKIKVLKKNGVIPEPSKLPYIKAANENPHHDIRKGRASWKSNRWPQENKETQKEMKNKNRNWEKHRKADRHREVDEDFPRGPKTYSSPGSFKTQKPSKPFHRSSHYHTSREDKSPKEGKRGKQKKKERCWEDDDNDNLFLIKQRKKKS

SEQ ID NO: 323 - DNA, 103464 bp, Mus musculus
  misc_feature (1)...(103464): n = A,T,C or G
aaccttataaacaaaattccaaactttgactcaaactaacttctttctgaagccaatgtagttttttggttttgttttgttttgttttgttttctctctctcttttcagtcaaagacctcaccttcccatgcctattactttatgtgctttttacccgtttgctcctcaattcttttcaggtgtctatctcagtgatagacttaactttgtgagtttgttttaaaaggctttagttttctttcttatcagcaacaccatatatcccttctccctgaagagtactccattttctttgtattcctacctacttcccttcccttccctcttcccttcccttcccttcccttcccttccctcttcccttcccttccctcttcccttcccttcccttccctttcctctttcctttcnnnnnnnnnnnnnnnnnnnnccttcctcccttcccttcccttcccttcccttcccttcccttcccttcccttcccttcccttctcttctctctcttccttcctctctctctctctctctctctctctctctctctctctctctctctctctcttccttccttcctttctttcttcatccattcttgcactatacacactatataattatgatatataatataatataattaatataatgtgtgtgtgtttgcatgcaggtgccatggtgtatgtcttgctacagaggattattactgggaatcaattttctcttttaaccccgtgaattctggatatcaaactagggtcacaaggcttgatagtaagtgccttttctttctgcaccatcttactggccaccaccccccttttctgtttaactcctccctttcactccctagctgtaatttaaatgaatttaaattacagcaggctataggacataacaacaacaaagcaactcactggttcaagggaggttcttccctactgggtgaacaggtatatgaattatctctagaagacccctggcacataaactagtgtcttttaggcttgttctttcctaccgagctaagtgtaggctactggtgctctgataagtgattatgtagccacacctgccattttaattgtgtggtacaattcaatattatgtaaagtaagaactacaggggtgaaaaaaatagctgtttctatagacatttagatgaattctttccaaagctccacagtacctggtaacgtgtagaaaatcacagtcaaattaggtgaaatataagagcacaaaacccatgatgcttgcaatctggcttcatttaaccctgaaatcatcttaccaaggactgctcagggaggctgcatggagaatttgagagtgacacaccatgtctgagaaggccaagctgggtttcacctaatgatgcattcagacctgcaagcaaaggcttgacctcacattaaaggaaaaatgtaatgaacatacacatgtatattttaaggtgtctaagtgtcacttttatgatctttggctttcactggcactaattaaccaactgtttatgctaattgtcatgcctacgaagctgacttccttaggagtcaggattacaccacgaggccacttctgctcctgttctctttctttcaggccattcaatacagcattcaagatgtaagcctcacaccagcacattccttgcaacaagagtcccacttcattttgccattacccccaccaccttccttctgtcggcctccaccacatgctacacacagtagttgttttttaaaatgttgagatgtaatatccactgaaaatgtcagttcctgcatcatagcctaagaattcgaaggccagcttttatgaatgtaagctgcatgtaaatccctgcactgtgaaaccagcttcataagtgaagggatgatgctcagtttgggagtagcattttccttttaactggcgagctggagcttaattttaaaaatcaaatatggatttccaagatcatctagatgtggatagatgccactatagcttttcattcaatataatatctgatgatttgattccatcttgatccctctaggtttttggtgaaccatgcagaacacacaaaaatattcttttcattttataaactcaggaactaattgtcttaattgttactgacatacttgtgatgtggcagataatatgtgactaaatgaggcttgaacctggcactgttcatctccggccacatttgaaatgactccaagcacatttacaactggcaaggattgttttcagggactccacagaaacggtcaaaccccatgatacacaatcattgcttgtctgttctcagattgttcatacgcatagttgtacaggttagtttttttttttcttttttaaacacatttttccacagtgttctttgtatgtggttgggttaggtgagttgtatgcatttgagtttcataatattcacatagatgtcaggggacatccttaagtgttggtcatccctcttccccatttttgagactgtcattttgtacctacccatgccaggttaagcctgtgagcttctgggaaaatctcccctctccatattccaatcatgcagaaatcagagatgggtgctactaactctagtgactttacataggtcctgggcatcagaactcggactcagggtctacatgaccagttctttacccattgagtggtcttgccctagttttctgttgaattgacttatggagacaaattagccatttcttcctttgccctctttttttttttttttggtatttttttcgttctgtttttttgtttgtttgtttttgttgttgttttcttttttattggatattttctttatctacatttcaaatgttaccccctttcctggtttcatccccagaagctccctattccatctgcctccccctgcttctatgaggatgttcctatatccacccacccaatcccgcctccacaccctggcatttccatacactggggcatcaagtcacaggaccaagggtctttcctcccattgatgcctgacaaggccatcctctgctacatattcagctggaggcatgggttcctccatgtgtactctttggttggtggtttagtccctgtggctctagggggtctggtttgttgatacttttcttcctatggggtttcaaaccctttcagctccttcagtcctttctctaattcttccactggggactctgggcttagtccaatggttggctgcaagcatctgcctctgtatttgtcaggctctagcagagcctcttaggagacagccatatcaggctcctgtcagcatgcacttcttggcatccacaatagtgtctgggtttgatgaatatatagggaatggattcccaggtgggacagtctctggatggcctttccttcagtctctgatccacactttgtctctgtatttactaccatgagtattttgtcccctcttctaagatggaccaaagcattcatactttggtcttccttcttgagcttcctgtggtctgcgaattttatcttgggtattctgagtatttgggctaatatccacttatcagtgagtgcataccatgtgtgttattttgtgattgggtaaccttactcatggtgatattttctttttttaattagatattttctttatttacatttcaaatgttctccccttttctagtttcctctccaaaatcccctatcccctcaccctcaccctacccactcccaaacctacccactcccacttcctgtccctggcattcccctatattggggcatagagtcttcacaagaccaagggactctcctcccattgatggctgactaggccatcctctgctacatatacagctagagacaggagtcccaccatgtgttttctttgattaatggtttaatcctagggagctctgggggtactggttagttcatattgttgttcctcctacagggcggcagtcccctgcagctacatgggtactttctctagctccttcattgggtaccctatgctcagtccaatggatgactgtgagcatccacttctgttttcaccaagcactggcagatcctcacaggagacagctatattaggctcctgtcagaaaaatcttgttggcatctgcaatagtgtctgggtttggtggttgttcatgggatggatccccagtggggcagtctctggatggtcattccttcagtctctgctccagactttgtccctgtaactccttccatgggtattttgttctcccttctaagaaggatcaaagtatccacatgttggccttccttcttcttgagttccatgtggtttgaaaattgtatcttgggtattctgagtttctgggctaatatccacttatcagtgagtgcgtatcatgtgtgttcttttgtgattgtgttacctcactcagtatgatatcctccagagccatccatttgcctaagaattttttaaattcattgttcttaatagctgagtagtactccattgtgtaaatgtaccacattttctgtatccattcctgtggattctttccagcttctggctattataaataaggctgctattaacatagtggaacatgtgtcattattacaagttggagcatcttctgggtttatgcacaggagtggcattgttggatcttccagtagtactatccaattttctgaggaaaagccaaagtgatttccacagtggttatgcctgcttgcaatcttgcaatcccaccagcattggaggagtgtttctctttctccacatcctcgccagcatctgctgtcacctgaatttttgatcttagccattctgactggtatgaggtggaattgtttgttttttcaagccagggtttctcagtgaaaccttgaactcacaaaaataatctgcctctgcctcctgggattaaagatatgtgcctccatgctagacttcctttgctttcttttaagtcttcaaagagttggaaattacaaaggtagacttttattgacagaccctagaaatgcaccaagacatgctgagtcaggtaaactatgtggttatactcttattttcatacctgcccttttgctttattaatctactaatagctactgccaggtcattaacaaaaccttgagagaaagcagtttttttatttaacatatttcttacagaggtttcaaaataacagaatgtccttactcattaaacaggtcttaaacgtgacaagagatggggtgaatgtactaactaggtgtcaacaaagaggtggagttggggaaaaaagaaagcaatgacaatgagacatggggtgaaggctctttaacagatagaggagatctatttctgtcactgttaaatgacaccattcatactgtgagttactgacacttaaaagccattttacatttattgattgagctaccagttatttagttactgttcactagccttcatcttccagtgataaaaccctttagccaaaagcaactttggagaagggctaatctttttaggtcatagcctatcgctgagggaagtcagggaaagagcctaaagcaaaagtcatggtgtgtgtgtgtgtgtgtgcgctcgcgcgtttcttgttggcttgtccattggttcatgttcagctagctttcttatgcaggacaatatctgtatggatgttatattccacagtgggttacactatcctacataaattaccaagcaatacagacaatcctccacaaagctttccacaggtcaatttctactaggctttcctccaatgattctatgctgtgtcgagtttacaattaaattaggacatttacaggctagaaattaagcccccaagttcccacatgcttgacaagtgttctaacacaagcctgcatctgagatcacaattttaaagtagaatactccgtactaattttgggtgttcgtttctccgacaagatattaaatcctattaaattttatttgtagtgagtatatttcagtaaaagttttcacacagtggagattatttattttatatttctaggcattagattgtttgaaattatgtatcaactgcctccttcttaacctctcctctttgggatataagcatagatgaacctcattcatttaagctggagaacatgctaaagttctcaaatactgttttaatgcttctcttttaaatgttttaatgtagaaggttctctttctctttctttctttnnnnnnnnnnnnnnnnnnnnnnnnnnnnnnnnnnnnnnnnnnnnnnnnnnnnnnnnnnnnnnnnnnnnncttccctttctttttttttaatttttattttttttagtgagtacattgtacctgtcttcagacacccccagatcctattatcgatggttgtgagcaacaatgtggttgctaggaattgaactcagggacctttggaagagcagtcattactcttaaccactgagccatctctccagcccatgtgtaaggttctgattgtcttcttcttgatttattaacttagaaagagaataccaaataggggaaattcctcagtaatttcaatttcgaaattatatgcttccgttgtaaatatatatgatgtatagatatttacttgcaaagtacttttaaacaataaggaagcaaaaataaaatacaactaacaatagaccttctaagaccagtgaaagtagctcatatattataaactctacccaaaggcatggctatgtaaatttaatatgtagtctctggatgcctcctatgttggctgctcaaaagctctatacttgtatagtcaagaatctagaggcattggtctccttgaaaatgtaatatcataaagacactgccattagtgattttatgtacttctgcaaacccttcttgaacttgaaataatgagtaagttcaggtaataattttcttgtctttcaagttttatgactaaaatattgagttgtgttttatgacctttattatattctgtagaatcagatgactgcttcaggcaaagaagaagttaagaaacaggaatgaaatggttgctatcaaatcaaaggtttaaagtaggaattgtgaattcaggaagcacatacattttccagaggttggaaatacatcagaatacctgtgtattttcttttttcttttttttttttgtatactttttattaggtattttcctcatttaaatttccaatgctatcccaaaagtcccccataccctcccacccactcccctacccacccacacccactttttggccctggcgtcccctgtactgaggcatataaagtttgcaagtccaatgagcctctctttccagtgatggccgactaggccatcttttgatacatatgcagctagagtcaagagctccggggtactggttagttcataatattgttccacctatagggttgcagatccctttagctccttgggtactttctctagctcctccattgggagccctgtgatccatccaaagctgactgtgagcatccacttctgtgtttgctaggccctggcatagtctcacaagagacagctatatctgggtcctttcagcaaaatcttgctagtatatgcaatggtgtcagcgtttggaagctgattatcggatggaaccttggatatggcaggctctagatggtccaaccttttgacacagctccaaactttgtctctgtaactccttccatggatgttttgttcccaattctaagaaggggcaaagtgtccacactttggtcttcgttcttcttgagtttcatgcgtttagcaaattgtatcttatatcttgggaattttaagtttctgggctaatatccacttatcagtgagtatatattgtgtgagttcctttgtgattgggttacctcactcaggatgataccctccaggtccatccatttgcctgtgtattttctgagtggtctttccatcctccctgttctgtacatttcctgtgcgtgcgtgcacgcatgtgtgtgagtgtgtgtgtgtacccagaataatcacatattcaagtatagactaagattattgctgaaaaaattcatttccttagagaatttttacagatatcttgccgtttatgggcatatttagttctgaggaattctaaagaaatcccactaatgtctcccaattgctatgagtaaaacggaaagaggaaaccttaaatgatggtaaatcccacaagactggagactatgggagctacaccatcaccaggaagcagacttgagctgctttagaccattttccctttaaattaagcattctttcttttctccgagactgaggattgaactcagtgtctacagtgttctaggtaaatgttgcaacagtaaggcatcatccctagccctcgtttgacttttgatttgagacaaggtctctctcaattgcccattctgatcctggaatcctgttgcctcgatctccccggtatctctgattacaggttgtcctaccaggtctggcatagtttcacacttaggttacatgtttaaacggagtcatgatttgttttctacagaaggaaaaggtagaaaggataagattctgataaaattctcctttagtgaggaagtatctttttacaagacctagaagagactacaagtattatggtcatattggccaaatttagattctttgtttccaactcgtaaatcgaatgtcctggctaagattcagtgtaagagcatttggaaccaacataatgtgatttttattagctaagtgcatataccaccagtctcacttattttttacagtgagagaaatgccctggtctgcctgtgtggctcttgttaacctatgatttcaggactgacctaaaaacattcaacacaggaactgtcttgaaaatgaatctggtttaagcagatctccttcgtttaaagcactcattccccataattaattgtgatgactaaaacacgggcaggatatcacaaaaaaatatgtagaatgcaatatgcagaatgtaaaagtgccactgcacaactgatacttttcagaaataatttatttctcttagaattcaggtcaagaggagaaacaaatttatcatttatgcataacctcaattccacacacaccctgattatattgaagaaagaaatgcactgtggatttctttgaagtggtttggcgttattatgcctgtctaactttttgttaaacgtagtgggttttgctggccttgaaaatgtaatttaaaaatgtaactgatttttttttctgctaccattaagagaaatacacacagcaagatgaatgcatactcatttcagcctgtaagatttgtttttaaaattattccatttgcagccagaggaaacatgagatcatttctttccttctgccaacaaagtgctttccccaccccatgtagacagtcaagtgagcttcagggtcccagcttactttctaccatttttgcacatagcctagtgcctctaatgggacaagactcagtaggcagtccttgagagaatgtgagaagaacaaagtgttcataagctgaactcattatgtagggtaagaaatgagcagggctaagcagagtgcacccacggttgctttgcggttgttggtgtgcatataagcactgtactcttgctccacgtgcattccaagtgctgggacatacatgcacacacatgcgcaatgatcaccaagcctcaggccaggacaagtccctagccctcccaaccaggctcctccacccctccgcacccatccaggctccacgtgggcgcacccaggcgccaggcggccgcgcggcccacggagctcagagcctgcccagagctgagagggtaggcgcggcccggggcgggacggacaaagctggcgtccaatggagcccagcattagctccccgaaaggagggagcggtggcttgcgcgggcccaatgagcggggagcccgagtgggacttcctcccggaatcccgttggccatgatagcggggccgtgggtgacacgtaagtnnnnnnnnnnnnnnnnnnnnatcagtgacaccagcccaccacccccccttaacctgaccagaccaaccagtccccatctcttcatcaataccgagggaccgttcaaggggacgccgcctggagccaggtccctttgttgggcgcgcgtccccctaaccagtggtagcgacaaagtccagcagcgggagccggcgcgaggggcggggactgacggtggggacagcgaggccaaaaagtggggagtagggaaaaccaagccggctgcgcgcggggaccagtagcaagggcagcgggctctgaagtatgcaaagagactccacgcgggcccagccactcgcggaaatccgacatcgcagaagtttggtggctgctggccgggtggcgtcgatgacctggcgcccagccggccgcgggggctgagcggccgcctcttcctctctggtccggcttttgtgtctcgcgtcttctgctcatgccgtgtccagctacttctcgcggtggccgttgctgagctgtccgacgcagccgaggaccgaggacacgacggctcccgccgccgcagcgcggggcacaggagggactatgggaaacgggatgtgctcccgaaagcagaagcggatcttccagacgctgctgcttctcacggtggtcttcggcttcctctatggcgcgatgctctacttggaactgcagacgcagctgcgcaaagctgaggcagtggcgctcaagtaccagcagcaccaggactctctctctgcccagttgcaaggtacagttaaggggaagcgcaccgccaacttctctctgagctggtgctggtgctggaaaagtagcttggtggatagttagttggctttgcaggtaccactcattgaccttctggcgcatctgagggagcggccgcggggatgttggcttctgagcgtatgtgtgggagataatatcctgattttccagcttcctcccaggagttatctttgaaatccacagcaccagcgcacggtcctgcctggcgtttggtgggtacatacaacaccaagtcttttacccgaagcacttgtcaaaggcccagctgcaatctaggcaaacagcccttctgctacatctgccaatcctttcccaagaggcaagccttggtttgtagacataaagaattatgcagacattttctaacccgtgttctttttcaaggggggaaaaaagagactatatacactagtgactcatgaacggaacctgcaagcttgtgttgtgattagtgctcttgttattacgtttgttcatttagtagttaacttgagaaatgttgggagtgatggtaaagtccacaccaccacttgactgtaggttatcctacagatatttgcttttaaaaggcttgtctccctggagaaacctttatttagctgatctgtagaaccctgtgtgtgcatcttcaggaaggcacacgcgtgttttagagttagctgtgagaagtctaaaagaagaaacataaaatttccctttgccagccacagacgactcagcttgggcaaggtgttcgcagctcgtagcctttcattttaagaatcacactgagtttccacggtctagatgattcccgagtgagtgcatggaaacactttgtggttccattaaggtcatactcgttgtatgcatttttatgaatgatttggcctgtcttgctggtttgttttcaccactcatgaagctctctctctctccaatacaaagcaagtgagaaataaagtcctacctaaatgctgaccatccttgctgtgaatgcaaatatagcttattgaatcatcctgggcaaaaataagctgaagggggtatttctgacagtgggtgtgtgtacaaatataaaacagatcctttgctttgaccgagctatgcagagcattttctagtaagagacttaagatgggagaaatgatatgcaattatttgcttggtctgatttgtttgtcccaacttaaaagaaaagaaagtatttttagcatcttggtgctgcatggctccagccaatgaaaatatgtggctgggcttccttcagagggaaagcttgtttttgatagtttttatatttaaaagaaaaagtttaaagtatggaaatttacctatgagttgttggtatgagaacggtggatacttgcttatttatttagaaaatcatgccttccacatgagttttagtgtgtgtgtgtgtgtgtgtgtgtttgtgtgtgtgtgtgtgtgtgtggtgagatggccaatgtttgtttttcactctccaccttatttcttgagacagggtcacttgattcaagctttgatctcactgattcagctagactgtctggccagtgagctccaaggatattcggttttcaccccctacggcccagcacccagattccaggcacacaccactacacctgggttcttacactggtcctggggatccaaactgaggtagtcaaacttgcatagcaagcaagcacttgcctggctgagctgttgagccatagtgtactgtgcccctgaaatgttacttaactgttgccttggccttgcaacagttgcaatgattgtgtaggaagaattagttcacaagctggctaaagtttctgcttatttaaacacacacacgcgcacatacacacacacacacacacattcaggcttgcttttagcaacattaatgtccacgtctgtgtctctgtgctgtttaataaggaacagtttctgaaagcatgcagctcttgtttttccttccctaggacagatggtattttaccctgtgatgccacacacaccaccatcatagatgagctttcagagtgtctgatttcattcttttttttccccccattatttatttacttgtttgtttttgatgtgtatgtctacatgtgagtgttcatgagtgcagaactcgtagactaatgtcatctgtctcttcccatttgttctttctccacctttacattttgagatggcatcttccactgaacctgagccggttattgatttagctaggctggctggctttgggtatctgcgggtctctccgccacagccatagggttagagagaaaagtgtaggtctgcaggccgcactttactgcctgcaccatctcctgaaactctccctccctccctcctgtctctctgtccctctcacctttgtttaagccttgcttaggtaaatgagatagatctcttaacatgacttggataaaggtcagcgttaattttgagtggccttcttttaaaacatgactcttggaaaagttgaagtaacagtgtctgtgtcaagtggtacgcaggtgttaagagagcatagttaagctatcttcattactccagggtcctttgaatggaggttactctttttgtaaagtagtctcataattggagttggagaatgacatggaaaggatcagagaccaaatgaccttctccacaaaaattccatgacaatatcttctgcatctatttgtctatctatatagctatataccttatctatctatcaaatagctagctagctatcaactatctattatctatctatcaatcatctatcatctatcttctattaataatctatgtgtcatctatgtatctatcaataatctatatatctagctcccagcccagaaccttaaatataccaaagactagcgtggagatcgcatacggctggcagaaggtgtaccaacctttgtccagagcagtgtttatttaacatttgaacgttttctcttgctgctttcaagggagccacatgcctcctgttctgcaagcagtctgcctctggctagactccccatttggagcaccttgcaactcccatatcaattaaatcccatctgtgggggtggaacccaggcttcaaccaacaatctttactgctccctaggtgattccaggagcagccatggttaagaaccctggctctctaatcttaatgctaagccacttcaaacatcctctttacatgcttggccccgagggtgtttccctctcttatcctgggcatgtgattagaaacagactggtttctggaccgggtttcaaactctagttctgctactttttgtgtgaagtcagacctaatttttcttctttatcaaatggagattagagtgactcatttcgtcagggctgttctaagtatgagccaaaataatatgcacagtacccttaacacaaacatagagactcttatcttttctcttcccagcttggtcttaggcccagtgttgagattggctaacttctttgtacaggtatatacccgtctttgtttctaagcaagcatcaggaaaataaataaactggcataagctggtgcactttaccctggacaaggaaaggctcttccttgacaacttaaacacataattagtctttggttactggttaacccctctgaatcacagtacattagcagaggtgtgcagcttctgagctaatgatagtacgaaggtctggaataagatggagctagcacacattgaagactattcagtgtgctctctggaaaccctgtcccctgttatgagagtgatgaccacataccactgaagaagagctatataatattttatatgctctaaattcaaacaagtacgttgtaattatttagaagaaaggagttgtatgtaaaaaccccatttgttacttaaatttgctggcacgagggaggacaaaatcccatcctgaccagggaggtattgtgctatggcctccaaagctcctaatttgctttaaaacaaaaagcccttcaattcaagcccaggctctttagtgcccttcctctttcctcctggtgcctgacatataaatggtacttggcaacagcaggtgtataaagagacacgcttattgagagactgcagtgctattccttgatactggcttgtgaggcagagggcatcaatttgttgtgctttctcctagctgggtgatcgtcgacataaagttagctaccctctcacagcactgttgcatatagatttcaggataattgtcttataggtttccatgtggcccaatatctagtgtgctatgtcagatgaatggtgcttgcatttagattaactttagaggcttctgtgctgcagagttcttcacagatttcttctgtcattcattcttcaggtgtgccaaaaatggacagtgttttttgtaggcacagtagtttccctgtgccaagttaagacgtgtaacatcaattaaacattaccttgagtagccatctgtattcatatgtatcttacacttaaaaagaggtgattctttaaaaatactgatgtggtttagatgtgaaatttgccccttgggctatgtgcttgaccagttgactgtcaggtggcggtgctgttgttaaaaagttgtgaaagttttaactggaagtggctcactgtgtggaatgggggaaggaatagctccctctgatttcaggtgagccctatggttagtggagtatgaagagttccagtctcactacccatcaccatgcctacctgaacacagtggactgtgctttccctaactgtgagactaataaatccctcctccttaatgttgtgcctgtgaagcctttcattacgacaacaaggaaggcaattaatagatgtttatctcttaacctataaaattcattccctaattaaatgataaaagcttataaatacgtcatgcaacaccaagtaaagaattctgtcccctgtaaatgacaggaacaagaatctacagccatctgtgaatgtggcttcagccatcgatagtctgtgataagggaaataacggttgagtatgtcaaaattgttcacagcatagaggcctctcgtgtgaactccagagagataggcaacctcttccttgaccttgcttagttttcctgtctttgcaaagaacattgttccctagacactggctgaaagaatccaagagttaaagaaatgaggactgacaattaactgaacgtgaagtggaccaagaatgagagtgttgaggggactatagtaggggggagactgggaaagggatcagtagtggctggtgagtgttcagcactataattcttgcttagaatttcatgttctttttgtttgtttggttggtttgtttctgtttttccgagactgggtttctctgtatagctctggctgtcctggactcactctgtagtccaggctggtctcgaactcagaaatctgcctcccaagtgctgggattaacggcgtgcacctccactgtccagctagaatttcatgttcttaaaaaagaaaaaagatggcgtgagagccacaagagagggagaagggagactgggctttgaggttaaagatgacacgaaggctactcttgaaacactcacataagtccagaacattaggcaagcagctcattatgacactgggcagcagctgctggatgcattgggctttgtctcactgggatgcctcttattctatgtatttggtgtgactactccaagtttaaatggaacaaattcagaacgtggtgtccagttttgctgaaactttatgaccctcttgctatcttactttttctttctttctttctttctttctttctttctttctttctttctttctttctttctttctttcttctttctttctctctctctctctctctctctctctctctctctctctctctctctctctctcttccattttttgatcctgttttagggaagaaaaatacataacatcttacacaacagaaacttagagttattgcttttcatgtagaccaaaaagtacttatgttctatcatggaggagaaaacatatttgtcacttttgctgctaggtggtatgtgggattcatagacttgtttaaagtggaagttctgtgtgtctgtcatatggtcaaagacgaatggtaaacctcttttcttctgagagtaaatttgttctggtggaattttgaactctatttctaccactaatggtatttcataacatttatttagggcccacgatgccaaggtatcctgttgagcgccacttcagacataaggaacagtctgggatttgcaggtgtaagcacttggccatgtcaagatgaggtctattgaaatgaagtgtcaaaccccagtgtaacctcctgtctaggttgcttctttcatgagcttagtgcttctcataatcacataaatgtgttctgagaaagtcagaatcaaaggaggatttcaataaaagtcgaagaagtaattaaaatatgaagattcaaataaaaattagactaagaaggaagaggtgtcactgtctgcagcagtctgtcagggtttcaggcatgggctgccacacgacgagttgatgtttagataaagcagatgcttcctgaagtaacactgaatcacaatgtacaatacttacagtccctactcgaggctgttcgactctttccacaagtgtttcataaaaagacaacttcaggcaaatgacaatgtagatttgttttataatctataatctcattaaacaatccattgtcattcattaatgtagtacacatcacccttcccatttccaaggcagtgggtagaattttcttatcagaagtctgtcttaggtgaagagagacacttggcagcccctcttttgataggtgttgactggcctggggagacttcaggtgaggatgtctgaaggcttgaggtttaggaatgcactaactggtcagatatgactgaatttctcagttccctacattttgagatggataattcactcaccatgttattcaagctgagcccagagccacataccatttgaattgagaaagcagcattgcccattggcctgtgctccctgaaggcgagaagcagcccccttttggtttcaattataatggtattgctatttttaaccaatgctgtatgcttccaaatgaaatgtttatgctctttgttttcattgccccatgaatggttagactgaaaacatggctgcccatcattgctcatcactaataagcctttgctaaatggcctcacagcctggagggacaagcctaggagataaatcgctttgtgactgactgtctgacatttagaaaatattgctttaactatttttcacacatgactcagtgtggtagtgagtgggaccctgaaagttgcagtgtcattgtgaagcataggtactgtaaagcatttgaatgatgtaatttgctttcactggaggataagtgaatcaaaaattagaatcactttagtggagtcaaatactccatctcctagctttcatttcacttaatgtgtgtgtgttattaattgaggttttgttacaaaccacaaaaccttttgtaaatagtggtcttcaagagagctttggcatttcttataagatctcttaagtataggtgcaatgctaaaataaatataaacagattacagttgggcagatgataattatttggttatttaactctgaatgtagcaattcatcatgtttacattacagagattttatgttataaacatagtttcagtgatactgattcaactattcagcggttttggttttgtttatattgtgttgggagggtaattgtacacatgtctgtgcctgtatacagaggtcagatgtcagcactgtacttgacttttaaaaatttgtgtgtgtgtatacatgtgtgtgatgtaggggtatgatgtgggtcaatgtgtatgttcatgtgtgagtgcagggacacacatgccagagtgtgcaaggacaggtcataggacaaccctgggaatcagtctgtaacttccatcttgtttagacagtttcacttgtttctatctctcattacactaagcttgctggtcaccagacttctagggattctcctgtttctgactcctatctcacatgatatgaacactgggattacagatgtgagctacagcatctggcttcaagtggattctggagaatccaactcagtaccttaggcttgtgggcccagcattttcaccctctgaggcatctcacccttgcctggtttgcttgcatgggtttggggggattaaaccctggcctttatgaatgccataaactgagtcatagatccagctccatttgttcaagcttttcgtcagccctgagagagaatgttaaatagacttgaagttctatttagaggtcctgatgatggtgtaaaacaaaggaagtaatattgatgtcaagaatcacttttattcatgcaagtgcattacctcgtcaacttctgcaaagcagtccttcttattgcataagtgagttagggctcaaaattcagaaatccaagtttagtctcagtgtggatgaggctcccagggtgttctttgatagtttcttcagtctaactttacctttcctcctcctccttggaacttcaaacctaaaggaaaaatgatgatcagttcttaacaccgtcaaccttctcaagacggaaaggatacacgaagatgtttgcattctgagatgtcaatggaaggaaggaatgaggaagtcaccgatgcacagcaactctgaaatccgaggagagatatttctttgggtcgtcaggccttcatcgtcactctccaggtcttttgtaccctggggctcttggttatatccttggagtcgtgcaccctgtatgtgcttgctgctctgccatttttccagcattctctgccagtgaaatgtgggtgggtctataggctcttttaattttatcctctttctccctgttggtccaagctggccgtattctgataagaatcttctcaaagaatttgtgagttttctgcaacactttgtagattttgtctatttgtgcctgtcccattcatgcagcttctagaaagcagtcctctgctgtgtgtccacgctgtgtgtccacgctgtgtgtccacgctgtgtgtccacgctgtgtgtccacgctgtgtgtccacgctgtgtgtccacgctgctgtgtgtccacgctgtgtgtccacgctgctgtgtgtccacgctgctgtgtgtccacgctgctgtgtgtccacgctgtgtgtccacgctgtgtgtccacgctgtgtgtccacgctgtgtgtccacgctgctgtgtgtccacgctgtgtgtccacgctgctgtgtgtccacgctgctgtgtgtccacgctgctgtgtgtccacgctgtgtgtccacgctgtgtgtccacgctgctgtgtgtccacgctgggacagatgagcaacagatctcttaaatgtctaccttttttaagctcatcaatagaccatgaaacctcctaagatccaaactttgtccttacacttcagtgaggagggtctgtgtcagtctttggaggccctttgttgtggtattcctcctcctcctcctcctcctccttcttcttcttctttttttaaatttttacatggctttaactgaaagatttcatagctacaagctgggcttctatctaatgatgtcatgcttttcctgtagtgtcatcatatgaccttgttttctggccttgtctttcaaaaaaaatatttattcatttcagtgtgtctgtggggagttacagagtgtgtgtgaatacatgacatgtgcacaggagccctaggagtcaggagagtgtgtcatatccagatccagtggaacgggagacaaagatagctgtgagctgccatatgggagctaggaactgaacatgagtcttctgaaagaacagcaagggcttttgaccacggagacatgtctccagccatgatgctatcgtttttattttataattatgtggctgtctagagagactgaaagccttcaacccatcaagtcatgggtttcttttattgcctatccatttttttcctactatatactacatgtaatcctacaataaaggaaacctggtgaaattgtcagtgtttttttttttttttctaggaaatctctttaatcggatcactcaattcatttggcaatttttactctcagtatatctgcaggagacagtggatcaaatagctacgtggaaatgtgggcagtgatgaaagttctgtgctccatcatttctaaattccagtgaaatttttctttcttatgttttaaaggagtctgtccatccatccaaccacatccatccatccatccatccatccatccatccatccatccatagattgttataaatttcaaatttctctaaaccatgtgttctagtactctttttaacatgtacagctctaagcacattctcacatttgtatttactttatttttgaggaagggtctcacaatatagcctccactagcctggacctctctatgaagactggattgaactcggactcaggcttctgcttcccagatgctgggctcaaatgcgtacaacaccaaccatgtctaaaggtctcccacctttagatttttatggtggcaccctcctctaaaacctgaattaactgtttttctgtaaagcatcacatccccaaactaaattggctccaaaagatagtcattgttgccacaggggttctgtagcaagtgagtgagtgagtgagccacagtggcattgttaagcaggacttgagtcatctcagaacttcactggaactaagggctgcttcagggtttacttgggttgtctggaaggtctcggaagattctcttccagtcttgtgctcatcctggacccttcatcagactatctcaaaacataatagtggggaagaaatctgagggactcaggacatgtgtggtatggtaaaaagacaggcaaaattaagggtatacagaagaaagcaaaaccctttacttggattctagcttttgtttcctgctggccgagggtcagaaatttctacacagccaacaaagtcaagcttgcttgcagaaacaacattccctgtcccaaaagattcctccaactaggatgttgtaaacagcagaagaactatgcttgtttagcgctcgaatgcctgtgacctgccagtgtaaccatacccacacacctcctccatccatcgttctaaacaatgtgcctcatgaagccacagttacacaaaggaaacacactacaagaaataagaaaacttcatactgctatacttaatttctgaacttcacttactatttaaaccacagtgcagatttcatcctttgggcaatgttaacttaagccacagagtcgcagagctggctattgtaaagctgtctgtatgtgacactcttaagaagcctggaactacactggagtgcacactgtcctgtcctctgtgcaccagtcactcagtgctagtccttaagttgaaaccatgtacgatcccttatttctgcttgaaaagcttggtaacatcattcatccttctctgtgagttgtcctgaaattctttcctgtggcacagtcaaaactttgtacctgagtgagtgttccctgtagacagaacacctcgggctacctgcaggagtgctggctgtgtcctccaaatatcaaagatgagagaggaggtgttttaattacagggagcatcttggaagccatttctcatttttccatattctgttagtttggaatagaccattgagttctgtttccacccaggggagcatggctttgggatgtagggccattgggaactggcataatgtgagatttatttgattattgctatgttgttatttgacagtatcattaagacctaagccatcatgaaatggcatatatggagttctgcattggtaccatgcactcttcaaaattattttcttgggttatctgacatagtcattttataaaattattttaatatgcactacagtgtgattttaattaaatttcaagcatattagctataagtggacactgaaatctcacttttgaggacaagtatttaatatttagaccattcaaccttggaaaattaaaaccttgtgattgcttgaaattcaaatacaggatataggcttttgcaggaaacactaaggggaagacgtcacacacctggaaagtttcaaagttcctcgtgaatagtcaccacaactgaatgtgactgatcacttagacagtagagaaggaagcagtcgttgtgtggtcattgaacagggttttcacatgcttctgtcttatgaattacagtccacattgaagatctcatttggtggaagctctttattctatagagtttacttcttgtaggaagccatctttgaaagcagcagtgattgcctgactggtcatttctggttgttcattcagccctactttgaaagtcaagtttaacattttgctataaacagtctcacataatattaacaaaaccaaaagttcagcctaaaagcatattggggaaaagtcatttgatgttttctggataattataattctaagttcaaagttttctctgtctctgaaacatatctccataacttagaatagagataagtgtttctactttccatttgacctccattggactttctaaatatattctttctttgtcttccttcggctctgctgaagtgtattatctgttcttatcacgtttgtatctgatatatcctctacctaaaagcactttacggtttaagtcatcgcatatgataatggatttcagtatagcattttaataaacagtaaggcgtatgtgcttgctgtgtaagtctaatgacctgtagttcagatctccagtcctcacttaaaaagtcagatgcagggattgaggactgcatccccataacagaacgggcaggcacaagagaggccctggggcttgctggaccgccagtcagccaactccaggatcagtgagagactcaaaacgtaaggtggagagcagcaaatatctctggcttctacctgtgtactcacacaggaacctgtgcacacccacacccacacccacacacctacacaaacacctctgtgatatttgagacatgcgtagagggtattttgttaaaagctgtgtggggccatatttgagtcaagacttgagagttgtactctatgcagtgagaagctgctgttcaatttctgtagtatctcctagtcgactcccaccaaatagcactgtgtgtatcagattgctgctctgataccagctgacactgccctgtgacttgctgtggtattagcgtggatcacccaggtttctctggatatgtaatcttcattcccttctgtgttccaaaagtcaacattaggaaaaattctcttgatgttcggtaatgttgtattgagattatgtagagaggctttcagggaacctgacatatggtatttttcttcttagctctgcgtttggctcgggtccatctggcttaagctccgggatgctctgttttgttgaaagtgtccaaggaaaaagtagcagttagctcgttgagatgatggtatttaggaatgcatgtgagatcttgtgtgtaaattccaggaagtcaagtcacccggaggttccacaataagtatactatgaatgagcctttgggggcgggctgaacctgtataaagaaagtctgttttgttcttacccttggcctctagatcgtcccaaaacacctcctatttcaaaacagctattgcctaagaccatggtgagcgcctgacctgtaaccttccctctgttgaggtaggatctgtgagagtccatgaactttctggaaacttatgtcagttctctataggtccctttgtttcagacagaaaccagcgtttcagtcaaacactaaaagcatcaatgacctaaagaaggttaaatcctaccactttagggcaaattcctccttctcaggtttttcaagtatatcttagaattttacctcctttgtatccagcctaggaacacattaggaacagatggcttcctggagcctaagtctataatgagtggttagtgataactgttactcatatacccagagccttaatcacctaactgccattcccaattaaatgagaatcctgattagaaatttacatggcatctaaggaattggctggctagaattgattaataacagtttagtaatttaatacaaatatgtaataaataataataatgaaaaccaatgaactgcttagtaatttaataacaagtgataataaaaaatggaactttcacaaaaaacttattatttcaagtgatgttatttgacttgaaaataagcctatgtcattattattatgattttaaatgtaggaaaattgcaaacacacagcaagaatactgacaaatttaaaactggcatgcaggctacctaatttataacacaggtttcttactaatataatcaattctgtttccaatattccctcatcctggaactaaaagtgaactcttaatttcacaaagtgggttggactcctagcttgtcccctcagaaagcatgtaacttctcagattctaccagggttgagaatattcacaaagtgaagcctgaccgagcacacctatacttagtgccaatatttacatggctaaggcaggagagttatgagttacaggttagccaggacttcacagtgtctctaagagctggtcttcttggagacccctttccatttctattagctgtgtttgcaggcagtgctgatggctgtttcagctaccaagaagaactcactgccatgccttttgctttcctcatggatcatcctttcattgctttgctgggggtcacacatctgctctatcactcagccttgttcttttgagatggaggtccttccttcactgaacccagagctaggcagcttaccaagaagctctagcaattctcctgcctctgctctccacagagctgtggtgactctcaggtactgggccatgtgtggcttttctttctttctttttattggttatttcatttgtttacatttaaaatgttatcccccttcccagtttctcctctgcaaacacctatctcactccccctccccgcccgcccccccacgcttctataagggagctccccacccacgtacccacacctccctcaccaccctagcattcccctatgctggggcattgattctctaaaggaccaagggcctcccttcccgttgatgccagataaggcaatcctgcactacacaagcagctgaagcttagagtggagcagagactgaacaaaaggccattcaaagactgccccacctagggacagtcttcgaatcccatctataggcaccaaacccagatactgttgctgatgccaagaagtacttgctaacaagagcctggtatggctgtcccctgagaggctctgtcagagcctgaccaatacagatgtggatgttcataagcaaccatcagaccgagcacaggaatcctgaaagaggagttagaggaaggactgaaggagctgaaggggtttgtaatcccataggaagaacaacaatatgaaccaaccagagccgccagagctcccaggggctaaaccaccaaccaaagagtacacatggagggacccatggctccagctgcatatgtggcttttaaagtgggtgcaggaatctgatctcagttcctcatgctggcatcgaaagcactctgaccattggggccaccactcctgcccctaaatataatcatctgtaattttaatgtcatgatttttgctaacgtaaggcacatctcaggtcctcggcctgtaagttacttactgctgtgagggtttggaaagaaagagctaaatactagagaggttctgagaggatgccagatgtttccagaagtgtcaccttcagttcatttggaggactctttggtaagtcattgaaataaccgaggttacaaaatcaggatttggaaggttggttggttggttggttggttggttggttggttggtttgtttgtttgttggttggttggtttttagttaccttttctaatcaaataatggcacacagtaataaaataacaaagctaagtttgtcacagtcagtttggctgtgattttcatcattatgcaactcctactacctggaccacagactgatggtggacacagttttaggtgtactctccaagtctgtagtgtctaactggggctgcatggattgtgacctagggactattttctttgggaagatgacagcgacactggacagccagtgttagcacctctaatctctccggcccagtatgtcacatagactagtctagaaattatggggtggtggagactgctaagcgtgatggaattgcactaatgtaactatggcagggagtgcctgagtgatcacacaccttttaccacaatcactttcaaaatgcctgtggtttgaaatcaaaggaaaaagtgactgtatttgaaaaatccctttacagttatgtgacaggaatttaatgaagcataatgcccagtaacataatttaatcatatctgtgcatattttggtaggagaagcaaactttgaatgaacaagcccctggaataatttctaagcaaaaggaaatatagcaagcttttttcccaaaacactgtagattacttgggcaaataaacttgcttactgaaaagctgccagcaagaattgtgtagggaaccagagaacagcttcagacttgctggggacctgagtttggtctttagcatgcacgtcatgtgcatcacaactactcttataactccatattcaggggatctgatgctatcatctggcttcagagggtggacacatacccacacatatgcaccccacacactgaaaaaaaattaagaaagcaagtagagtataaacgagatctggtggtatatgactgtagtacttactactcgggaagctcagacaggaagactgatttcagtgatagcttgagctgtagtgagttcaaggataggctggtcaattcagtgagactctgtgtcaaaataacatagtatccagattccccggcttaccactcagtggtagagtgctcatcaagtatatctgagaccctggactcaatccttattgatggaaaaaagtagctcgctacatgttttcccaatggactttgattacaattcttttagtgacgtagcatacatggaatgtcttttccagataggtagcctgattttgccagcataagatttgctaaggctttgggtttattttatatagtgatatagtcaagatgtaaagaagaaggttagagcatgtctctacagacaggtttggacatctgaaagttacgcaaacttctgttgtgtaaatgtgctgctttcctttaaaaacagatacccacttaaattccgttgtaagcaaaattaaatgaagtaatgaagccattgccgtttagtcacggcttcaacatctaccatggcagctatctctgcttataagcaaagccttgggaaaggcttgtggggaaagccagggagagagaagccttgcctttgtctgtcttgtaaagaactcgtctgttttgagcatttctgcttttcaggttgtatatttgttcttaccatgttctgagagagttctttgtggataggtaaaatgtgtgtgtgaatgccatttgtgtgtgtttatagcagtttttcaattattctattagttagataactctaatagcaatttctttgccttttttttggtggtggtggtggggggggggcttcagttctttatgtctcagcctaagaatgtcagaagctcagcgttggtccagaggtagacaaatacagacttgatctgggatgagtgtttcccattcgtcatcttcccgtgatttttatatgtctttctaatgtatccattgtgtcttctaaggaaggtttcagagcgggaacatgcctcttcttgttaagccctactgaatggaactctaagtctctcaacccagcagtgactcccagcaggattcaaggcactgaatgtactcggaagactccttcctgtctttagtttggttccttagctgacacgaacagggaaatctggccttacctttagtatccttcatcttgattttattatcttttgttttcttttctcccgttgtaagtttttgcttaaatgtctattcaacactctggttggcaccacttagaacagaaaccaaagaaccagttctcctttatccttttatatacagagacttttctttctatggcttgaaccattttaatctcaagtgataattttccattaccacgtctacaacattttttgcttgtttgtgtgtctcactgagtgacatgtaataccaattattgcctcagtttgtcttgctgactgagccactgcaaaaccagaacctattgcctggataaaggcttctgaataacattttcatataactatatttgcacttcttttaaaatactgatatttatcatatgcatgcacagaaatgtttggttaaaacctcattatcttatgtaattaatatatgctaataaaaatagatatgttgcatcttatcaaacaaatattctcattgataaggttttatgtattggtcagtgagaagctggcatgtggaggacaaagaatgatctcaggggtccttcctcaggcactattgaccttgtgttacaagagtgtctttttctagcctggaatatgctaagtaggccagactagccgcttactgaacctcagggttgtccatgttctgcctccccagcactgaaataaaaggcaagcaccaccaccgctggctttcccctcctaataatatgtgtattgaataataatatgtgtattgaagtgtaattacagcatttccccttctcttcctccttccaacccatcccattgtacccatcttgatctctctcagattcatggactttttgctttaattagctataatgttcctaagtgtgtaaatacagtcggttcattttgtataagattacttgtgtgtatatgagattgtaaggactcagtgtggacaactgatatgtcatccccagtattccagggatcaaatttagaagaatgtcaaaaatatagtaggcaattagtacttttgataaacatatgtatataggttaatattttagaccagtttttttttttagttctaaagttttcttttttattttattgagtagatttgtataaatatattctaaatattttctctgccaataacttctcacatttccttcatacctcccgtcctatcacaatccaccttttttcctgtctttcaggaaacaaataaataataataaaacaaacaggataataataaaacaaaatatcataagataaaattaatgcaaaccaattggaataggacaaaacaaacaaacagaaccaaaaaggggcaaaaaacacctggaagctataatatacacacaaaggacatgtcagggggaaaaaaaaaaagcctgatacaacattgctttagttagagttttactgctgtcaacagacaccgtgcccaaggcaactcttacaaaggacaacatttaattgggcctgcattacaggttcagaggtttagtccattatcataaaggcaggagcatggcagcatccagacatacaggggactgttggagctgtgagctccacgtcttgttctgaaggcaactagaagactagcttctaggcagctagcatgagggtattaaagcccatacctacagtgacacacctactccaataagtagctacacctcctaatagtgccacaccctggccaagtatatacaaaccagtacaaacatgaaaaaaagaccttccaaatatgccactgagtttgttttttgttctttgtctactgctcggcatggagcctactcttaagcatggtttgttccacagtgaaactcccttatagaaaagttctcctttgtgaattgaggtaacttctgggtcagaagtagtagcacatgtccatttctgctctcagccctaagtacagaccctctctggccctgtgcatgctaccatcatctctatgaattcacatgggctttggtcccactgtgtttaggtgttggtgtcttctatctcctctagctcttgcattcttcccaccactttgtcagtagggtagcctaagtgaagaggggagggtttgatggagacattacattcagggctaagtgctccacggtctctcagtctctgcatattgtctgattgtagatgcctgcatttgttcccacctactgcagcaagaagcttctcagatgatggctgggcaaggcgttcatctattaatgtaacagaatgacattagaagattttattactacattcctttagtagaagagcagtgcttggtttttctctaagttcctggactgtctagtctcagggttgtggctacccagcagcaacaggtatgggttcaatctcgtggggttggccttaaatcaaatcaggtattgattggttaatcccacaagctttgttctaccattgtgttatggaatctagcaggtgaaacactattgtatagtgaacggtttgtaactaggttcatgtttatgtttctcctttggtcctaatactagtccatactgggggtgtctctaagtaggcacaagctctacttctctgtgttgaatgagttgtgtaggtgttgtctttaaccatagggccatactatcagtttgtggagagcaacctataggcttggtaacagcttggattttgggctagttcccatgtagcccctttggccacaaacttaattagatataacatattctcagtactggaagctccatttggtgacaaggtatatagagttgggctatccctgaattttgtgtgtgtgtgtgtgtgtgtgtgtgtgtgtgtgtgtgtgtgtgatttcatttcagattactttcctatatgtatatgttttaggaagcttaacttttttaggtttccaagcctaacaggttttccctacgtggcccttaattatagttgttcatcttagtacttctacccttgtacccctctccctttactctaccaatttgatcctccattccagtctctcctaccttctctattcataaatatctattctattcctccttctgaggagaactgtcccttccacctagccctttactttcttctacagactgtacagcccttagtttggctctagagattgtagcttgcttattgacttaacagataacatacatatcatatttgtcttcctaggttatccaactctggtattcctatccatttacttgtgaatttttttaattttatttttcatcagcagagtaatattccattgtgtaaatgtaacacatttctttatccattcatcagttgaaggtcatgaaggttgtttccagttttgcctattatgaatggagcagcaacaaacagatcaaggttgagcaagtgtctttgtgataggatggaacatccttttggtatgtgaccaagagtggtgtagctggctattgaggtaaatcgattccttaggaaccgccacagtgatttccacaatggccttccttccaagtgtgcattcccaccaccaatggatgagtgttcctcttactccatatccttgtcagcatgaactgtcacttgtgttgttaatcttagccattctgacagggataagatggaatttcaaagtagtattgatttgcatttctcagataactaaaaatgttgaacatttctttatgtgtttctcagccattttaactccctctttcaaaaatggtttagatcactttcccattcttaattgggttaggtatactcctgatgtctagtttttatagttctttatatattttgggtactaatgtctgtccatatgtagttggccagttttttggtttttttgtttttttttcattatgatgctgtcactttgtctgaatgatggtctctgttgacatgccgaagcttctctgttttaccttctgcaggtcatttattattcaagattgttttatatatgaaagcatgtcccattatgatagatttccgtgaagcagaaagcactttgttcatatttaggtattcctaaatccatgtacctttagaattaaatcactgtgtggtgattttaacactattctgtgaattcatcaacttctcattgtagtgatctttctttaatgtgattcatctattgtagctgtggacttgaaagtcaaataacctatcttgatccagttatatagaagaaaacacaaaacctactcctcaaagttattttcaagaaataaacttaagatatagccacattttaatccagcaacattgctgctctgtcaaaagatcacatccaaagacattctaggtctatatgatctggctggaatatagatactccacacaccattaatccctctggctggaataaagacatgccttttagtgcacacctttaattccaaccaatggcataattgagggtcagacaaaaagatgaatcagagaaagatttgatagaatgagctagagaaaggatacatccgactctcaggagaacagatataaaagagaggcaacttaagagcagctcagagtgggtcaagaatggaaggcagttccatgagtgcagttcagttgagttcagttcactgcaattcagagtcgttcatttgaatgcagttaagtttatctagtgagtggagttcagttcagtcaagttcagaggcagtttttccaagtagagcaattcagggagaagccaagagaagctagtttgaatcagtcagcttggagagaagtttgagtcagaacagctgatttgatccagccaaccagagttcagaaagaactagaatgtgtgagagaattcagcagtaagcccctgagacaacaattacatctggcagataagttacttttacattaagggacatgtaaaacccatttatattttaataaaatttttttaacttaagaatattataattcatacaatgtatcttggtcatatctattctactccttccacttccaacagcttccaggccaaaactactccttccacctttgtgtcttattcttccttttttaaataacccagtgcctgtatgtattagggtttagtgtctacttttttctatttttaaaacttcatttagcaaccaggtgtaggaggcatagggttccttgagttcataaagaaaaaaacagggaaaccaggaatgctagacacacaggcttgtctcgtcaaagtgaaagatgatatataacctattttctatccagaagcctgggagtagagtctgtgatatttacactatctgtctggctgagaccacagcagagcctcccacagacccctatcatgagcttgtctttctcagtcaatctttggaacctttctttatattatatgtactttacaaagaattttgatatggttttgtcttaagctttattgtaaacaaaaaattgacttaattatctccaggaaatatttttcaaaattgtgatgcacttaagtatatctaaaataaacgaaccatgctcataccagctgatgagttgtgttgaatcaaatttcctttttgccttccctgggtcaacactgctggtggtgctgtgtgcaaaggcccctacagacaggatataaatttattaaagtttgttttaccatttgcctctgattaatatcagctttggagtaagacaacgttagagctccaccatgttcagtggtttattctaagcaactgttgattctttctgactttcatgtaaaaatgtgttcatcctagagttggtataaatagtagatgagttagttatggacagcaggcttcttggcaattcatttccttctcccttcagggtggatggaatcttattttttaatttgatatctagtgccttaggaagcagcatccataaaatttgcttccctgttccacagggaagctctgctttgtatcctgcaatgtagggctgaaccagaactctggtctttaaagtagttttctttccaaagattgtaaagggccagggtgatggtcaatattgcctcatttggtcctgtgtgtgaaagggtatctaggttggcttagttgaagtgtgacaacagtgccatcctatgggctggtgccttgggctgaataaaaaggcgaaaacaagtgcagtaagtaccagcattcatccccctcttctttcttccggactacacacacaatgtgaccagctgctgttgtctcgcactcctgggccatgaccatctcttccctcaaacactgtgccacattgaacccttccattcttaagttgaacttgtctggtatcttgttacagcaaggagaaaagtgacaacacagggaccacagttgaatttcactgcagtagtaacagggggtcttatcctatataaaattccaacttcatggctgaccatgacattggccttattcttactctcttcttccaactttagagagcagaaacttgctgtgttccactttagcctccccctgttgattataagtgtggcattgtacaggcatcccaggctctgaaaataaagccataagtgttctgtaggaggacctactggtcacagcaggtccacaaagtcaacaaaacattcagaggaaggaattttttaattaaacttccacaccatccaatgatgacctcttcctactcctccccatggtttcccggggttcccaccttcttgactcatttgggagcaaaatcaaatgaagtcagcattttcttttggccatcaagttcaactgggtcactggcctggctcactagacagtgcctgcccagtctcatctcagggcagcccctgcctgctgtgatgttgtcttagtttccttttgatccagttttcacctcccatcagaatgtatcacagtgactacctctcttgagaatgtggcagtccttattctttagtctctcgtgccccctgaggataacagtgtttagaccctgctcttatcttactctaattcagttgaaattcactgaatgtctactatgagttgcacaatgaattactcctgacattataggtcaaaagaaaaaaataagactcataaaatctatgactaaaattacaaaagtaggtactgccaaggaggagtacagctactttcttggcacaggaatcttcttgtggcaggagactgtgattgggagtccaatttaagctacataagaagatccatcctcaaaaacctcaaaactctaacaaaaccaactgtagcatgagacatttcctggggagacaggtcacacgcatgtccttcacaccccagataggaaaccacaacagaccaattctaagtaacaaacaattctaagtcaaacttgtgaaccaatgagcttattagagtaacttacaggagtctgtgtgaggatctgcttacaagctcatgcatggagagctacttatgggagtatgcatgaagaactacttactgcagtatgtccgaggagctacttacagcagtatgtgtgaggagctgcatacaggagtatacacgaggagctgctacaagaataggagcaactaaaaaaaacaactacatcagtgaaaaccctgccgcaaggctagcgatgagtcacaaaagtttcagccttgaggttctctgtgccatttgcaggcaggcagctagatagagagggtcctttagacagctaggctttccctagcggctgcctccgctccaggtgactactagctccatcatcttagggagggaccctggacatcttagaagcttctgtcaccctaaggtagtttccatgagtggaaaagctgacaagttggttaactgaattattggaagagaatagtaataatagtaattcattttgagtgtctgtgtgtactttttttttagtacatctttgagtttgtgtttggcaagacatattgctgcagagattttactcagccatggtgtgaatgcaaagctcaagaaggcaaaggaatacatgctttccgagtacatatatatatgtgtgtgtgtgtgtgtgtctatacatatatatatatatatatatatatatatatatatacacatgtgtgtattatacaatatatatcaataacatatataattataatgtatatattaacatatccataatataatcttcagcctatctaatgcttcctatccacatagcctataccactgtctatttttctagagttctaaatactaaaaaagcaccagccctgtacatatcacatcatagacagagacatcagtcaccttcacctaccacttatcgttcataaacttcaactgaggaaaaacaaagcaatcggcttctaccttaggaatgcccagtgagttaggaagctcatctttactttccagagctttatagttgcccttgagtgcttgaacaccgaccattagatggaatgattttaagtgagaatggcttgtgaagtaaaatagagatgccataaatctctaaaaaccctcttaagatctccctaaggaaagtcagcttagcatatcataatacatgctgtctcctgctgcatattttggagcaatctttgaatgcctgctgttcctgtcattaattcattttacttagagatttttgaacatcaaagcaacaaaactcaattcagtagaccactgaggaaatggaatattctggtcaatttaagtatctgggttaaaaaaaataaaccttctgtttctggatgatttctggtctctgtgtctaaataattctgttgcatttgactttatgttgaaagctgtatgatatcttgttttttcaaggcttagtgaagattcctcgcagctgtattaattactttacatcattggaaataagaaaggcggttaccagaaacattggttctcatgctgtgtaaatgtaggtcagatgtgatgttctttcccctggctgtgacacttaactgtccttgttagaaaactttggtctttctctttcttctaaaaacttgatgcaaaaacaaacaaaaaaggcaatcagtgatagcaatgttagaatcgtaaacgatacagtatgaaatcgaggcactagttcatgactacatatacatttagaaggcatagagagtttaaagaagtaaggtcttgatagtttatcttcaaagaactagaacttctggtagatcttaaagtttgttctacgttttatttacagaacaaatagtgagtcaataggccttcttatccctcattgctgatttgacttatggatctgattcccattttaatttcagcaaaatgatggcaaaagctagatgaagacagaaataaagcatctctcaatggtttgaatgtctgtactgactcagcattgcagtgcaatgttcagtgtgggagaaaagaacaaaggacagatcagttgtaaacacttttatcctgcacaaagttgatgtatttaataataatatgtcttttcagaactccaaaaatggtcactcggaaagtggaaccattacaaaagccacatttttcttactgggtgtgttaactgagcagttttaatcataaccttgtgttggttctctcttgtgctcaacatggcaaagaacataaaccttttaggaaattattcgtgcattattaatatttgggaaaagctgcttgaatttctttggtgcaggattagtcataagcatttttacctgattaatatttttgtaaacatatttaaattaaggaggaaaacttaaatttgtggcatcctctattttttttagttccaaagctaaaaatattttgtgtattttcctaagaaaacacaaggctacacaatgttaatatattttgttaggtttcatttctgctgtttattgagttatgaagctctggatagtaaatagaagtgttaccctctgccccgtacataaatctctctctgtctctctctctctctctctctctctctctctctatatatatatatatatatatatatatatatatatatatatatatatatatatattccacattgtgacaatgtagctgccttttctgccttagaggaattcttaatgagtgctagcctcattttttcatttctcgaatgtctgtcacaccctctgatatgtttatgtttagtatcagtatctatatcagtctgaggtactgagttctgtcagtattttgacaactacctttagatcagaaggtgtcctttttctttgtgtgtgtgtgtgtgtgtgtgtgtgtgtgtgtgtgtgtgtgtgtgtggtgtgtgtgtgtggtgtgtgtgtatgtgtttggcaataatgacatacccaagactggataactcataaggtacgcaaaattatttcttacagttttggaggctgagaagtttcgagggggctcacgtttggtgtagaacttcatggtatagcacgcaacagtgggaggcagaggagggcagaggtggggaatggagagaaaggggaggagaagggggagggaagaaaaagggtcagggagaggtagttaagggaggaggagacagagagacataaacaaagaaacaaaaacttggactgaatctgctgcctgggagccattttatattcaccaaaactatatgcgtgagagcgagacacccatgacctaagctctttagagtgttctacttcttattgttatagaattcaggattaattatccagtacatgttttggggggaaattaaactaatataattcttccctctatacgccagactcatgtcctctcacagacaaaatgcattcatcccattgtgagagtctccaataccttcaggtacttcttgaatcaattcaaaagctcaaagttcacgctctcatctaaatcaggaacagacaggactcttggtgcacagtttattctggggaatgtttctgtccagctgtgagcctctggcattaaactagttagctgcttacagaatataatggcagataggcattcctatgcctgaagggaaaaatcagacaagaatagtcagccctatgtaatttcaaaacccaacagaggaaacaacatgaaattaaagttgctgcttaatctttgatgtcataaccatcttcctgggcacgtgggcaagaggattggacccacaaggcatcctgtggcctcacccagatgactttgcagggcatacagttcattgaccatctcatgtatttggagtcttgtgccacagtgctcctaggctccattagtgtgttgaaattctatagatctgtagactcacgtgctgttccactcttcaactccactgggcatttctctagcctcaattctgattgtgtgcttggaataagattttcacagccctttttatgtggcccttgaagtctaagagtcaacccccgtggttccatgatctcgtattctgcacacgtgtaaaataaaccctttgtagatgttgccaagtttatggcttgtgcctgctagagctaaacctgggcctatttgagcctcagctctaggtctgaggagtataagagaagttctgggcagtgaatgcggatgtcctagaaatgttgctttaaagtctcataatgtttatgcttattttattagtaattgacttttcaacacacgtccagaagaaacagtcaaaccattacaaaaagggcttatttatactttctagcattttatattggatgaatgaattaatttctgtggtaatgctaaatttccagaatttttgtttacctacacataatgctaattgcatctccatttaggtaactactcagtatatattccttggctcgttgctgtgattcagggtggatggaggcggggagattcttgattcaaaaatgtatgttactgaaggattggactctgagctgcttgcaagcacagtaatttttttttcatgtcgtcacagagtaagtaataggagccacaatcttatctttactaaaattagcactcaaaagtgggtcctttacaaggtcaaacagaaagtgaggtgagtgagtatgttctcaaaggatgtaagaggcaaccatgaatattaactgcatattgtcctgcctttctcacttgcattaatgcagctttatcatctgggtgacatggtgtataagtgatttaagggtaaatttgaggacaatagccacctttcttcctcacactcttgatgatccaaaattgccataagaagtattttaagcagaagcaataaaagaagacctaaaccatactgactcactgctcccaaatgtaatgattttcaagtaattgcatttttaagtactataaatataagatgagctaatagctcaagattggttcaagatcctctaatgagcagatagccgtaatttctaattagcatcttacatatccccctccttaattagtgtgaattggacataaaagttctttgtatacacactgaaatggaccatgaaagtataatttattgtgattaccactgaagtgcattttaaaggacagttttcttctgaatacatggacactcatctgcaaatacatttaacctcttcgtgagagtttatctacaagatgataaagaattgaacagaccattagtggattatggtttactgtccctgagaaattctaatttaccttttgtccatgaaaaaaaactgtgtaaaacaaaggtggactctctaatgtgctaatgagactttgcttaaaggctttggctataattagttttactatggattgcttggaaatgaaaatgtaacataacaatgtgaggcagctcctccaaatgaatgttgacctgcagagcctggaaccagtgagattattttgtgcctggcagagctttcctgttttcaacttcttagaaaattttagtagctattaaaacaatgctctgcagaggaaaggggaccagaagtccttcaagtccttcagctctcatcaaaggccttaaactatcagctaaacagatttggcttcttctaggcttggctttcctgtcacttgctgagcctttggttcttctcaggccatcattgtttctgagatttactgttggattgaagatagaattatttacccaaggcctttcataattctggtgcccatatctttgcctgctaagccatttcaaagaaaaagagagtgacagagcaggaagaagccccagaaattgcttgataggatgttccattttgtcagtgacgaaatttgaggatatatatatatatatatatatatatatatatatacacacacatatatatgtgtgtgtgtaattcacatgtattatgtatgttcatatatatatgaaaagcatatcgaatgtatactagaataggcactcaaatggcactttaacaatgatagtcttagattatgttaatatgtagtagtttcaagttattgaaaatcatcggtgacaaataaaatagaatgacttcctttgccaccagccgttttctaacaatcagagccttcagtgttcttctaaactgggtatttctgctcttgttcaaacttaagtcccaaagaatattcaagtcagtttgaattaagtcattttattggtttggctggtgccattgtagttacacctcagcacacaaaaggatcacctgatagactcatcacaaggtgagaatatcacaagtcaataatgcattcaacacacctatcccagatgacaactgagcaaaataggaccttgataagtatctgtcatttgcccttgagacagtgcacctcactgggagtttgaataggaatagacccatagattcacatatttgaataattggtttccagctgttgaaactcagaacaattagcagatgtgatctttttggaggatgtgtgtcactaagggtgagctttggggtttcataagtccacaccattggcaatcatgtcttattctttctctgtctcatggttgttgtgtcaacatgtaagctctcatcgactgctgcagcaccatgcctaccatggtgatcatggactaaccctctgaaactttgtgcaaaccttcatttgaaacctttattttatgttgtcttagtcacagtgtctcttcacagcaatagaacagtagctaagatagggaatgtaatctctcagcttccagaaaccatcaccagggtattgcttgcctaggaaatgatcaaaatttgacaggctcttcccagtgaatgtgcatagctctttcagacagttgtgaagtggaaaaatcttttgtgagttgagtgctactgtctacattcacacaagcttttttttttttttttaattaatacaaataagtgtccttcaaactttacaattgggaagatgttgttgacgcagctttctacctacttaattttatcccatagaaaacagacatgtaaaagtaagatttcttagctttgtgctcagaactgatcagcatcaggtagctcttggctctggccatcgtcattgtttttgactatttgaaaatcatcatttaatgatctcttagctctatgtgcttctctttcattttccttttgtttttcactcttagattaatccatttgattctctgtagatttttatctacattccagtgatggaataaagatgaaaagaaaagtaggaagtctcactagaatgctgatgtaatcaaaaaagtagtttgtcattcttttatcatctagtcatatgctctcaatagatattatttattgattttattgtacttctttccaaaaaccccaaatgtactttgctagattttctgtctttcatatagaaacattgaagttgcagactataatagtgtctgtgttagtgtaaattagctgtatcaaatttagagctgatttaaattgaactcatagaatctgttctgatgtgtagccatctatattcttaatatgtaaattttagaggtaaaaattgacaggaaggctataatgctcatgggttctgctttggagttggcattctttagtgtgtattagtctagtcaattaacaaggatgttttttactctgaaacttatttagtatgagtgtgtgtgtgtgtgtgtgtgtgtgtgtgtgtgtgtgtgcatatgtgcttttgtgtgtgttcatacagacatcagggcacatgtggaagtcagaagataatttgcagaaattgcttctctgtttgcatcacatggattctaggttatacagctatgttcaccaagctctgtgatcaagaacccttacccaagctaagccatttttctgcccacacttaaaaaatactttgcaggagattacattgatttccactcaaggctacatgctgaattcagcctggccacgagagtgacagggtgacatggttcctgcccctggaacagagccagcagagaggtggcctcctgtagtattgatggtttttgtgggcataatgcttgtttgtataataatgtacatattttcatgttcttcatttgaggacatgactctcctctctcacaaggtgaatgactccctgataatcagagacagcatgagtctggggggggggagggtgtgtctaaggtctcagcaaaatagtaaaatgctgtgaccttctggacagcccttaagactgtggggaaaatggtgaaaccatgagttcaaatatatataatttcttaactatgcaaaatgtacggatgcaatatgaattatatgaggggcttcttggaccatattaaaacagaggccgttgcactatgagccagctcgtcagagagatacaaaggcagacagattcccgagtttacagtcagcctgggatgagtttaggtccaggcccaagtgtggtaggaatggtaatttcagggcagagtcctacccaaatatcttactatctatgctttacaaaggctggcagatatctgaattattttgcaatgttaaaaaaaaatgtgcttgctgtctcttcctaagaatcaaggggcaggggtcatgggatgctgattcatgggacaatcaaaagagaacatggggtaaagactgaattgataggtaaataaaaggctgggatttttgatctgcaagaggtgaactatctagagaggtttttagaatagcaagacaaagctgtcttgaacagaacgtaggccatcagcttgtcacccacagtttgactttgagtcctttgttccactattctcaaacagctcttcctcagaacccctctccaatcccaggctggtccttggcagcgacacagcagatagcacagatttctagagactgacattttcttaagtaatcccaccatatagtggaaatggccagtatacatacatgaaatatagtaaaatgtttctgcatagagacaatgtggggcattttaaagggatccgggagaggaatccctgctgcctctcaaagccccggtgagcactcatgaagctaacccagagagagggctgctcacttgatgcatgtcagtgcgaaggaagtactcaaggctgctcggaaaacgctttcccaaaatccttcaaatcctcagatcattgctgagaatctcctctaagcctctctaaaacccacacctcctacaaatactgtgccctttcttaaaggacgaaaaaagaaaccaagtcttgtatttgaccttgacagatcacacccagcaacctcggccttctacacttcagggcttttactagaggtgtagattagcgattgacgcgttccccttcccttaaccaggctctgccagtgatttcagtgcaaacgtcagtcttactcataggcttaggtgtccatagagacccacccaaagaataaaataaaataaaataaaatacccatcttctgtaaatataaggaaaaaaagaatactgcagagagatgcggaagaactcggtcccttttattaaactttgttatgtgaacataaacattctctttcaaaactcgtagaacgtttgtacttaatcagcttgtcatcccaaaggagttagagtccacaagtgagcggagagtaaaggatatttattgccaggagttttaatcaagcagatgaaatgagtgttagatacctactgccaattttggagtccctgtgtttgtatttgccctcagctttcttctgactaaccggggtttaagattcttcactcgtaaagtaagcattcgtagctaagcagtttggcaggagtgggacataaactaccaggaagaataagctgagcagtggccgtgggtggggacagacagggcttgaactctgagacttctatgcaaagccttagggatgcaatgtgacaaggaaatgcagcctgaggctttcttagatcactctctatgcttctgtatgcttatacttgcagcagacaggaagtgtgactaaaacagtgtatggtggaccctctcctccaccatccttataaaattccgtctagtagcaagaccataaatattggccccatcattccgtccattttcattctttatttcctaaaggttttgtgcatgtctgtattgtacatcaaagatcttccctctcctaccctgatgcttccccttttcaaatccctccctcctgtacctctaggcaactttacctactttcatgtcatttagataaatatgtaggtagacagacagatagacagatagatgatagataaacagattagacagacagacagacagatagataatagacaaacttatttacagaggtttgttttaatgtatgaggcaaggcattatgtatctaagacctggacctcaatgtgtatatggccaagatctcttgattctcctgcctccaatgtctctacctccagagagttgtggattgggagttgaacccagtgccccatacatgctaagcaattcctttgtcaaatgaagtgaacccctatcctcctagatatatgctatgcacttctagctattcactcagctatctggatttatgtacctacagatcctttacttttgtgtattcctctgtctttgtcagtgattgtcaaccatactcacatactagagagggttctcttcttgcaaaattagccttctgattttataacttattaagttatgtgagctcttgaatctcgagactccttctttcctccaagatggaatgcttcaatttgaagctacacaacaccctgattgtatcttgtaccccatgaagtctcattagtacaaagctcccatctcacttctgttcagaacaaaccagtggttccccatgtttatgcgagtaaaaatccaagttagaggcctatggaaactttcccttttctctctccaagccttttgccctcgagactggccataatcaggtgctctgacctctgaaataaagtcatttcaccctagaatcagggcagagcctctgcaatccctgggtaccttctccactgcttcatttcaagtaacagatctgtatgaggaagacacctgagctcaaagtgacctcatttgatgcagttagatatttatggaaggcacctgacagatttttttttttaagcctacaggaacatttaaaaacagtgggtatttattcccaggaatgtgtcctcaaaattgcaaatacaaaatatcttgggaaacaaggctttccacaaaaataaaacaaaatcaatcagtgtaggagttggccaaacagaaagcatgactgtgctctcaccgaacaaataaagtcaacggcccatcctcatcaccgtgagacaggacaacgtttccagaaaagtcatatgacataaatctcccgatggctatatcaagatacaaacttgtgtcccctggaaactgtgtgagaattaaaaaacctcagtttatgttgatattgatgtcactctgcatacaagtttaaatcgaattatgtcaggagatagagacaaaatgactctttagatgtgttttatgttcttagtttcttttgtgttgttgttgctttagtttgagataaggtccctcagcttcacacacacacacacacacacacacacacacacacacacacacacgttaagcgctagtccacagcactcgtttgcttgctcttgaactttgtataaatagaattattcagtaagtaacaacttgctgtctggcttatttttaaaaatattttattaatttttgataactatgaatgtattttgatcatatcaacccacacttttccccttatcacctcagatccattcccagctcaaaattttattttaaaataaattgcccaccaactctaatttgtgctacttatatatattcctgggagtaggactgtcctcctgaatgtagttgacacaccaagagccacaaacttaaaaaaaaaaaaaacaaaacaaacatgattgtccctctcctagaagctatcagctatggacagctcctcgggagtgaggcccccccgcgctccctcccactctgtgctaaaatgttgacaggcttggtctgtctctgtgctccagtgagataaggggcgctacttacaggaacatggacgaggggtaacattaatgagcatgcgtgactgaagggcagggatatcagcaaacagcctactcttagcatgcattaaccccccaaagttgcatccgtagaccaccctgtatgatttacacgtagttcagtgacgtctcctctctgcagtagttgttcgtgttcttccctggggagcagctgtgtggattttgtaactgactgagctcctgagccgcacacactttttgttagctctaggatcttgagactcctcctttccgctaagattgcttcagtttggaggaaagagctacacaataccactccccgattgtatcttgtactccatgaagcctcattaatacaaagttcccatcacgtttctgctcagaacaaaccaatgattccccatatccgcgtgagtaaagatcaaagttagaggcctacgcaatgtttccccttctccaaacccttgtccccgaggctgaccataatcagacgctcagacctctggacatgtcttctagcacaagcatgtttctgatctgccttctctgtctgcagcactcacattctctctctgcatctctataattcttttaagtttagcttccaatgaatccttcttcttcgccccccctcccccccgcaacatttggtttttcgagacagggtttctctgtgtagccctggctgtcctggaactcactctgtagaccaggcttggcctcgaacccagaaacccacctgcctctgcctcccgagtgctgggattaaaggcttaagcccccacgcccccaatgaatccttcttaaggagaaacctgcctccccatccctcttcacacttccaatatctttcagtattttttctttatcttgctgtttcaattaccatataatatagtatttattttgttcactattcaccatgtctatgtctcagtcagacaagaatactgttttctagaaggcagacttacaaaaatatatctgtttgtggccatagtcccaggtgtcagaacaatgcctggaacatagtgtgcaatcaataaatatcgtttgttatatagaaaccacataagaactggtatttgaatactgaactttagtatctttggtagaagtatgcaaagtgtctgtggaggcaaatacgcgtaaaatagttagatgattatgaaagttgacttttatgcttgcttcaatcacatagatccattgtttctttataaaaacccttgtgcctttacttccaaattagatacttatcttgttgatggagccaaatatctgaagacaaacaacgtaaagaattaagtgtttattttggccgatagctcagagagataccgcccagcatgttagagaagccttgggaacaggcacttaaggcagttaggcacattgtacatcctgtatggaagctgagagcagacagcatgtggggatgctctctgaagttttctctgctccctaacaccccacaatctttcaaaacatcaccaccagctggagatcaattgttcaaacaccatgagcctgttgggggcattttacactcaaaccataacatatgcttaccccaacttaagggggtttgtgtgtatctctgtatcattttgaaggtctagaaacaactcctctggccccaccttcacttacctacttctttcttatttttcttgtcttcattattttcttgaaatactttaaagtagtcgggctgaaatcctactactgctgagataagaaggtacctgcataaagtctatatacaatatgtttttctttggagtaacttttgtttcgattgtcacagcttgtacacttctaacccctgtgcctgtacagccatgcatgcgttttaaaatggagctttgccctgtacagtgcaagactcctgtgcagctggaccttctctttcagctttgaagactttccacaaacagtctgccagcacagcctctgtttctttcagtggtttgcagatgggtgcgcatcataggccaataagaactcctgtgcactgagccacttccccagccctgagaacctgaagggaactcagaacccatttatgcagatatgtgaagaaaaaagagtgttctgctgggttaatgtggttctcccacattcagggagaagcaagaaggctaggggctgggagaggaataataaatgaatcactgagaatatgaatggaagacatgagaaggccttaccccaaagactgggtcttaaacacgcaggagagttagataacaaccaaattaaagtataagttataccccagggagggaaggttgtaatagaagatatgtatgttaccttcatgccagcacagcaaatacccgagacaattagtttttctagagaaaatgtttgcttgggctcagtcttgaaagtcccagactacaatgcttggccctactttttgtttgcttttttttttctttgttcttgtttgttttgacgttttttgtttatttgtatgttgttggttttttctttctttttttttttctctttttttggcatgtggtggggggaaaataacttcttactggtagccaagaacaagtagaaatcgccttcacagaacattccagtgactgagggaccctcactaggtcacacctgctaaagttccactgcctcccgttggtgtcactctaggactgagctttgagcctatggatcttggaatccattcaaaatccaaactttagcagcatgctcgagggatggagtgagatgacatccttgacctagaagggagaccaggcagaagcaccttatctctgcttcactggtgccctctccctgtcctgggagccgaagggaagatccagtgtgtggatcaaacctgtcaggcgtctctgctgttcctttaggtactcatttgctgtggattttctaagattttctgtattcatgctcagactttgtatggagtataattacaaaagcaagaatgaaagatactagaaaattcatctgtaatgttatcttcctgttgactcaccatcttctgtactatagtgcactggtcctacaggtcaaggtagttcttaaactatcgtaatgggcctggggagagaactcggttggcgaagtacctcctgcacagacatgaaggctcgcgttcacttcctcagaacccagaaaaagagccaggagccatggatcatgtctcatatacccacagtgccagtgtcacagggggatcccctagatttcattagtcagacagcctcactcaatagacagacttcgtgttcagagaaaggtcctgtctcaaaagaacaagacagagaactatcagagaagattcctgttgtctgccttgtctctcaatgcacactcacacacatccataggatggataggaatgtgaatttcacacactcacatacaaattatcctaagtaaatgattttagaactgaagttactcaaaagccttttaaaccactctgttctgagagatatgtattgctttgaattaaatttccatttttaatgttttttttaacagcccagtctcatgtacattgcgcgtaccaacacagtaagggaaggaaggaatatcatcatgtgctaatggggggaatagttctgccatcacggaagaggggcaattaacacttcccagaaccttcctgctcacagagttgtaaatctcaatttgatttcaagctactagactcttttatatctctctgactagattgagacagaagctggtctaacatgaaagtagacgtctaataactgctccttgctctctctcggcatactgagaactggtaatcaaaacttttttgacctgctgctgctgctgctgctgctgctacagatttgttcgtttaaaatgtgattaatgataaacctaccaggtgaatatgtgactctcatccaagctttagcccctgttttataaaggtaaaacggtagattattggagtcagatctggagaggagaaaaaaaaatcacagactgttgtgggtactgccaaagcactgttgcccccatccccggagcttaaggagtgaagacatttggtgatgctttctgcaggatttttaaatgttatttttaaaataaataaataagtaaataaataaattaataaatatttatctattttatgcatctgagtggttttctgtgctggtgtgtagatggaccacaaccatgcttggtgcttgtgaagagcagaaaagggtgtgctgatctcctggaactggagttactgatggctgtgaagcatcctgtgggttctggtgaccaaacctgggtgggtcccctgccgaagcaacacaagcttggagcaacacaagctcgtaccactgaactctctctctccagctgagaagatttgcttctcagttctgagttggagtgttttgctctgaacttctgaaaatagtctttcacccagatatgaatgcacacagcatttcttttgtaacttttagatgaaagctggtgttaaaatgccaaatggttgaaggaagctcttgaatgttgttttaaatccctgtgagcttttcctttctgtttttgttttgttttgttttaaatggaaatgagccccttttccattctttactgcctggaaaatagtatatcctctttcaacaaacttgggagatgagtcccctactagacttgcttgtggctgtgagaatatccattctttgccattgtgtagccttagctcatcttgactaatgcccttcaaagtataaataggaaaatagagatgagtgacagggattgattagcagtctttttcccaacagaaacaataaacccactggatagtttgccagctcaaaagcctgagaaatgcatggtgaaataattgtgtgtgtgtgtctgtgtgcgtctatgtgtctgtatgtgtgtgtgtctatgtgtgtgttgtgatcacgttttctagaaagacaaaaagaccctacctggtctttcttatctgtaatacttatgaacgattatggatatatgggcttccagattctaatgaaatggaggaaaatgcttccttgtggtcttttcaaggggatttttcgagtaaaaagaaatagggtaatattaccgccagtggataaacagtattcatatcataaatactagtattacctttccctttccttgcccaggtccagcaatcattcagggtggggtttttagtaccagtctaggtgacaaaggaaggagagctccggtcacttgtaacaggaaactgtgacagagagcggaggggaaacaggcaatccctgcagcagctgcaatcattgcaggagagaggaaggagatcctgggctcctgacaactttggcagcagccatttatgtgaagacagttcttgtgttgtacacagacagctattgaccaaagatgatggaattatatatagccaaggggtgcttgggtctgatcaaagaatggagtaagggaattggcttagcttgctggagaatgagatcatagttgacataatgctgagggaacaggacttggagggtacatctgaaattgaatttatccctttctcagcccttactgcctgctcactctgcaaccgaggcttccgttcccagatacagtccgagagacatttgttggtttctcagtgtcctctgggaattaaaacaaaatgaaatgcccctgactatttttcaatagcttatactaactggtacatatgtcactggtttgccgattattgtatctgatctagtctggttgaataaatcatatttcattcactccaaggtgaagtttctctcacttgcagcttctgcttgctgcagatgtccatccatcagtgcattaagagctgtggtgagcactgttcccttgctcagtccacagtatctcttcctcccttctctccgcccacctgacttctttagagtgtatctataagcagaacgcagagatggcaggaaatccctccagaatagacatcagtttgctatcgtggttagtgaacttgactctttgtgagcattttctttcagaggttctttggggtgtctctccctcttctttctttgtgtctcttttatgtgtgggctccaatactctactggtgtgctgcttcggttttgatggcaattggtctagctcacactggtgaagatgcagaacacagtaaccttgcagatcagggatactgagtgggaaattctctccggtaacttaccagggatgttagagcagggcgtgtggatgagagagcaactgctttgtggccagcaattgaagtcatgcaaatggacacagttgcctgggaagagatacagtggacctcgcagagacacagagggagcagagggaaaagtttctagctaactgacatgtaagtgttactagggagtccacccagaatcatgcctaattacatgtgtattgtttgccccaaatctggatctttaaatagatctacctgctttctttaccctaaatgtgaacctttatgactttattttaataggatgtgtgccctatactgttttaagttttaaaaattgctgctaattttactctggaccctttagttccctgacaaatgtaactctttctcttccagttgtatatgaacacagatcaagattagagaaatctttgcaaaaagaaaggcttgaacacaagaaagcaaaggaaggtaagacaatatgagcttgtgccctgatatttcctcctacccttctttgatgtagcatgaatttgaactatgatgcatttggttttgtattttgttgttgttgttgttgttgttgttgttaagctgtctctcaaatctgcctgaagccagtgctataagtgggccgagaaagagctgtcaataaatgtgttatacacagtgcagacattttatatagtctttgtcatggggaagtagccctttcttctcctttgggaactcaagacagatagcaagtggaagatgtgtgagcttcatcaccaggtcatgactcaaagggcttcatttccttcattcctgtagagaaccggctgtattagaggctcaggactgtgtttagaagctttcccttctgtttctgcagccttcatggactgtgtacattgccatacaaattatatcaaaattaacacatgacttcccttctaaatatttttattgtatattttctttatttacctttcaaatgttattccctttccaggcctcccctctggaaaccctctgttccatgccccctccccctgcctctatgagggtgccccccctacccctacccactccttccttcccaccctgacattccctcactgcaccaaacctctgttgatggttggggtttggaaaacatacattgtttagaacatgacactgtttatgtaagtttgtaactcagtgagttgaccttctacctggaatcttctgaatgaagcaggtgttactataagttcatgaaacatttgcctagcccagctgttcagataggaattaccacttaacacattgctttttgtcagagcttttgaagcaagcatacactctagcatccaagtactggaagttatctgcactcttaggtctgatgcattcatgttttgtgatgaatcttggaatgtaaacccttggctcctttggtgagtgtggggtgggtgctgggtactatgtaaccctctcctgactcataggatgcacagacttaatcattctgagaaatgctttcagacttgtctttgccaggtcttccattgcagagtgtttttatagagccatctagtggataataaagtttcagagcattaaagacggcttgattgccgtttcagttcctgaaggaatttagtgtgccctctagtgggtagctataaatcacccttgtctcaaatgcaccctctccgctttcaaaggcagatttcacagagatattgtaagtgtgctattagtcacttgccatcgattctggtgatgcagggcttgaagacagcagggagagtggaaaactataagctttgtcatctgttttccaaagcttccagaggtaacatgatgtacataaatcactaggtatgttgatttgaaaaaaactggttatctttttgtaaatctgagtaaagtatatagcatttttttctcagagatgcttaaaggtttttaaatagactaacttatactttactttctctatttttatctttcctagatttccttgtttataagttagaagcacaagaaacacttaacaaaggaagggtaaggctttgttctgttttggcttttattttgttctcatgaactttaagggagataaaaataccactgcaaaaaattttactccatttattaccagcataaatggattaagggtggacatacatttttgttaccaaaaaaaaaaaaaaaaaaaaaccaagaaggaaaccaagagagaaacttgtacacattgtttatttaaaacttatcttttcttacttcttgtcgcattgctgatgactagtgataaactggggcagcttctctgtggcacatgaggtttgtttggttgtgtttggatctagatttcaatttgagacaggttctcatgtatgcaagaagacgtctaaatcattgagtagcagaggataactttgagtttctgatcttcctaccttaacctccctagtgctgggattataggtgtgtgctactgtgcgtgccaacagggaagctcatgtttattccctctttgatttgctcatggcgtctcttttctctgacatgaaagacttctgtttgcttacagagtactatcaaggaggagaactaactgccttagtgttcacattgcaggaatctgaaggatgaattatggacagaatgagtggtattggcatttaaaaatattttaaagttaaaattcgctggagaaaagccagtctttgtcttaccctacagaaatgtgtgagtgttagttgaataaaacatttgtgtttagtgatttcaaagctgaggaaagtctgttctttgaattgcctagaggatgttttcaactttcaactctaagttgcttttaaaagcctgaaccagacctcggtgcacccaattgtatattttgtagtgtagtttccttatcaactaaaaaaataaaaaaagaataaggcaggggatgaatgatgaaccagaagtgtagtttattttaggagctatgagaagaaaacccgggagtgcccctgtgtggtgatagcacagccggagagtgctgtgctagaccttcaccctagagtagcgagtggcagcctcggatgttggtaccagaagggctgtctctacagctgctccattagatcacagggatgttctagaatgtggcatcagaagggagacttcagccctcatcagctggggttcaggctgcatctctccctttagtactgtgtaaaagtactggtgttggttctggtttctcactgtggaggtacaataaagattatgggaatacccactgaagttgagggaagagccctttcgattcctctattaagacagcctgaactggtgaagtttgctcttaactgatggatctcccacccctcccacctgtcctgaccactacaccctatattagttatgcacagtaactttcagaagttcattgagtagctgggcatcttggcttctttggattatgagaaataagcccaaactatttctaagcatcctgtcaacctatcattttatgattgtgtgtctaatctttttattactcagagtttaggaatccagaagaaaattgaaacctcatttctgttacggagtggctcagtggtagagtgattgcctagtatatgcaaggtcctgagttcaatctccagtagtgcgaaataaataaataaataaataaataaataaataaataagaaatgtccctaaagacatgctctttctaacagagtttatgttagcttacaaaagcaaaaatgaaaatcttttattagggaaggaagctgttcacaacaaaagaacaagatgagctatcttttattaatttggttttcttttatttacagcaagattccaatagcagatatagtgcattgaatgtccaacatcagatgctgaaagtaagtaacctaaactgtcccgtatgaatgaagaagggagcagacgacatttgaaatggttaacaatgtctaatataaacaagaagggttcgagaaagttgacttggtgaatattgtcatagttgtctaaaaattgtgattgttttattacctcccatgattattacttttttttctttttacaaaaatgtggttaatgtactacctactttttaatataataattgggctctcaggttacctacttttaaatatttgttctctttgatgtctttagagtttgtgctttatttagtctctcacagtggtttttcctttattgtacacagaatggagtgtgtggaaccccaaagctttgtctgtgttactaatgactgtctaagagatgcacttttagctacttgaagaacacagcttatatttttaatatttcctttccttgggacttaggaaaaactccctcttaagtgccaaaggaagatctaaagcacaaaagggaaagtaagcaattcattgattccatcagcctggtagcactcagcaccatgtgcaaatcctcccatggtctctgccccacattagtcctgggtgctagttttctgctttctatccattcacatcagtagggcacacaccctctgttcaaactagaacctttcccatcttcaggagtgcagtacttaaagcaagcctttctgccacataagcatttggagactgtggaatttaaataacttgtaatgatgttgtagaattccgatatgaaatcatatcaatgaaaatgaattctagaaacacttcattactttccccaatggcaagatggtctcctctgcctcttcactactgcagtcactgtcaaaatgggtcactactaaactgaaaatcaaagaaatgttgaataaagcggcccttcgtggtaaatgctcctgcctttgagtatttctaaaaaatctagaagagaattgagtgcatattgaaagtaaacagaattttcttgccattatttctttgatattgtagtcaatataacatcagtggttcgcgtagcatttatcttgaattaggaagaagaagtaatctaaaaggattgaaagcatggtggtagatacatgcaaataccatacgatgaagagtcttgagcagtttcatatttaggtaacttagtttaaagttatccttggagcctcccatgaatactctgaagccttgatcttgcttgttcactagagaaaatacacaaagtagccaaggttaaacgtattatctcctttctatgataatttgactacagggaaatagcctcagattccccgcccccctttttcatagcttgggctagcttctcactcatattgatgtttaaaaccaagaggaggtttgtgtttgaacttgatctcagactactcaagtagttgaagagaacaggaaatgaaagggacaaacagacagaacccaaccttaagaactgagcttattctaccatgcactctcacatttctgacacgagaaagacctctcggtgaagaaataaacgctgcatgatttagagaccctgtctgtcaagtgttcatcttgcagagtcagcatgaggagctgaggaagcagcacagtgacctggaagaggaacaccggaagcaaggggaagacttcagtagaacgttcaatgaccacaagcagagatacctgcagcttcagcaagaaaaggaacaagaactttctaagcttaaaggtattggctagggccagagatgcctttgtacaccatttgaacaggaacgcacactagcactgtggtcctgaccttctttaaggcctttagattattttgtgcttttaactttaataatcacatggaatagcaatctcatttataaataatccagtccgtttttactcttttaatttttgctttatgcaaatggtgttttgcatgcacatatgcctgtgcaccacaagcatgcctcgattctctagaggctccaaaaggggcgttagaccccccagaactggagtaagcgatggttgtgagctgccttgtgggtgctgcgaattaaaccaggatcctctggaagagcagtaagtgctcttaaattctaaaccagttcctttttccattatttttaaagcaacattcatatatagcaaaattttaattatatatatgaaatcaaaattacagaaaataggaggacacaaatatgtaatttctgactaccaaggtatttcaacctcagaattttgcacccaagacaaaagtgtaaatacaggatgctttagggaactagtcattagtaagaaaagaaattagacacatacacataaaacacatgtgcatgcatgcacgcacaagacttagaagagatagaaagcaaaaaaatcatatttatagaaaacaacttttggaagaatttcttttcttttctttttaatttattatatgtaagtacgctgtagctgtcttcagacaccccagaggagggcatcagatctcattacagatgattgtgagccaccatgtggttgctgagatttgaactcgggtcctttggaagagcagtcagtactcttaaccgctgagccatcttgccagtcctcggaagaatttcttgaagagatctgaaacacctgggtatagaaagttccttgacatcaggatgagcacttaacatgtttgtacttatgtttgattagaatgattgtgctgctactgtcataattgctgataattgtcaacttgaatccatctaaacccaccttaaaagattttaatgaaagattctctggcttaagttggcctctgagtataccagtgatgtttttttcatatttgtgttcattgtgatgggttggcctaattgtggacagcatcatttcatcgattgagtcctggactgaatggaaatggttgggagagctgagtacaggcatccctccctctcctagtcttcactaggatacagtgtgaccagatgtctcacacacttgccactgtgatttccctaaaggggtgtgctatgacctggcagtgtggacaaaaacaagacttctctcccccaacctgctgttgtcagggtgttttatcatagcaatggaagtggaagtagacaggactctagataaaagacttatgcagtaaagttaaagcatgttgtgatcgatgaaggggaggtactggctaggggccataagtgcaggtaatttttgttagcttcatatggtacaagaggggtatctcgatcttcccctctcctaaggcaggctgacagcctggaaacctatataattctcttcatcattgtgaacataatggctgatgatgcattcctttaatgtattaggactatgtgaaccccttccgctggatgaatttactgaattcttatcataaacctggaggcaggcaggccattgttttgctttatatagcatatgaagatcaggaggctggggagcaaaccttgctggctgaggcccagagaactcacagaaactactgtcgataagtttgcaaataaaaaatcaggactagctcatcaaggttagagatttcacacggttttgttaaaaagccccatgtagctggcagtacacaaaaggtccttgtaggtggcagtggtgtcctgtttgctgtcctgttttgacttctgagattatcagctatggcatgaaggctggatcttattttgttcttaacttccccccaccccccacttcaagtgcaagggaaatcctatgtgcaggtgtccagaagggacagtgagaaagtaaaactgcactgactgtggtaagagaaggaaatggattctcttccctttctgctttctgcttaccttccctggagagatggagccttgtctgcagaggtatctccatactctggtaccaccaagatttagtaaatgcctgctgtcccagctcatgtattaattgtgccatttcttttggccaatcatagcctcttccaaaataaattataaaaatctccaagacaggtcttagcttcccttgtgctgagtattgccatgcactcattggcctcataatgacagacgttattagatccatttttaatcagtgatgagtaagtactcaaagatggaaaagactctataggcacatttgtcaaaagcccaccaagtttgtaagtttgaatagtgtttcatgtgtcaaacgtatgtaatgatagggcttctaaaaatagagagatctagaattcgcaagaggaagctggtacctgaacagggaggggaggttttgggacttcactctgactccacactctcaggttctaactggaaaaataccttctctaagtcgaatttagattacccaagaactcaaaaaaactagaggttatcaccagataagtaggatttctgttatctctagtaccttcttagaggatgtaaaaattatccatgctatgagaaataaagtctgttctgttcgtaagtactttttgtttgtgaagatcttcaaatctgagaccatctggccattacattcaagcccaggggattgttaattaacagaaatgttttattttaaacatctatgtgattaaattgttgacttaatatgaaatgcatagactctttctagagtccaataagccaggtcatcctgcaagagccttggaacccatgtcatatgcctctatgatatagtcttttgtttattcccaatactttgctgttgaagttcaaaatacaccttgaaataatttttaaagtttcaaataacagcatgaaaactagacagttctcagtatttatgtgtggttgttcttgtaaaacagaaactgtatataatttgagagaagagaatagacaactaagaaaagcacaccaagacattcacacacagcttcaagacgtcaaggtaagatgaatcagacatttggctcgggggcttctgtctcctttactatgcagaatggcttcagaagtcattccagggagctggaaagatgcctgagagactgagtgcttgctgctggtgcagagaaaccacatttggctcctagtgcgatagctcaccaccacctgtaactccaactccagggaatctaatgtccttgttgatcccctgcggatactgcacccacatgcataccccttgagcaacccacaaaaacacacatactcgaacacacaagtacacatactcgcacacacaaacacacacacacacacacacaaaattaaaaacattgaaataaagatttttcttttcaaaaattgattccttaattgatctgctttgcaagctcatcaccgacttggactttgccttcctggagtacacttgatacttttaccactttggtatcataaacgacaggtttcctgggacatgtaaatatttctgttgataccgaactcattatgttgttggatgattacactgtgagatggtttttacttacagaggtaactactaatgaaaggtttagctgggtagcgaggcagcagttttgagagattttttagaatcctccataaatcctgtctacctccagtaatttttggattgaacaaatgctgttttcacttccatcaagtgagcaagtaacatttgggtggccacaccaaagaggcttattttgtgacgttaatttagctcaccgtgtaaacttctcttttgtgtagcaacagcataagaatttactctccgagcatgaacagcttgtagtgactttggaagaccacaagagtgcactggctgctgcgcaggttaggagggagcagcctttgttgggtcctttgaagtctgctgactatttctgaatcccttcatgcatgtcgtttctgacaactcagtcttcagggagttatggcagcactcctaatcccggggatatgcatgcttttcaaatcaccaaagagactactaaataaactcttcattgcttattatacatgactgcatctgcctctgctacgccctacacgaacgattctgatacttaactcactgtgaatctggccttctgcatctctctggcctgtatcaactcttggtacagtaggtatagggtttgtgatgctgactcccagacactgtcttctctcctccccttattcccagtatcccagcccataggcatactccttttgggataatgtttatacagggcggttcatactacagaaaagcagacgggtcaggggagaagaaaatcgagagtcacaatctccatttgttcagagaatacaatagcccctggcataagccactctcttggtatatgtctgttaaatgaataaacagtcaaatccaagctgtggagagcttggcaaggtgatatccagatgagtacattacagctggagacccagagaaataggactgcctgcttacttggttcgggttcaaaaaattattcagagctgtaatgcattgggctcatgtctatttgcatctctctcagtgacttctgtttgcattttggggactagagtgtttgtctgtttttacattataaaaaatccacttgctttgtagttttctaagtgcattctcacatgatatttctctttaacattttaagttattccttgatacatttcatacatatatacaatatatgatgatagtcatttcagcatttcccatacatatcgcttgagccaccaacccatcccactcccaacatcatgtcccctctccaatttgctgcctatatggactcaggcatgggtccatacactggagcaccggaaacctaactgtggccacaatcacagagaaacatgattatcctccttctggctgccatcaaccacccatagcttcctcagctagggatagggccttgtgaattgcccctccttggggacctttgccaattggggtctgtctatttctcaattgaccatggttatttttacctgtatgtgaactgattatttctaagcactggtgcattccaaatctcaaggtttgccaagtgttattttatgtgaggttcacacagtgagatgtggtcagctgattagaacactgtgctgcaatagccatagataatacaataagcaaacatctgaaaaagcgcagaactaggattaaaatcatttctttaatgacccaaaccaaatctgaagtcgcacatttgcagcactgctgagccagcttttgaggcttctgtcattaatctatgcatggttgtgtgcacacgtgtgtcagtagaaccctgaaggtcaactgcaagggtcaactcctcaggacatcctccactttgagacagtccctcactgggctggatctccctgattccagtgatccccaggaatacacctcatttcccttctctagccctgaaagaatttatagaaagaaaaaaaaaactgacacaaagaacctatgtatcatgtacttattaattattaatatatttaactgctgtgtaatcataagtattttgattaagagagtgataaaacatctgccttttgagagtggtgggttttttttctggtcttaatatttattctataactagtgcaccccttaattaccttaattagagtcatatgtctctattaatttgggcttgatttaacaaaatgccattgactggtggcctagtcactgttccagaaactgggagtcctagattcctgtgaggatgctcatctggcttggtggctcctggcttcttgtattgttgtgttgtggaaagagaccaagaatggtccctgctctcctgttatcggggccctagctttattcatgaggattccacccttaggattgagcaccttctaacacaccatcctttgatctgtggttggtatcaaaaaaaaaaagttattcaatttcagatatacaaattttgaagagtacacacattaagtaagtaacatcatatcacaactttatccaaatctccaagggagggaaaatgctatttctagcaaaatcctcttaagagattctttgttaacaaatcttgggcttattgatggttccttgggtaaaatgcttgccacacaagccattcaaccatactttcatccccagaatccactacaagtagaaggaacctcctctgaaacccacagtggtgctgaggtgtgcagttgtacacatattttaatatggtccttttctgtacagagaaccacaacttggctgccttcattaattgcataccttagagcagcagttctcagccttactaacgctgcgacaccttaatgcatttccttgtattgtggtgaaccccaactataaaattacttttgttgctacttcataattgtagttttgctaccattatgatttgtaatgtaaacatctggtatgcacatggtcctggtgacccctagggtcatctgacccccccccagagggtcacaacacatgggtggagaaccactgccttagaagaagagaaaaagaatgaattgaattgggctttatagatccctccacgtaagagcatggctatgtggattttgttggtttttttgttttgttttgttttcatttggtttttgtttgtttgcttttttgttttttgttttttttttttcattttgagctccaaagtagaaccccaaatgatctgattaatttctgaagtacaggccaatgctagctacatgttccatttctatacaaactacatgcaagcactcctttgatatatttttagccagctaccaccttcattttttgaaaactagaagagacaaaacagagctggggagatagctcagtcagtatagtatctgctgtggaatcatgagggccagagtttggatccccagtctccatagcaaaggtcagagatcatctcaacagtgagtgggttggagacaagacaggtagatccttgagctcattggccagccatcctagctgaatcagtgagcttcagactaatgagaggcctcgtctgaaaaaaaaaaaaaaagaataatgatagagaaaagctacttgatatagaccttgggattccacatacatgtgcacacaggtacaagcaacatgtgtgcacatgtgcacataccctctatgcatatcatatgtggacacagcaccacacacatacacacatatactacaaaagaagactaagaagaggtaaaagagtgcttctctccaggcatggaagtccagaggttctatttaagtgtttctttacacagtaattctggttttagaatgagagtggtagtgtacatgaaaagtgtatactgattttgttaaagttattggtgtattttctatctttctagctccttattaaaaaaagaaaaaagaaatgtatcttccacatcaaatacacacccttgtgtctgcctatattagtcttaaactcatacatatgctgcctttgtcgattatgccaaaaggatatttggaattgataaacacccagcttcatgacagtcttgtttttgctactctctgctacctcggagcaccgtatggaaagcaatctagaaagtagcaagtaaaaaaccgtatttgagcataaatcacctaaggagaagactgtgagcgtagaccaacagacagacagacagacagacagacagaccaatagacgagtccattgaaagctgtaacccaggccatacttactgttaatgggtctcaatttgaataattatgtaagtcttcaagtagatttttaatgtgagaaaacattgattaactaggtgcctttcaatgatgatgcttatactagaatggttgacgttcttattttgtctcacatagcctggaacactaacatgtcttagataaggttttagtctcgtaatcctgattctaatttgcatgtgctgagaaatggtcgagcatgtccagagaggcagagctagtgcatgaggccaatctgcagctttgctaaccaacctaaggtcaatgctttccctaggcatccagtgaacccaaaagcccatctaattaacctatgaatattctctctctttttttcctttctacaaattgtgcaattttctcccaactgtacaatttacgtgcagactcaagttgcagaatataaacaactgaaagatacactgaacaggattccaagctttcgaaatcctgacccagtcgagcagcaaaatgtcacctttccccatgggactcaccctcctcaaggttacaacggaagagagaagctgacaggagagctccaagaggtgagatcctggggatccccgggaggtgaagttcccagtggagctgtcctgaggagaactgtcctctgtatggcccacttttcctaccaagcagattcctagaagttcttaaacgttagtatccccagtagggtatgttaaagcgcgcacctcagccaaagctccactttctaagtcagttcatttgacttttggctggggatttgtatttctaaacaattcagctagtctggagaacacgttgataattaaaactgtcacatttactgggaaagaatgttctggctttgtccgtatccgtgtaaatttacttgtattaaaagagctctggtgtctgcatctttgaaggtgagacggtttttctctcctttgaataggtgaacaggttttcaactgtatgacgatattatgtggcagcccatttccgtattaatgctaatctaatagaacttggtacacttctggtctcatgtagagcataccaaaagtcatactaaatgcctttgtaacctggtcacaattaactttcttcttcctcttcatgaaaatgaaaacatgcttgcatatgtttcaaagtacaacattaccggtgtggtcttgcttattgttaattcttacaaagttccttgtatgggctggagaaatggctcagcacgtgaaacccctggtcacaagactaatggcctgagttcaagtcacaggactcaaatggaggaaggtagagagttgtcctgtgacctccacatgcatgctgttgcaggcgtgcagtaaatgtttgagaagtcttgtctgcaagtggctggccatcttgcggggataatgaagtcaacatgaacagagttagcaaggtgattgttttcagcatgaacagaacattccttcataaacagacttggggttcttgcaatccagttcttttgtggggatttatatccagcaatttcaacagcatgataggagagcaggcctgtcgtttgattctatgctctgctagtctgacatccaactcactgggttcactgtctaatgattcagagcttgctctgctccaactgtgagtgggagatagacgttatctgccctaacgttcctcacagagacagagaggggataaatggcaggtgtttgaaagtccttagagcccttgagtgaaacattttctacgaggcagttttatggcaaacttgccaggggacttcgtgaaatgtatggctctcgaaggtctcagatggtcaaggaagatcttttctccccacttcttgctttgcactcttgacttttacaagagtgataattatatccctgctagattcagaagagagattcctgtctcaatgtgttgatggtctggtcccctaggcatctcaattataagaaattaatctgaccacagaagtaacttctttcgatgaagaaaagggaaaaggtagtgccgattttcctatgtggtttctccctccaagctagtggagaccgaaaggatggaaacctacggaaaatatggccacgactcgacaaacttacagaagatagtttctaaagtagtttttatttctttgataaatcaaaaactaaagctttctgttttgacattgtttatactgtcaatttattatatattatacttatcatatataattgtattatgtttattataataaatagacagaccatctttggtttacaaaaggatgtaacaagatacattaatatttgactggggctgggagggtaactcagttcaattcctaccacaaactgaattcaatcccacataaaaagccaaattttatgtggcatgtgcctataatactagtgttggagaagtagagaccagaggatttgaggggagggggctcacggaccagccaatctagtctaatccatgatcctgggaatcctaatgagggaccaggtctcaatttagaagacggagacctcctgagaaacatgactgcttccacatgctcccacatgcttccatatgctcccccatgttccacatgctcccacatgctcccacatgcttccatatgttcttgcaacatatagctgtgtgtctatacactcacaggcacactgactggcacaaactgaaaggttggaacaaagaatattttgtgtcttgcgtagctgaagctattttaaatgaacatggatgtccgttagtagcgcaagccccttttgcttactcgtaaatgaagccagtgagaaaccactccagcctttcttcagctgaatctgaaagcttctcccagtccttccaaagatctgtcgaggagaaaaccgaccttgaagcagctttcataagcatcaggcctgaggatttccagtttttattattttgcttgtttatttcctttctagtctaagcagagctggagtcagattgcctctgagggaagtgttttcctaatacatggttaccagtaggctttcggtttcctggtctctgagcattttctgagataaaattttgcctagattattcctgtcttggggtgagatgacacagtgaggatgaaatatctccctcgcacctctcttcctttttagtcacggctgaatatatttctagactccgggattttgcttatgctgtagccctttagatgaggtaatagaagcataatgtcaccacttttgaaatagaaaagtatcacttcttgtgacttgcttatcttgaaataactaggtgcagccgaaccacgaagcagggcctagaagaatggaagagaaacctctgtcttccatgcagaaggatgcaggattccaggctctagaagagcagaatcaagtggaacccagagagccagaggagcgtcaagtggaagaggaacacaggaaggcactggaggaggaggagatggagcaggtggggcaggcagagcatctggaggaagaacacgacccatcaccagaggagcaggatcgagactggcgggatcagcagggacagaatgcagcccaccttctggatggccaccctcaagctgaggtgcatgggagctcaccagaccttctctctgatggggaacttgtctcggttttaaatacactactactactctgttttaaatacactaatgataataataataatannnnnnnnnnnnnnnnnnnntgttctggctttgtccgtatcccgtgtaaatttacttgtattaaaagagctctggtgtctgcatctttgaaggtgagacggtttttctctcctttgaataggtgaacaggttttcaactgtatgacgatattatgtggcagcccatttccgtattaatgctaatctaatagaacttggtacacttctggtctcatgtagagcataccaaaagtcatactaaatgcctttgtaacctggtcacaattaactttcttcttcctcttcatgaaaatgaaaacatgcttgcatatgtttcaaagtacaacattaccggtgtggtcttgcttattgttaattcttacaaagttccttgtatgggctggagaaatggctcagcacgtgaaacccctggtcacaagactaatggcctgagttcaagtcacaggactcaaatggaggaaggtagagagttgtcctgtgacctccacatgcatgctgttgcaggcgtgcagtaaatgtttgagaagtcttgtctgcaagtggctggccatcttgcggggataatgaagtcaacatgaacagagttagcaaggtgattgttttcagcatgaacagaacattccttcataaacagacttggggttcttgcaatccagttcttttgtggggatttatatccagcaatttcaacagcatgataggagagcaggcctgtcgtttgattctatgctctgctagtctgacatccaactcactgggttcactgtctaatgattcagagcttgctctgctccaactgtgagtgggagatagacgttatctgccctaacgttcctcacagagacagagtggggataaatggcaggtgtttgaaagtccttagagcccttgagtgaaacattttctacgaggcagttttatggcaaacttgccaggggacttcgtcaaatgtacggctctcgaaggtctcagatggtcaaggaaggtcttttctccccacttcttgctttgcactcttgacttttacaagagtgataattatatccctgctagattcagaagagtgattcctgtctcaatgtgttgatggtctggtcccctaggcatctcaattataagaaattaatctgaccacagaagtaacttctttcgatgaagaaaagggaaaagatagtgccgattttcctatgtggtttctccctccaagctagtggagaccgaaaggatggaaacctacggaaaatatggccacgactcgacaaacttacagaagatagtttctaaagtagtttttatttctttgataaatcaaaaactaaagctttctgttttgacattgtttataccatcaatttattatatattatacttataatatcatatataattgtattatgtttattataataaatagacagaccatctttggtttacaaaaggatgtaacaagatacattaatatttgactggggctgggagggtaactcagtacaattcctaccacaaactgaattcaatcccacataaaaagccaaattttatgtggcatgtgcctataatactagtgttggagaagtagagaccagaggatttgggggggagggggttcactgaccagccaatctagtctaatccatgatcctgggaatcctaatgagggaccaggtctcaatttagaagatggagacctgagaaacatgacctgaggttaatgttatgcttccacatgctcatgcatgcacccagatgcttccacatgcacccagatgcttccacatgctcatgcatgcttccacatgctccccacatgttcccatatgcttccatatgctcccccatgttccatatgctcccacatgctcacacacgctcccacacgctcccacactcttccacatgctcccacatgcttccatatgttcttgcaacatatagctgtgtgtctatacactcacaggcacactgactggcacaaactgaaaggttggaacaaagaatattttgtgtcttgcgtagctgaagctattttaaatgaacatggatgtccgttagtagcgcaagccccttctgcttaatcgtaatgaagccagtgagaaaccactccagcctttcttcagctgaatctgaaagcttcccccagtccttccaaagatctgtcgagaagaaagccgaccttgaagcagctttcataagcaccaggcctgaggatttccagtttttattattttacttgtttatttcctttctagtctaagcagagctggagtcagattgcctctgagggaagtgttttcctaatacatggttaccagtaggcttcggtttcctggtctctgagcattttctgagataaaattttgcctagattattcctgtcttggggtgagatgacacagtgaggataaacatctccctcacacctctcttcnnnnnnnnnnnnnnnnnnnnnnnnnnnnnnnnnnnnnnnnnnnnnnnnnnnnnnnnnnnnnnnnnnnnnnnnnnnnnnnnnnnnnnnnnnnnnnnnnnnnnnnnnnnnnnnnnnnnnnnnnnnnnnnnnnnnnnnnnnnnnnnnnnnnnnnnnnnnnnnnnnnnnnnnnnnnnnnnnnnnnnnnnnnnnnnnnnnnnnnnnnnnnnnnnnnnnnnnnnnnnnnnnnnnnnnnnnnnnnnnnnnnnnnnnnnnnnnnnnnnnnnnnnnnnnnnnnnnnnnnnnnnnnnnnnnnnnnnnnnnnnnnnnnnnnnnnnnnnnnnnnnnnnnnnnnnaatagggctgccgaggtgctcagtcagtgaaggacaagcttgaggatctcagtgtgatgccaaattctgtgtaagaagttgggtgtagtgatgtcttcctgtcgtcctgcaccgaggaaatagacagataggtccctggagtttaccagccagccagcctagcctgacaagaaagacagcccagatctgagagagagagagagagagagagagagagagagagagagagagagagagagagagagagagagagagaaacgggggaaggacacttgaagtacacacagagagagagagagagagagagagagagagagaagaaaaaaacttatgaatcaccgtctctgtaaatgtttctgaaaggttttcattggttgtcctttccttgtatttaagttttctgttgtaagacaaatagcatgatatagctcataaaggcatttgtgatcagaacaatcactgctggtagacctgtatcgttcccattgtcagtggtgcgtaagaaaagaacctggtccatcctcatatccctgacattgtagcaggtgaactcccaactggccacctccccagaagatccctaagttccacctgaagtatcttgatgtggagaaatgtctaattttctgtgacaaagagtcctcagtctgctcactgactgccagctacagagctagcttctgcctgttgccgtcaaagccgcatcagaagcttacattgtcttactaacccatgcgcccatgagtgagtgagtatcctgtacctgcccagggactgccttcctcagcacgtggctgacatctgagatccattcttaccttcataacaaccaaagtggccagtgtccttaaaggaacccagtgtcagccagcactgagtacaaccggggacctttcttcagtctccaaactcatactcagcagcaatgcccctgggtgctgaggattttttttgtaactctgagccattctctgtcctcaaagtctttgtgtaaactcagcaatccccgggccaaggggagacactgtcttaaacaaacaaacaaaaaacaaccaaaaccaatacccataaggtggcatctaagaaatgacaactgaggtttcactcaggacaaatacctgaacagcacacacacaggcacacagtctccttttccctttccctttcccccccaccccgactccttctccgccaccccccccccatctctatctctcatctcctctgcttcaccagtagaagctgagatttgacattttctttagcctgaaactgacatatacattcttgttaaatagcatccttgggtctttaactattcctagacaaagccttagcctcagaaattgtgcagtatggggttactagcttgatttagaacctagatgcataaatttaattcaggttagaactgatttcttgtgtggtgctctgtagcattggaatgggaacacacggagaggctgccttccagctcacaggtccacaagtccactcagagaaagctgggaagttcacgttcttgggctttatgtgtggttggtgcttacctgatgcaaaagtgtcgagaagcctatcctgcctcccgagtttaccctgacaagcaaatgaagggcgtgccgagggtctaccccttctagctcagcatgaagcccttttattctaggtggagcattcgaccaaggcagctacaaacttccaatccccatatgaggaacagttggaacagcagaggctggcagcgaggagagatgaggaagcccagcggctgagagaacatcaggaagccttgcaccaacagaggctccatgggcagttgctaagacaacagcagcagcaacagttcctggccagagagatggctcagcagaagcaggtagcccatgaagatggccagcagcagcaccaggagcagctaaggtagcctgccccttcccctggtgggtgtagacagtccttcctctgctgtcaaatcagcattgtacgtgtattatatagcaagaggacaaacctatatagctcatgaaggcaagatagaaaaaatgtattcgggaattaaatgctagagactttagacacttaattttacgtgtaattttttttcctgcctaatcatgagagttatccattgagaagagggcttggtgataaagggcatatcacacaaacattatgacctatgtctacatccccagaatctatgtaaatctcaggacagttccatacagtctgtaatgctgggctagttcatcaggaagtgagatggagacaaggagaatctctgcaagttctcagccagtcagcatggagtatgtgacagcaaatcacacaagtcaggctctgggtcaaacaaggttgaaggcagggacaatatgcaaggttgtcttccaaccccttggcatgtcctgctgcatgctggtgcacccctcacaaaacttacaggcatacacattgcacactcctgcaaagtaaaaacaagcattcccaaaatagcctaacatcctcagctctaactttattctatgcgggaatgacaatgtactatttaaaggtggactttggaagcatctgctatcactattacactttactatgtgtctacatctcagaaacgagttatggcttattctgaaagttgaaatctttatttatccctgtcttgaaagagaaatgaccttggtcaaactgtgccaactgattttttttatctccgaatttgggcccctgacaggcagcaagctcattacaatgctgtggagaatgacatcgcacagggagtcgaggaccagggaatccccgaagaagagggaggtggtaagactccttagatgatgactcttcagtcaaaccacttggtcacatcacccaatagcaaggagcacatttcacagctccaacaggcagactgtgtccctgattaagtgcagaggacagctctgactcatgctaacactcttgccacacatggtctgagtgctggcaaaagtatataccactactgaaacctggccaaggtggtgagtccttcctacatcattgtcccttctgttgaagctctttgtgtgccttacagttttttttttctgacaaccaaccttaggattggtattctttaggaaatttccatgttttctacttagcttggagatcttttacccttctttatataaatggtaaacatctaggataaaatttgtaaaattcagcttcctgtggagatagagctgaagttaactctccttggtaccaccgagtcttatgaatgtttgatttttctagaaagtatccaaagaaaagcaaaggcacgctccatcagcagcctgttgtggtgttttataaccctaggagtcagaaaattgttgcatttatgtcccccatgggtcactttaacttcttctacttgttcatacgactaagagctatttgctcccatcttgtttaataagtccctcagagcacttggagcttgcccgcaggccccctacttctttattgtctgcaaactaaataagtctttatgttcttaaccttccatcttatatcttacttttcgaaggatttacaattcttgtgagctcttagaattctgttaatctaaatacttttcttgctaagcaatataagcaagcatgggatgtgttttcgggcagcagcagtctgtctgcttccaagttcacagctgtccttgtcccttttgaaatgtcctaatcttagaaaactcttttttcttgacattcaaccacacaaaaaaattaattttgtcaaatgtcttttattttgtaagttttgattattgttttcatatctggtggggaaaagccagcctccgctataaatattccctaagagggatagaatggcacatttacccatccctttgacatgcagaaaaaggacagaactattcaggaaaaaaaaaaaacaacaacaataacaacaaacaaaaaccaaaacagagatctgccagtaccgaagatggagatgagctagacatactgtaggcggtttttcgagaggaaaactcctgctcaacccacacagggctgattatacttcctttgctttgatagcctatgacagagataaccagcgccaagatgaagctgaaggagacccaggcaacagacaggaacttcgtgaaccaggacaccaagaaggcgaccctgaagttgaagcagatgtaagtgtcctcctcaggttatggtagttctcatagtcaagcttcagggatggctacattgaaattcccttgcctaatacactgctatagcaaaggaccggagacctttatcataagagttctgttgactgggaaacagtgctcgaggctcagatctagagaggaaaaatgtgtagtaagcagaagggtgaactctgttgacagaggacacaaagtgcatgctgataagtatcctccaccagtggaatgagccaatccaaaccaaattaaagaatataaaggcatgtttatcggggaaccactctctggcaggttcactggtcccaaccagccaggccagggaagttgcccgtgaggagggggaccaaggagagggcgaccagaaagagcatgtgcccccagagagagagagagagagagagagagagagagagagaataagggagagagagagagaaagagagagaaactaattaagataaacaaaactcagtgtatataattacaaagtaaccattgttttatctcttctctttgctagtataagaatctaattgttagctctgacatggtgatagtatagtgtttctcctcaattctagggtacaatgtaaagatacaaagctttatcacccttgagacatactaacttaacaacctatttttttctatattttttaaagggagtaatcagcactcagagatccaagccttaaaataaattcttattgaaatgctatttttctagcaatgaattcaaactcccaattttcccggtgtaattttgtatggtctttaggcttagtctgacttgtttcggtgggtgaaaaaaggagaataagaagaattcagctcataatgttgttccacctataaggttgcagatccctttagctccttgggtactttctctagctcctccattgggggccctgtgatccatccaatagctgactgtgagcatccacttctgtgtttgctaggtcccggcatagtctcacaagagacagctctatctgggtcctttcagcaaaatcttgctagcatatgcaatgatgtcagcgtttggaagctgattatgggatgnnnnnnnnnnnnnnnnnnnnagagagagagagagagagagagagaaagagagagagagagagagagaatatagacagagggagaaagaaaagagaagccaaaatatatagacgataaagggcagagcctctagggaaagggaagcccagctcctgggctgaaagttcagggtagaggcagggtctgccatccatgccctgtaacaggtcaggactgaaggatggcgggagatcctggagactgtgtacacgtcagtatataaaatatacacctagcctttggcctgaatctcaacacaggggtcactgaaagacaaagtccagcattagggcctaaataattcttaggatttggggtgaattcaggtggaggctgattcctactagaatagcaaaggattggcaggttaagcacagcactccagcattccagagcaggcatcccactcttccttccatggaagagagcaggcctctgtgcttaacagttaattctgggttctccaatgattattctgggatggctttctacagtgggggtgtgtgaagaaatggattggaggttgttctcaggattaaaaagaacactaactttggcatcttttagagtgattaagctttagcttagaagaacaaaattgagaaacgtcaaaaaaagaaaaaatacagtgactcttaaagatgaagaggagagggaaagccaaccaagaagttggaaagtggatgggaaaagagacttcctgtttgctgagcatgttgtctgctctgttgggctgtcaagtgtgccctgtgactttgttccatgctttgtgaccaccttgataaccatgaacaaggatgtgtggctgcaggtttgaaaaagaggtcatcaggtggcaagatggtatgcacaattcagagtgcacttatgtagatgcttggatagtctttgtgttgactgaaaacaagacccctgcctttctggttggacagtctaggttcttagccctatacaggagaaatgcaagacattgtggagtggatccaatcttgtgttttgtatacatgatgtttacagtttattttagctcttctgtcatagactgctaataaatcaatacacattttgggatgacatccattccccaagttctgtataaattgatccggaaattcttctgattattggtcccaccttgtttcggggatggcttggagcatgttgatgctgacggttttctacttagctttcagtatgccttcttttttcccttctgcaatgacttttaggaaaatatgcagcatataacctacctctgaactatttccaataatggaagtagagacatatgggagaatgagagtaagagagccagagcagaaaaacctacaagtgtgtaagaggagattaaggctgccactgggaacagggtgggtctgataggcacttaggtttaggatatgctacctggcttgcagtatcctttactcccctgacatctttttgctcattctattcaatgcactggaaaagactggggccttttacctgtactcttaactagagattgtgttacttctggttcaattctgtattcactattttatttgatgagactttttttttcctgtaacctccccccccccattgttgcttggttggagttgggagctagcatttgcattttatgaacttaaaaagtgatatttagcattttttttctgctcagagtgggttacacttttttctctatccttcgaacaaatgatgaataattcatacaggaaagcctataaaacaagagattgtagagtaattggaattggatgtgaaggtgatgacttatcgtttatattgagagcagtgtcatttgcacttgaagcttcaggccagggctgtgcaggaataagccatctgacaccacaggaagctcttgaccatggtcaagtggctgagtgaatggtagaaagagccccttgtctgcccaatgctgagagaatagatcctactctatggcctcagcatttcacggagtgcaattcccacttcagtccctgtccctaggcttaccaaagaattggggacacccataagaagcagaggtttatctgcacatatcaagatcatttgaggttgggtattatttaaccagtgtcctgggtgcttaaatggataagtgaagtaattgtgaggccaacaccactactgagaactcctgtggaaataccttggtgatgtattgtctgatttttcctatccccttctagagcactattactcttcttcacagtagccctagttgaaaaagaaatttttctgcatatgtatgaaaagatggcctagtcggccatcactggaaagagaggcccattggacacacaaactttatatgccccagtacaggggaacgccagggccaaaaaatgggaatgggtgggtaggggagggggcagagggtatgggggacttttgggagagcattggaaatgtaattgaggaaaatacgtaataaaaaaatattaaaaaaaaaaaaaaaagaaatttggccatgctacaaaaggaccctttactcttgcatatgggctttctttcccaccaactactctctgcctatttacatgttaagaattattttcaggggccaaaaaagtatctcagttagaaaagagcttgctgcacaggcacgagcatgcccagtctccagcagccacatataaagtcagatgtagtgctgcgtgcttacatgctggggagctggtaactgaataccaaagggcttgataccaagccagtctcgcttaatggatggacctcatgtctcagcatatcagaaagaaagaaaaaaaaaagagttatttgcccatctaactctctcatcttgattattactgattattttttccatttggacctctgacttctcttaccaccgttggctatgtgctgatgtttccatgctagaattctgaggaattcacttgcacaaatgaagtacaatgtgttccccctcaatcgatctgatccctgaaacactgacaaagcaagagttccatttttgcaagtcttgggaaagattgatctgaacagtcccatgaagggcaatttcattttctgccagcgtatgacctttccagtgaaattaaacttgagcctcagttttgaagtggtggaatgctttttatgaacattttgcagagggcagctgtggaggatataaacccagcagatgaccccaacaatcaaggcgaagatgaatttgaggaagccgagcaagtgagagaagaaaatttgccagaggaaagtgaagagcaaaaacaaagcgaagcaaagcaagggaatgtagaaatggatgagcacttggtggtaagataatgcctggggtgaacagtgggttcagcctggtcattttaggaaatgcctagtttatggggaaggcaaatgcttatgtgagttagagaagatttgccacatcagcaagtcttggaccctttgggatgttatgcttataatcccagagccaggtaagggatgactcacgctccacatttgagaaatggatattcagcattttctggctactgatgcatttgcgagtgcacttttcatcatggtattctcattctttcactcagcgtcctgtgagacgactctcctaggtatagtaacgtgagcctctccttttgtttcaacagatggcagggaatccagaccagcaggaggataatgttgatgagcagtatcaggacgaaggagaggaagaggtataagataggatgcatgggacaggacacactgcacatgctaccctaaaactaatctcagttctgtccactttgacattcagacttaaatggtattagaaaggggtgggaacttgaagactatatgggtcatggcagttgaaagacttagaagataaaccagagtaattttaaatgaccacagatttggaatcgagaagaactgtagcagactgaaattcatgtgatctttctgagagtatccacacatctattttctctcatcaaagagagaacaaggctctgcatgtctgggggaatatggtctgactcctagagctttctctatggaatcttccctctgcctgtcacagaaattccccactgtgaaagtaacttttattcgcctgatgtggttgtcatcttggaagcttattgttaaataagctcaccctttctagttctttctgaaagctggctggctggttcaactcagcagatctggctcgaactcctctccaagctgactggttcaaattggcttctttcagcttgtgactgaattcttctgcttggtttcaaactaactccggcaatttgttctaattttctggctccttcttcttctcgggcttcaacttcttcggctgaccttcatgaactcacagacaaacccaaccccactgtactgcagtcactgtacggactcccaactgactcaactccagatgcacttcaactttctctccctgcactgctcctaaataacttttctcctgacacttgggtgcgtcctgtatctgactcattctgccagatctttctctgatttgtctctgattctcaattaggcatcactgtccaacacgattgcttctttctataaagtaattttactttaaaagtgtgtgctaacggtgcgtctgtatgccagccagaaggattaaaggtgtgtggtgtgtctgcagtccagccgagtcacacagacctagggctttgtatgggatcccttaacagagtagctctgttgctggactaaaattcctctacaccccacggagtgtaacatctaactcagagtaaatatttctatagatgggccagtctttcattctcatatgaatgaataccagtctcttccctcatgggaatgcaacttcttaattaagcttaatagtgaggttcacctggcaagggagaagccttgagttcagtctccagcacacctcccccaccaaaaggaagagaaaagaggaggtaaaatatgaaaaggactgggattcatttgaacaaaatacattagatctaatttttaatttttaattttaattttatttccattataaacttttggcatataatcactagtgaatcttacaaaaaaacaaaaacaaaacaaaacaaaacaaaaaaaacctatcacagtatcgtattcctgtaattagatagctggtgagttcagtgtgtgagagcctgtgttctgcagctgtctcctgagtgaactcctatgagtgagcatgtctcagtattttattatggtgaagagactccatgaccacagcaacttttacagaggaaaacatttaactggggctggcttagagttctgaagtttaatccattattcagagcagaaagcatagcagtatacagttagaccgagtgctagagaggcagcagagagttctatctacatctggatctgaaggcagcacgaagagtgagccactgggcctgagcgtctgaagcctcaaagcctccctatggctagtgacagtcttcctccaataatgtcacacttactccaaaatggccacatgtcttcttccgttcatatagtgacactccctatccacctgtggctgccattttttcttcaaactgccacagggaatatgttttatgtcaggtcaaaagccccacaattattctctttgcagataactcagtatttcccaagtcaaagccctaagagcaacttcataaccagtaccttgcaaacacacagccttctccctgaaggaaagggcagataggcaggtagacataggaccaccaaagacaggctgcccctgagaagagagcaagttcagagggcttgtgctctgctccagcactctcggctgccttcccgagtctctgcctcattctccctgcccctgtcagctttgtagagccagtgctaaaactcgtgccgttcccaggaaaagagaaaagcacacggctcttcataaccccagccatgctctgtgtaccaggcgtgagcttagcattctgtcacattccccttcctgctgtttgtcttcatgaaaacgcagaaattgtctttccgggaagagcgctgagaaaggagcagccttgactatgaagacatttgctggagagagcgattcatcaggactgctcctgtaacaggatgtctagtccttggtttccttatggcaaatgtggcgggggcagccttgagggattaagataagaaagaaagggttcaccttggcttcctttgaaaaattcagaagggtgaacataaaagtttaatcagtgtttgcgggttccttcgcagctctgtagtctcatcagttaagatgaaggagagtgatcctgagatgggagcgggatagatagggaccgagggacaagaaataccagcaagggcatgcaacaagccagaggcttgttctgttcctctgcaaccttctctcagagggcatccttcccctcccttgtgcccaggattcctctccttgagttcttctggggttataacactgccttgttgcacaaagccccatgcccttccttgaagtcttataaaaagtcagtgactatactttttgaccccctgttgcattagctctggattctctctctctctctctctctctctctctctctctctctctctctctctctctctttctctgtctgtctgtctgtctctctcactcacacacacacacacacacgcacacacacacacacacaccccgtaggactacttcctgaaactctccaaaaagcttttctttcccttaactgcctccctgtccactgagcatccctggctgctttgaattctgccagatctttccagtgttcccagactttctatacaggaaggagaagagtagatgtcacatttttttcaagcaccagtaacagagatgaggagctgagcagcctgtagcaatatgagcagtgaactaaaagtgtggatccgttcgttgttttagtgtgtgtggttgggcagtatccgtgcactataaatacagtgaaattccaaagtggcttcactcccatcatctcttagcctgggtgttccagctgctctagagctgctgagctgtagacttataacagccctcagtttccctccctccaagacatcactcagatgtattggtattagtatttagtccttgagaattgtatcctatcggccttacatctgtcagagctataatcatcagacttcctggctcgagaatgggaagcaaaggaagggaagggagaaaaagagcttttggtgtgtgcgtacgtgtgtgtgtgtgtgtgtgtgtgtgtgtgtgtgtgtgtgtgtacatgtgtatgttctgatgagtgggaacacaaatgtgattcacatgtattctcatgagtgtggtggccagagggcatttcgctctctggggacatccacctttgttttcaggagtaaggttggcctggcattcattatatagacatgctgtctatacagaaagccccaggaagctgcctgtccctgcctcaccagagctgggattatgtgcatgccactagtgagacctttgatgtagactctgaggattgacttgtggtccaactgcttacccagcaaacacttcactgactgtgctacgcccccccccccagcttttcactaccttttcttttattccagccatgtcatctttctatgatgcaaacctgatggttcctgaccagccctccttgtttattcatttacaatttttacagtaaaaatatttactgcaatatttctctcataggagagcattctagatgttttatccacatttgagagaagagacattattacataactaaaaagtattaggtattttaaagtatttaaatgttgaaaacagtttaaatgagttcatgaacaatttgaatactttcatgactctagttcaacaaaagaagcaaattaataagaatattctcagagagaagtaaaaggttaatggcacccattctgtagccagaggagcacacaccctacccccaatgtaacccagaggagcacacaccctacccccaatgtaacccagaggagcacacaccctacccccaatgtaacccagaggagcacacaccctacccccaatgtaacccagaggagcacacaccctacacccaatgtaacccagaggagcacacaccctacacccaatgtaacccagtcacatgagcaacatgtcaagaaacttttccagagctgagggcgtggtgtggcacagctggtagagctcttgaccagcaagttctgttgcaagcaacatataaactgggtgtggtggtgcacagttatagtcccagcaccttgggaatagagacaggagagtcagaagttcaggcttgttctcagctgcatggtgaatttaaacccatccagggatatgaggccctgctagggaggaaaaaggaaaggagggagggagggagagggaagagtaactctgaaatgggcacagctcttagaccttgcagatcagccgtttgtagctaatgctgaaggcctttcactgtcacatgccacaatctctggatccttccaggcttaacgtctgaaaaggattcctcctggttcctagctaggtgcaccatttcgctcatatgaagaacagctttttttttttttttttttttttttaccaaatgatggcacaagatagggaacgaacactaagttcagatacaaggtttgcccccatctggtagaattcttttctccagtttcaaaagcacagatttcagggctccaaatgaaaaggagcagcactggggtgtgttcgatgagacttggtgccagctttagtggggtagtaaggcaggctgttgtggaagatgtaaatgatcaaaggggaacttttgacctgggcctagtagcttaagcatattgttaagctcagaggcacaatatcatctgttcttacttagtaatggaattaagatgagcttgtgttaattttgtctcaaacatgatgaatgcattacttttatatttgtaagagtctattgtctcaatggcgagaatattatagaatatcatgttttgattccccaaatgaaagccccatttaaatcatcagttctcagctataattgaaatgacaactggggcataagctaaaatatctacaatacatccagcgagtagagaaagggaaaaacatttttacaaaggttgttatctccccagccagacatgcttaactaacatccattgtactcccagaagtagtgttctgtctcaactgtgaccaagagtcaccttgagaagttcctaaaacatacaaatacctagaccaaagctgccctggaggaaattggatcttatctttcaggggccctagaaatcggagcccttccatagctctaccttccaccaagtgtatagtgatattcggggaacccctgtttaaacaaatagtcctagggaaagcagctgaagatgacttgtgtgagtggttctgcccatttgctagacattttctcactagatgcttaaaaagatccacagtgctcagaccacgcctcccccaacccacacaaaaacaccaggggccgtggaccttttattcaacatttttattttatgcataagaagtttgagtttcagagaagtcactttagtttttcagaatcacagaatttataatttattcttggactctaactacagcttacccagacctgggataaggttgacattgttaagtattttaagaattggaagtatagagttaatatgagagaattcttggtggaaattaatatagaaaaatgacagaaggtcaccatgctataacctttaaatataacaactgacttatgacccagtcataactgggagggggcagagtgacatctttactcccagctctcaggtggcagaggccagtagatctctgtgagtttgaggccagacttgtctattgagcgagttccaggacagccagggctagagagagactcagtgttgataaaaacaaaacaacaacaacaacaacaacaaaaaacaaacaaacaaacaaaaaaaaaaaacaagacacagtcattatgaatgatgtcactacaagaacagaagtcagggacctttctcctggggtggctggactaaccatctgcagtcactggctaagcacaggcttactgtgtcttcagggtaaacacgtccagggggcatgctgacaagatggcaacaggccactggcctgtctttggttttgctcactttgaatttctgctcacctttaccactctttccatgccctcctgtttcttcagttctgtagtttccagcacgcctcagctgcacatctgctacaaatacataatgaggttacatccagcccatccaggccctttggttgatggtttagtctctgttagcctccacgggcccaagttagttagttcttcctatgctgtccctgacccctcttccacaagactgctcaagttcctctgggtttctcctgctcttatagaggtcctaagttcagttcctagcaaccacttggtggctcacaaccatcttcaatgggatctggtgccctcttctggctagcagtagtacgtgcaggcataacactgtatatggtgtatacagagcataagacaggctgttttgcctttgaaggacttctatcctgtctgacatatagatttctggatctctcctatttggaagaggaaatataacagtctgtaaacagagctgcatctctgttgactttgtagaattatttcatatccaaacaaacaagaaatttggatctaagtatcttcctttgaaaaccatatagattgtaacaattttcttactgtttgacagtttcatatatttgtacagtgaattttaatctcattcctccccactacccttccctaccctcctttctcatccaacttcctttccttctggacagttctttttaacatatcttcttcctgctgtcatgtcttcctttcaagtatggcccactgagtctaattagagttccttgcccaagcatgtgtaggagataatttaccagagcaaaggcatcttctcggtggctacatcactgaagaaaatgacacctgttccttcaacagccaggaactgccaataatttctacagaggcatatcacacatttcttcacacctagttgacaagtcaaaatttcgacttacatcatttttcaactttaattttagttcctttccgtaaagatgttctgttttggattaatatctcagaaatcgaataatttcgtgacaagtatttaaatggaaaagcagcactcagtctttgtgttctgtcttaggttcaggaagatctgactgaagagaaaaaacgggaaatggagcataatgttgaagagacatatggtgaacatgtatgtttatttctttgaacatgtgcatgtgtatgcaattgtgcctagctgcatatatatatatatatatatatatatatatatatatatatatatacatacatatatatgcatgtgatagaatatatgtgtttgcctattctgatctggaatgtcacatttacacatataaatcacacacatgcacacagacagggaccagcaatatattccctgcatctctcaggaaatgccaaagttatctggcccagctagaattataaaaagataatgataactggaaaattgttgctgtagcagtgctgcttatgagatcatttttcttcaaatttattttatttgtccaaaatgaattatgttgcatcctttggtaaaaagagattatcaatcacgagctttacatcctctcttagttatggtttttttcttttgtcttttagcctgatgataagaataatgatggtgaagaacaaggagttcacaacagggtgcatcctaaaggaagacaggagcattatgaggaggaggaagatgaagaagacggggccgctgttgctgagaaatcacatcgcagagctgaaatgtaactggactcagtttctagactgtgctcagccaacgatttttttctcaagctgctctaaaacaaatcccgcctactgaattctagagtatttaattacatacagaagtaagggtttagacttttttaacttttttattagaaatgctatacatttatatgaatatattttgataccttaggtgagaacttcttttatagtcgagttatacatggacaagaagaaaagcagtaagacttgccttcaggtctgaatctcatttcccagcgatggtgggaagatgtgcttggctttggtgcatgtctcagctcagtaccattttgttttctggcttccgggtagtctactatttatctcagataaaatgcaagatatagaaaaaaaaaggtgtatggaaaaacaatatgcaaacatcaggggaatggctggtgtcctcgtggctgttcttgcaggttcttgtatacagctctgaaagaatgtcactactgcagagtgttggcaaatgagagccatctgtacagttgaaaatcaattggaaagcccgtgtgtctgtgtcggtgtgtgtgcgtgcgtgtcaggacaaagttttttttcaaactttcaggtcactttgaataatacgtagcaattcttaaaatcacagctatcttgcttgagaggaatcacgtatgaaagttggataatattaatacccctatgaaagtctcaaggactctgtcttgtcagagaggccaaaggagctgacacacttagaaatagatgcagtatgttcagtgatgcttcctgggtgaactccccgtctccccatcggttatctgcttgctcgtcagtctccacttgctccagcatattttcctctcttaagctctgtgccttgatgtggaaccatttggttcacagttatggataggaaagcatgcgaagctacagtttaataggattatttttcagactatatgataaaataactatagcactaggataggcacccctcccttagcggctttactatttacccagaattgacctgcctttgcctatgtatgaggcattctaatggctatcaagaataatgcatcctttaaaagaaaactcaaactgaaaggttttccctgaaatgagcacatattttagtttacatcatcaatattgttaaatacattgaactgggccaccgttaatctgtgtgtggtactttcaaaataataaagcaaatttcattttctgttattatcatatgagtgtaattttagtttctaataaccacaatcatgtatggttttgattttcccagctgagcaattgtgtatgtatgcataggaaatgttccgctcaaatttagtttggatttccagtaacaataaatcaaatctcatctttatgtataaaagccccatatgtaatgtaaaatgtattatattgtacataaatactcagaatacaattattttggtaaattagtttgtatttttaatgtccctttgcagtatttaattatttgaaacacattgaaacttgggtaataatcaataaacttataaaaagttaaggataagtcttttaaagcatataatttcttagtgctttgttatctatggtttttctttataggacaatataaattaatgaattattaaatgcctttcccaaactgctttatttttctttctttttctgctttaattgacacttgaattctcatcatcaaacttctttgaaagaagaagctaataatttccattatctttaagggctagaaataagaaattgaactagaaaggtatgtaaaacatgagtgtcatatccacaattcatatgtaaatctggccattaaagcaacaatcacaaaccattctagaatatttcttttttttttttgtgactgttttagaagtgctttattatttctttttcctttaaattaggtatttatttcatttacatttccaatgctatcccaaaagtctcccacccactcacccacccacccactcccacttcttggcccttgcagtcacagtgtgggaactaggtaacctggaccctcttccatccctactgctcccttaacactgagtgatttctcttaaggttgatggaactgcaactgaaagatctgagatctttacctcttctgagcttatcattttgcacatgtctttgctcacattgtgatccattcataatattgcataaattgcacaggagtggcttatatcacttccattcagataccatcccacaactgttctgtttgttccttgattccttcatatgtatttcctggctggctgttccctaagggtagtggtttgaataggtttggccccatagatgcatgtgtttgaatgcatggcccacagggaatgacactattaggagctgtgtccttgttagaataggtgtggccttgttgcaggaattgtgtcactgagttggtggtgggctttgaggtctcctagggctcaagctctacccagtgcagaaagagaccctccttctagctgtctgcagaacaagctttcctggttgccctcggatcaagatgtagaactcttagttccttgtccagcaccatgtccgcctgcaggctgtcatgcttccagccattatgataatagactgaacctcagaaactctaagccagactcaattaaatgctgtcctttgtaagagatgctttggtcatggtgtctcttcacagcaatggaaactctaactcagacactcaatcagtcaatgagctagctttttatacctcccctttaaacactaattctattcgagtgttgtggcagagaccttgtctctgtttgaccctactcccaggtctcattcatttgatcagcctaattttttatgtcctactaccttcaaagtcataatttttaaaactacatttacttgtatcttataaaaacatttctcaataaataaaacctaataaaaccttctctttctaaattgtgtttctattcactagaatttgccaaatatacatatgaagcccatcattaattctatcttcccattccacagactcctaccagatgccttccattttcccactgatcaatagttacctgctcctttcttcactttcttgcttctaatttctaaagtttgagccagcagagctttaaagataagctcaacattgtgcaattattgaagaaattgccattacatgtgagaaaaatcccaagcttttgaacatggtctacacagttcttcacaatatagccctcatctgacttctttagccggctaacttactttctactgaactataatagcatgatttgtctaagtcaagtacaccttcccaagatgttctagataacaggccctggccctgttctctcagttggaaattgaccagcagaccccctccatttgcaaaaaccacatgatgcaggaagaacagatagatgactcaacatgtatcaatttgatttcccctttaggatattgcttttgaaagacaattttagcatggcatccctgaagaacttgtaacagtgtttattggccagtatattttcaaggatgttagtagaactagtagcagccttcaaagctagaaatatgactccaggccatggggggcaggggttgccttttggtttgccttcaaggtaagatttggacaagtttcctaggtgaaccttcataaactgagagtttcataatatagaggctcatatattgtgtcagaagtttacacaggtacttacaaaggtacacatacttagccccaggacacttggaagggaggggtctagtgtgatggggaagccagtgcagcctttgccagagctgtacatatttcttccttttgatggatgattgctttgggtctccccttagctgccagttcctttgggaactgatttttaagttggaatatacttattgaagagctgtgatgcatagtgacctgcattgacgagtcattgccaccatcattgggagagatgctgagtgcaaaacagaggattctgcattctcataaaactttatgtaaacagaaagcagggtatgtctggcctgctaactatagaatgctaatctatgtggcctaaatactctggtgaaaatattatttcagtaggaaacaagagcttggggtcttcaggtatggacctattcctttgttatcatccctttgactttttagttggcaaatacccaacagtctctggactgctacatcaatacaccattttacataattggaaacaaaatatatttgtcctttaccatcttggctgaccttgttctccccattctctgtatgttactaatggagcttgaaattaaatgtcatttctgtttatctgttaacacacttctgtttttctattaacacatatacagcattgcccccaaagtacatgtcttctaaagaactggttcactgggcaacatagggttgagcaagatctgatgatgtcatttgatttggtatgtcccttcctctctgaagatttggagtatgtataacaattatactggccataatgtgtaacaattatactgttcactcattacagttttgagagatttgatgtttgtggatatttgacttttgttaagtttatgtaatctacaaaaatttttattgatttattttaagacatggtcttgttaaatgtattccccaggttgggtttgaactttgaattctcctagctttaatcctctagcatttggaatgaatgctctgcaaggcctgagcatggcttagatgtatgtgcatgagtgtttgtagatggtcatgtgtacctccatgtcagtagggggagtcataaaaacatgtggaaatatacatgtggagttcagaggatgggctcacatctcatttctcgggagttctctaccttgcttttaaaattaaaaagtatctttcattccttttcctgggcctggagcttgccccgtaggttagattggctggacactgagccccacagacatgcctgtgttcatctctataacactgggattatatgtgagtagcactatgcctgacatttttaaaatatggggtctaagaatcaaactcaggtgcttagacctgtaaggcatgcagcttaccaactgagctatcccttttaccctaccttaggcattccaataaatgctgtcaaaatatcttttacaaccctcaaccctagccaattactatctgtggtggtttcaaccctcaaccctagctaattcttctgctggagaaatctgacatctagctttctctcccctgagtgtgcaaaagattgctttactgagtaaagaaacatatagtttaatagtggtgaccatgtgggactcaggatcaaatcataaaaggtaatgtatcctccttgctctggcttttgggtcactgactatcaacatcccacccaccaatctggggctattgagccagagtttgaaggaggcttacattcacacagaaaggaagtggtgtttcctagcaaaggcaacactagagaacttggatcgagtgaaacttcaaaatcccgggtcaaaccttcagatgaagcaatttgattgtatgtcatgagaaactcagaaaacaagctaaaaagaaatcacccccagccttcgctagatttcagagaattgggtacactgcagtagctaagacacctaaacttcagagcaatttattgaatcaaaaatgagcagatcagtggtgactatggtgtacagctacactaccaggggccatctagccacgtgccccactatattggtgtagaagctggagttcattccaatgaactgaacaagcttaagccaattcacttgatgaaagttattagatgactttaatagctattgctagccacttggtaattttcttgttctatttttgttttcccatgctgctttgttcagaaattccaagctctttctcaatataatattgagaacaaagcctagacactagtatttatttaaaataaagcaaaacaaacaaacaaaatcccatcatcccagtgaatgtcatcacggggacactatgattctacgtggataaaacacacaacaaatcttggtgatgatctcaattctgactctagaggtgattataggaatccatacatgggttaaaattcatagagttgcctccaacaaagaaaatataagattgcttttactggacaataattgaaaatgaaataatgtagcctatacaatcctttggaaactaccagatgattgatgttcagccaagtgagattcctagatctgtgagtctaagggatgatgaacaagctctgacgtaggcattcataactagggtatcccatgttaacaaactgcatcaattaacacacacatccaaaccctcctatatggatgcaccacattatctatgctgaagtattttaaagtatattacagacatgagaaactagagctgcagctgcctcgggaatttcagaatactgcatgggggagtttactagtctccattcttagaggaaaacaagaaatagaaagcctcatcagataattgtgtcacctgaaaacacttctcgaacccacaaactgcagctcttaaagaattacaaagaatccccaaagaagaatatttaagttgtttaattttatttctgattagaaacatcggggaaaaaatgtatcctaaaatataaaagtatctaaatatacattaaatgtgtgaaatacaaactttaagaaagagtactctggacttccatattcagtttttatatccctctgtcttttttttttttttttacaatagacccctcctcctggtcctccctcccacagttcctcatcccatttctcctctccactgtccccaagaggataatctcctagcacgaggcctccactattcctggagcctcaagtttctgcagcatttctctggnnnnnnnnnnnnnnnnnnnngaggccagaccaggtagtcctctgctatatctgtgtcagcagtctcagaccagctcttctatgatgcctggttggtgactcagtgtctggcactgccaggggtcctgattagttgagactgctggtcttcctatgaggtcatcctcccttttcgcttcttccttccttccccaattcaatcataggcctctctgactttagtccaatatctgggtgtaagtatctgcatctaaggcaactgtgattgggcctctcggaggacagccatgctaggctcctgtctctaagctcatcatagcaccagtaatagtttcaggccttggtgtctccccatgaggtggatccctagttgggccagtcactggagcacctttcattcagtctctactccatttttgtccctgcagttcttatagacaggaatacttctgggtcagaaaatttgtaggctggtaacaccatccctcttaaggctctgacgctctactggagatggattttaagttccctctccccacttttgggcacttcatctaatgtccctccctttgagtccccagagtctctcagctcccacatctctggtattttctagagggtcttccaacctcccatatttggaggctgcctgtttccattgattctgctggccttctgggcttctgtcctgttcccttccccatacctgatcctgtgtccctttcccctcctcttcccctctcctgcacaaatccctccctccctctacctcccatgattattttcttccccctactaagtggaattgaagacccaactatacaactcttgggcatataccgaaaagatgtcccagcataccagagggacatgtgctccacaatgttcagagtgtccttatttgtaatagccagaaggtggaaacaactcagatgtcccacaatagaagaatggatacagaaaacatggtacatttatacaatagaatactattcagctatttaaaataaggacatcatgaattttgcaggcaaatggatggaactagaaaatatctcaagtgaagtaactcagccccacaaggccatctacacatacagatgaagcctctagtccttccttatgtactctttggttggtggtttagtacccgagagctcttggggagtactggttggttcatattgttgtacctcttttgaggctgcaaactcctttggctccttggatcccttctctagctcctccaattggggatcctgtgctcagtccaatagttggctgcgaacatccacttctgtaattgtcaggcactggcagagcctctcaggagacagctatgtcaggcttctgtcaggaagcacttgttgacacccacaatagggtctgcgtttggtgattgtatatgtgatggatccccaggtgggatagtcactggatggcctttccttcagtttctgctgcacactttgtctctgtatcttctcccatgggtattttgatccccttctaagaagggcagaagtatccacactgtggtcttccttcttcttgagattcatgtgatctgtgtattccaaacttctgggctaatatccacttatcagtgagtgcatacgatttgcattcttttgtgattgggttacctcactcaggatgatgtttcctagttccatccatttgtccaagaacttcatgaattcatcatttttaatagctgagtagtactccattgtgtaaatgtaaggtaaatccttatagtctctgtgaaaggataacacactccaacagcctgggtaactttcctgatccttcattccctccgaaccttctggggaaaatctggagttagcaaactcagtttatttggcttatgtcccagggaacttcaaaaacttttgaggcatgcaaaaatatgctctgcacacacgaatataaatcactgaaaatgtaggtaaacaccaaaagagtaaaactgcaagtcactggcagctgtgttttttggcctcttgattctgttatttctggcaagggcagacaaggcatttctcccagcagccatttctgctgcttgttcacacattagcagcaggtcaaactcacaagcatatgctctgagtccaacatctgtctagttaagtttgaatcagaaactatattgagacatggaagaaaacattgtctttttaatgcaaagagtgtggatctggaaggacttttgatggggaagagaaaccatgatcagaatacactgtacggaaaaaaaaaaacctatttccaattgtttaaaaataaaaggtgtggttaagtttccgttttagtaggtgaacaccacctccttctcaaaggtttttaggttgtaaaagcacacacagaagtagaagcaaatgcctgtttaataaaaatcagagggaaagagcctgaaaaaacagttaagttatacatttagaaaagtaagcaattagggccattagataggatgcaaggtagaatattgacttctgtcttaaagatgcattttatttagtgtggacacatttgttaaaagttttgacctttcaataatacaagttatttacatcaccagacagccagggtcattttcttctatgtctaaatactctgagaacattttcctgaccttatgggtaaaatcacagattattgcaaatgtctttgaaccacaattactcatgttccccttctttgccccccccccccaccttttgctaaggagctgactgagatttaaagtttctttgactggtcattaagatgaaaagatttaaagctagtaactggggtcaagatatttggcccataggctctgcctggatgagcaggttctccatcttcaaagtctttacagtagccaagctaagatgtttaactgaatccagattgtgcaaggctaaggtactaaggtactgctgactgaagatgcagtggatgcctcctgcctggagatgtggaatgaaggatgtagcctcctgtggccacttgaactgggttcccctgaaaggcaggctgaggtgagaaaagaacgaggccaagacaaacctttctgttcaaagcctctgaagtttacttggagtccttgcttataaagagggtaggcccattcaccgccagcccattcttggtgcctggaaccagccagtaggtgatctacagggtgtgtctccggaagtctcaaggacctttgaagagcaaatagagccatcaaggtcagaaggctctaccttaggtaatctccttcttagtggcagcaaggtcaaagtctggattagcctgcttcaaggctgagggaggctacagaaggagatttgccccaagtctaacatgtgcccaacctgattgtctggtgcaatgaaaagttgcaaagctaacttgtggtgtatttcaatgactgtgggcacgtcttgatctggatgtttgactggttccatgatgctattctacagcccaagttctccgtaggtattcacagtactcagaattcctgtcctcccttttagtagcctcttagttttcactttcttctttgctgttaaaaacctcacagacagactcacccaacagaagggaaaccaataattttcctcccttcagcttcatgtctataaatgccctcagtttttgataataaatccactgaattttttaaaaaatgcctgtacatctgtacacaaagcagattatacatgtgaaaattaatccttcaggcactcccttggcatattcttagcccttcaggtgacatgtgatgagaactttcaagcaaacctggttatagcccacttctgcccaccctacctttcattctcccagattggtttactaaccacacaagatggtgtgcatgcacaatgagaggaatggctcttgctcctatgaaggctcgattctccagtgtaggggaatgccagaacagtgaagcaggagtgggtgggtcagtgagcaggaagaggggaggggggggttcagaggggaaactaggaaagatgaaaacatttgaaatgtaaataaaaatttgttattcaaaaaaaaaaaaaagaagaagaatatgggtgttttgcctgcatttatgtatggacctctacatcccggtgctcatggtagccagaagacatcaggtcccctggaattggagtcacagataattgtgaggaaccaagtgggtactgacagtcaaaccaaggtcttctggaagagtagtcagcgttcttacccatggagacgtctatctctcctgccctttttcacaagaataacactaaagatgatgcttacactaaagcataattaaccacatatatatttttttttttttttggtttttagacaacgtaggaaaagaaatgttctatgcttgatatcaataatttttacataagctcattatagtgaaattacttcttttggatagaccttttggcagccactacgaatcatcacagacattgttaaatcagttccttgagagcttcatcacacaaaaaccatgagacctgcagctgagaacccgagagaagcactgatgccttttaataaagggaaagctcaacagattctgcccttgcatggagggatagagatgattttgtttgcatatatctccagcctaaaatttcaagaggaaaccgttttagcatttaagtgtatcacatgttctttttattgctgagaaattaccattatatcattgccttacatctgaaaaattaatgaaatatatctacttaaaatttttattgtagtgatctcaccaataaaaaatttatattttcatagctaaaaaaggaaacctcatactcttcttcctgttcttcccctgtgatttcacatcagagacagagggccagaatagctttagttctgaggctgatatcaacaatgggcaaacttttccaggaacttcagcagat

SEQ ID NO: 324 - DNA, 4455 bp, Mus musculus
  misc_feature (1)...(4455): n = A,T,C or G
natcagtgacaccagcccaccacccccccttaacctgaccagaccaaccagtccccatctcttcatcaataccgagggaccgttcaaggggacgccgcctggagccaggtccctttgttgggcgcgcgtccccctaaccagtggtagcgacaaagtccagcagcgggagccggcgcgaggggcggggactgacggtggggacagcgaggccaaaaagtggggagtagggaaaaccaagccggctgcgcgcggggaccagtagcaagggcagcgggctctgaagtatgcaaagagactccacgcgggcccagccactcgcggaaatccgacatcgcagaagtttggtggctgctggccgggtggcgtcgatgacctggcgcccagccggccgcgggggctgagcggccgcctcttcctctctggtccggcttttgtgtctcgcgtcttctgctcatgccgtgtccagctacttctcgcggtggccgttgctgagctgtccgacgcagccgaggaccgaggacacgacggctcccgccgccgcagcgcggggcacaggagggactatgggaaacgggatgtgctcccgaaagcagaagcggatcttccagacgctgctgcttctcacggtggtcttcggcttcctctatggcgcgatgctctacttggaactgcagacgcagctgcgcaaagctgaggcagtggcgctcaagtaccagcagcaccaggactctctctctgcccagttgcaagttgtatatgaacacagatcaagattagagaaatctttgcaaaaagaaaggcttgaacacaagaaagcaaaggaagatttccttgtttataagttagaagcacaagaaacacttaacaaaggaaggcaagattccaatagcagatatagtgcattgaatgtccaacatcagatgctgaaaagtcagcatgaggagctgaggaagcagcacagtgacctggaagaggaacaccggaagcaaggggaagacttcagtagaacgttcaatgaccacaagcagagatacctgcagcttcagcaagaaaaggaacaagaactttctaagcttaaagaaactgtatataatttgagagaagagaatagacaactaagaaaagcacaccaagacattcacacacagcttcaagacgtcaagcaacagcataagaatttactctccgagcatgaacagcttgtagtgactttggaagaccacaagagtgcactggctgctgcgcagactcaagttgcagaatataaacaactgaaagatacactgaacaggattccaagctttcgaaatcctgacccagtcgagcagcaaaatgtcacctttccccatgggactcaccctcctcaaggttacaacggaagagagaagctgacaggagagctccaagaggtgcagccgaaccacgaagcagggcctagaagaatggaagagaaacctctgtcttccatgcagaaggatgcaggattccaggctctagaagagcagaatcaagtggaacccagagagccagaggagcgtcaagtggaagaggaacacaggaaggcactggaggaggaggagatggagcaggtggggcaggcagagcatctggaggaagaacacgacccatcaccagaggagcaggatcgagactggcgggatcagcagggacagaatgcagcccaccttctggatggccaccctcaagctgaggtggagcattcgaccaaggcagctacaaacttccaatccccatatgaggaacagttggaacagcagaggctggcagcgaggagagatgaggaagcccagcggctgagagaacatcaggaagccttgcaccaacagaggctccatgggcagttgctaagacaacagcagcagcaacagttcctggccagagagatggctcagcagaagcaggtagcccatgaagatggccagcagcagcaccaggagcagctaaggcagcaagctcattacaatgctgtggagaatgacatcgcacagggagtcgaggaccagggaatccccgaagaagagggaggtgcctatgacagagataaccagcgccaagatgaagctgaaggagacccaggcaacagacaggaacttcgtgaaccaggacaccaagaaggcgaccctgaagttgaagcagatagggcagctgtggaggatataaacccagcagatgaccccaacaatcaaggcgaagatgaatttgaggaagccgagcaagtgagagaagaaaatttgccagaggaaagtgaagagcaaaaacaaagcgaagcaaagcaagggaatgtagaaatggatgagcacttggtgatggcagggaatccagaccagcaggaggataatgttgatgagcagtatcaggacgaaggagaggaagaggttcaggaagatctgactgaagagaaaaaacgggaaatggagcataatgttgaagagacatatggtgaacatcctgatgataagaataatgatggtgaagaacaaggagttcacaacagggtgcatcctaaaggaagacaggagcattatgaggaggaggaagatgaagaagacggggccgctgttgctgagaaatcacatcgcagagctgaaatgtaactggactcagtttctagactgtgctcagccaacgatttttttctcaagctgctctaaaacaaatcccgcctactgaattctagagtatttaattacatacagaagtaagggtttagacttttttaacttttttattagaaatgctatacatttatatgaatatattttgataccttaggtgagaacttcttttatagtcgagttatacatggacaagaagaaaagcagtaagacttgccttcaggtctgaatctcatttcccagcgatggtgggaagatgtgcttggctttggtgcatgtctcagctcagtaccattttgttttctggcttccgggtagtctactatttatctcagataaaatgcaagatatagaaaaaaaaaggtgtatggaaaaacaatatgcaaacatcaggggaatggctggtgtcctcgtggctgttcttgcaggttcttgtatacagctctgaaagaatgtcactactgcagagtgttggcaaatgagagccatctgtacagttgaaaatcaattggaaagcccgtgtgtctgtgtcggtgtgtgtgcgtgcgtgtcaggacaaagttttttttcaaactttcaggtcactttgaataatacgtagcaattcttaaaatcacagctatcttgcttgagaggaatcacgtatgaaagttggataatattaatacccctatgaaagtctcaaggactctgtcttgtcagagaggccaaaggagctgacacacttagaaatagatgcagtatgttcagtgatgcttcctgggtgaactccccgtctccccatcggttatctgcttgctcgtcagtctccacttgctccagcatattttcctctcttaagctctgtgccttgatgtggaaccatttggttcacagttatggataggaaagcatgcgaagctacagtttaataggattatttttcagactatatgataaaataactatagcactaggataggcacccctcccttagcggctttactatttacccagaattgacctgcctttgcctatgtatgaggcattctaatggctatcaagaataatgcatcctttaaaagaaaactcaaactgaaaggttttccctgaaatgagcacatattttagtttacatcatcaatattgttaaatacattgaactgggccaccgttaatctgtgtgtggtactttcaaaataataaagcaaatttcattttctgttattatcatatgagtgtaattttagtttctaataaccacaatcatgtatggttttgattttcccagctgagcaattgtgtatgtatgcataggaaatgttccgctcaaatttagtttggatttccagtaacaataaatcaaatctcatctttatgtataaaagccccatatgtaatgtaaaatgtattatattgtacataaatactcagaatacaattattttggtaaattagtttgtatttttaatgtccctttgcagtatttaattatttgaaacacattgaaacttgggtaataatcaataaacttataaaaagttaaggataagtcttttaaagcatataatttcttagtgctttgttatctatggtttttctttataggacaatataaattaatgaattattaaatgcctttcccaaactgctttatttttctttctttttctgctttaattgacacttgaattctcatcatcaaacttctttgaaagaagaagctaataatttccattatctttaagggctagaaataagaaattgaactagaaaggtatgtaaaacatgagtgtcatatccacaattcatatgtaaatctggccattaaagcaacaat

SEQ ID NO: 325 - protein, 731 aa, Mus musculus
AAASSSLVRLLCLASSAHAVSSYFSRWPLLSCPTQPRTEDTTAPAAARTGGTMGNGMCSRKQKRIFQTLLLLTVVFGFLYGAMLYLELQTQLRKAEAVKYQQHQDSLSAQLQVVYEHRSRLEKSLQKERLEHKKAKEDFLVYKLEAQETLNKGRQDSNSRYSALNVQHQMLKSQHEELRKQHSDLEEEHRKQGEDFSRTFNDHKQRYLQLQQEKEQELSKLKETVYNLREENRQLRKAHQDIHTQLQDVKQQHKNLLSEHEQLVVTLEDHKSAAAQTQVAEYKQLKDTLNRIPSFRNPDPVEQQNVTFPHGTHPPQGYNGREKLTGELQEVQPNHEAGPRRMEEKPLSSMQKDAGFQALEEQNQVEPREPEERQVEEEHRKALEEEEMEQVGQAEHLEEEHDPSPEEQDRDWRDQQGQNAAHLLDGHPQAEVEHSTKAATNFQSPYEEQLEQQRLAARRDEEAQRLREHQEALHQQRLHGQLLRQQQQQQFLAREMAQQKQVAHEDGQQQHQEQLRQQAHYNAVENDIAQGVEDQGIPEEEGGAYDRDNQRQDEAEGDPGNRQELREPGHQEGDPEVEADRAAVEDINPADDPNNQGEDEFEEAEQVREENLPEESEEQKQSEAKQGNVEMDEHLVMAGNPDQQEDNVDEQYQDEGEEEVQEDLTEEKKREMEHNVEETYGEHPDDKNNDGEEQGVHNRVHPKGRQEHYEEEEDEEDGAAVAEKSHRRAEM

SEQ ID NO: 326 - DNA, 105499 bp, Homo sapiens
  misc_feature (1)...(105499): n = A,T,C or G
actgttttttcaaatatgaattcctcttaataatcctttttcacattaaccctttctttcgggtccatttctgaggatcccacactagcataaccagttgaaattgccggttaatattctactctttataccataacttaactattcttcaacagttcaacctttaggttgtttgtatttatttttcctacaatagctagatttgtaatgataatctttgcatgaaaaatgtttctctgggatccagattactttctatggatagatttctagaagggaaattactaaataagagcctgaatgaatattttatggtcttgatcatattgccaatttgctttccagaaaatgtgtatcaatttatagttctctttgcagcatatcttttaaaattttttaccatattgaattaattttaatatgaacttttttaaaactttgctaattttattaatgataaaagattattagtagtgtttccatttctttaattgctaatgagattgaaaactttcttacaaagttttcagttgtttctactctatgaattatctgtttatgaactttgtaattctttaattatcttagtgttttcaacaatgtacagttatttaattgaaagttgtaatttatgcaatctatttaatctgtataaatatttccctatgcgtttgcttttaaattttttagtattgtttgaaattcaacagtttaattttcaagtagtccaatctgtttgctttcccttgccattttttctaatgcttctctacttagaaagttgtactacattttaaatcagataaatgttatcctatattttcctctagatttttttcttcttatctctctttctaacatttatcttatgaattcctctgctttttattttgacatatggcaggggtgaaaaatagattccatcttgtgtgccaagttgattcatttactcagtaaaaatttattcagtgtttactatgtaccaggcacagtgctagacatgattagtaaaagaaaatgttgagatgtctattttttaaagtgttttaaagagattttttagatgttgtttgtgaagctttttaaatttctcaaacaaaaagaaatacaaatacaacacatcatgctagtcacatctgagatcaactagaaagcacacttagttgatggaagagaaagaggatgggagaaatgtgtgcaatggcagttccagtgctggggatcttgtcctcctttgatatggtgtgatatcaactcactcctcttagaaaacagatcttatgatcacagatatgctcaacaatgttaaagactgcgaatgagtagaaagcatcattatcctgaagagaataaattgattatcatgggttactaaaaaatactcaccttttttccctctcttcatctaattacctaaaagtagtaagatataataaaagtttttctataaatattttaacattcttgtgattatattgtttataccactttacattctaaatccatttaacattatgaaatatttgcatatgtcataaactacttagtaagcatcacatctaacaattaacataaaaagaattttaatggaccaattactcttttcaaagaagaaatagtttctcttcttaaatattatgcataggtattgtcttgcagattctctattggggatattattataaactcatgcccattttttgagtgtacccatttaatcaaagtaaattaatacaagcacacaagaccttaggccctcaaacaaatttcttgttcagttatctaggcaatcttttcaaattccttctttttagtaactcttcagatcatttgttcaataatttattgagcctttaatatggaaaatgaactactgtgtgataggatattgccataagaaataatggtccatacattctaatgactgaggcagacccttctttgcttcttagaatctattcttaaatgtaactcttcacatcttcaacctatctctctccactggttcctttccaaacactgttaagtatatgctatccaaacaagccaaaaaccaaaaatcaaatgaagccaagactcaaaaccaaaaagcaaactttattttaacctggtttcttctattgaagctacacccaatttaatctcccttctcagccaaacatattaacaccaaagttcacccttaccacacctcttttcatatttacttttacccatttatctgccatactcttgcaattttctacctcatccctactctgttaactctatggcctgtttggctttattttacttgccctctcagtagtcctatcagtaacactcccctctcttgaagaactctcttctggattcctttggtttcctggtcacttttctcacataatttttctcgaccaacaattcctcctgttaccttactagtcatttgaatgtatagtagaagcaattaatgttacttacgcaactcactcgattagaggaggctctcctcttctctgcaaatcagatcaacagaagcctccctgtccttcccctccacacttcagggctgaagactggcacataagctaatctcgagtaggtatgtacatgtcaattgagctgtgtgcttagcagagacaagtggtttattctaagactgtttatgcaattcttgctgttttcattatgtaatttaaccaaatattatgcaaactaagaaatatgaggctaaaaaagagttatttctatgaaaattaaggtgaatgctttggaaaagctccatgatggctgatagcttaaagaaaaattgcagtcaaattaggtgagcaccaagaccaagaaaaaaaaaatcctttacatttagatgtattttacattgacattaccttaccatccaccactcaatgaagctgaaactggaaactgtgaatggtgttctatggctaaaagacaaacctaagccctaaccaacaacaggtccacccgtaaagcagaggccttgggtcccacattaaaagagaattcagtgaaagtacagtgatatgtttcttattttattctttattatttttattcttatttatttattttgagacagggtctcgctctgtcacccaggctgaagagcagtggcaccatcagggctcactgcagcctggacctccctggttcaagtgatcctcccgtctcattgttctgagtagctgggattacaggtgtgaaccacaatgcctggctaatttttgtatttttttgtagatacggggttttgcaatgttgctcaggctggtctccaattcctgggctcaagcagtctgcccgctttggcctcccaaagtgctgggattacaggcatgagccactgcgtacggcccatttatatgttttaaggtgtctttgcatcacttttataatttttggctttaactgacttcactgattaaccgatcacttgtctcaattacctcaagaggccaccttctctagaaatatcttgattgcatccttaggcctattcttttcctgttctgctctttccctgagcaattaaatttccaaccagagcttcaatatagtctttaaacaaattaatacaaagtccgcaagctctttgaaatgaggatccctcgtttattcatcactgcatcacccatcttgcactctgtccttgcactgtgccttgcacacagtaactatttttaaaaatgttgagatttaaactgtatttaagaattagttataaattacaacccaagaattagaagtcagtcttgaatgaatgtgtcacaagaacatttctttgttttgcaatcataatttaccccttctcagcaactaaagaagctcgcttgacaagtataattggaaaattatcattttaaattgggtagctgaagcttaattttaaaaagtaaatggtagtttttctgaaaagtatgaaactttctgaaggtaagcaaatggtccaatccattttaggtggacaatgacaagtaccactacggcactgagttttacgtaaagtgagaagtttcgcttctcaagtgttgtggattaatttcttaggcaattttctctgagcattgcaggagagctatggttatcctttccattttacagatgaaagaattaatggtcctaacagttacttactcttgaccttcaagatcatttgtaacttcaatggaatttgtgccttgatgctacacatcttgagtcatcttctaaattcttctaaggctcgttagaattgtgcaggagaatcagggacaaactagcaaaaagtcaagccacagttgtcacttatctactctgcaggcagtctagaattatgccattggagttcagtcttttcatttaatagtttctctcaaaattgttgggtagaagactaagttagtaattcagttttaatatcttcctgttagttaacatacccagttttctttcctctgattaagcagctaaaggaaaggaagagtcattttagattaggctactttgtcttgaagaaggcaagtccaagtttgtgtatatgagtgggtgaggttgggagagaaaggcatagtcatagtctaggattctggaaaaccaagggggataactaaaattttggatgccaggagctgaagagttgaactagagagcagagtgatccaagacaaatgtttccatttcacaattttaatttgggcagaatttaatgctgtgataactcaattcttcttatattttgtttgaaaatttgttccactttatttctaactaaaattattggtagtcattttgttctgactcaaaatattcctgaaaactatagtttaaatagcatttatgaagcagattattatttcccttaggaataattctaaaattaaacgttgaatttctgacccagaacttggcattggatactttataaatatgaccagccaccctcatcacaattaaaaaattactatatgttataacatattaaaattgtaatgccaattttataaaatggtcatgagtaaactaagtatagctttcataaaaatcaatccaataaattataatattttgggggaggggacattaaaaaatgtcatgttttactggccactgatcttttctgtggtatctctgcttatctaaagtctttgactattaaaggcagtgagttggtgagaagctggatgagccattggaagatttaggaagttcacttctgaggctcacatatgctccctttccattctttctaacttcctatgaaattaaactgaaaaaaaaatgtggtagttagctcattatatgctagctgtaacaaacattaagcaacatattcataatgatttcgtatactgccttagaatttggaaaagtttagggttggctagatatcctgctttagaatgttgttagaggtttgaaatgatagttcctcttcctttagactagctacacatcctgtggcaaatagggacttctaaatcacgtccattattagtagtctgtattcaaaaggtatttatttatttttattttattttatttattttttttttgagatggagtctcgctctgttgccaggctggagtgcaatggcgcaatctcagctcactgcaacctccgcctcccaggttcaagcgattctcctgcctcagcctcccgagcagctgggactacaggcacacgccaccatgcccagctaatttttgtatttttagtagagacagggtttcaccatgttggccaggatggtctcgatctcatgacctcgtgatccgcctgcctcagcctcccaaagtgctgggattacaggcgtgagccaccgcacccggcctcagaaggtatttcttagtgatattgatggtaaggtttctctcattgaaaagcatttttataaataagaacaaatcatctactttctcctctgccctcctcttcagatatagttgaaaattacaaaggtggcaacgtagtgacagatgtaaacaaggcataaagatacattgagtggggttcagttactcagttatgcattcaaccacagacctactttttagtttgttaatcttctaacaattactactaggtcattatcaaaatcctatgaaaaaggagtctcaaaacatctttcacaaaatgttcaaaaagacataataccttgaatgcagctttctttacctctcaaaacaggtcaggtaaaagtggcaatcagcaaggcaagtgtattcattaggggacagcaaactgatgaaatggcaaaaaggtgaagacatcatagagtgaagattgttttataggataaataacttttgtaattgtcagatgaaaagattaaaattagtttattaatactgaaaagctattttaaattttatttactattcatcaccttttcttaggtgatgatttctcctacaaattacaaaatattgagttccatttgtagtaaagaaatttaaataaaagatttagataatagaaattatttactctaggatcctaaatattattaatttaaaatcttacttttagaaattatacgtcagctgtctctctcaactttttattttttccttcccttattttgaaaatgaacaaatttgattaaaatgacaaattcacttaagttagagagaattaatattcccaaatgttatatttgcccttctcaaatgtaagaccttgagtatctttaagttaatttcttcctgcctcagaaataaaatactaaatcagtaaaattcttcagggtttataatttaaagttaaatatattgttaaatatatggaatatagaaatataattatatatactatttttaaaataacaaagaagcaaaaataaaatagaatgaacaacacaccttccaagaccagtataaacagctgttatgttataattgctacccaaaggcaatgttatgtaaattcattttataggccttggatagcttcctcatgttggccgctcaaaagctctatactgacattttcaggaaactagcagcatactttaccttggaaatgtaatattataaaaataccaccattagtaattttatgtacttctacatacccttcttgaatttgaaataatggataagttcaggtaataatttttgctgtctttcaaattttatgactaaaatattgagttgtgttttatggcctgcatttattatgttctgtagagtcagccagcagctttaggcaaagaatatctttggagtctggaatcagatgcaaaggaatcagaggtttaagatgaatcatacattcaggaaacataagaattttccaaagattctaaaatacatattgtacaatatatgagcaataattttccaaccctctatacaacttctttttcttttgtggctaggataattttctcttcaaatatggggcaagattattgccataaactttatttatttatatatttatttattttgagacagagtctcacctctgtcgcccaggctggagtgcagtggtgtgatcttggctcactgcaacctctacctaccaggctcaagggatcctcccaactcagtttcccgagtagctgggactataggtgcacgccaccatgcccagctaaatttttatatatttttttttttgtagaggaggggttttgctatgttgcccaggctggtctcatactcccaaacttaagcgatctgttcgcattaacctcccagaagtgctgggattacaggagtgagccaccatgcccagcctaaatttggatagtgtttttggaggaagagtttgtttaacaaagtactctgacaacagtaaggaatgtttagttatgaggaattttaaagagattccagtaattatccaatgttaatttctgagagtcaaactaaaaaagaggaatttaaagtggtagatttaataataaggaagattatgtagtatttacacaacaaaactcccaaactcctttagactgttttcttttacaatcagattctcatgttaatggagatataatttcttactgtaacttgtttaatagaatgagaacattgtttctattgaagaaaaagacatagagcagggtttggatctggattctaatcttgctgagtaactaactttatgcaagacctaaaaggtcctagagctgtcatagtcactttgataaactttggcttctttaccaacatgaaagtctaacaccctggctgtgatcagtgagacagtgtatctgcacacgaaagcattttgaataatttaacgcaagttattatttattaaggaaaagcacatgcaagacacactttatttttacagtggtataaatgccacagggtagcatcgttataaattcagtttattttagggctttagcaacctataatttcagagtccacctaaaaaaacttttgcaccaggaactgtctttctgttgcatttagctaaagagatttacccccattttgagcactcaggcccattagcaatggtaacgactaaagtccagttagaatataaaaattatgcagtgtatcataaattacaccacactatacagacagataaaatttacttttcttagaattcaggtcaacagcagaaacaaaaattatcatttgtgcataaccttaattattcccctcaagtacacagaaaaaataaatgcagtatacatttcttcgaagaggtttgtggttactacctttcctgtgctgtactagtttttacatagggaacctttgttgccctttaaaatgtaatttagaaatgtaactgatgtgttttgccaccaataaaacaaatacatatgacaaaatgaatggatactcatttcagtctgtacgatttgtttttaaattattctatttgcagctagaggagaaatgtgagaccatttctttcctctctgccaatggcaagccgatttccccagcccacgtggacaattgaacattaagtctagcgtgcttccagtctcccgactcctgccgggccatctgtgggcacacacacatctaggctagtacactggatggggtaaggcagtcgacatggcatctctggtttgactaccgggattgtgctatgtagctatcccatgtgtctgccgcatcagtttattggacagggaaagaaagtgtactcagcagagtgcacacagttactgccatccattctttcgttcatacacacattttactccgctctccacgtgcgttccgaacgagaactggaacacacacacacacacacacacacacacacacgtgttcaccgaacctcacccagactcaggcccggacaagtcccccgcccacccaaagctccccgcccttcgcccttccgcctgcctcttcccaccctctccgactccacgtgggcgcaccccggcgccaggcggccgcgctgcccacagagcccctagccggccccggcactgggagggaaggtgcggccctggggtcggacggacaaagccggcatccaatcgagcccggcactgcctccccgaagggagggagcgtctgctcggacgggcccaatgagcaaggaggccgagtgggacttcctcccggaatcccgttggccagaatagccgggccgtgggtgacacgtaagttgggcaggaggtggcggggcggcagaggcaccagccgacccgtcagtgacaccgctgtgccgtccccaaaaccagccgagacagctggcccccacccttccacccattgggcaggccgcacgggggcgcggcccggagtcctggtccctttgttgggcgcgcacccccctcccttaggtggcaacaaagtcgtgcagtgggagccgccgcgatagggcggggagtggccagggcgggactccaagaactgcccgggggcagcggggccaaaaagtgggaagaaggaaaaaaggcaggaggcatctggggacaggcgcgagggcagccggctctgaagtatgcggagggcctcctcccggccccgggcattcgcggagaacgagcctcgcagaagtttggctgcagctgcccgggcggcgtcgatggctgcgcgccccgcgccgcgcgggggctgagcgggcgccacttcccctccgggccggcttttgtgtctggcatctcctcctcatgctgcgtctggccacctactgcggcggccgctgctgagacgctcgctcggaccaaggggaggagacggcgggggcggccgcggctttgggtccaggcgggactatgggaaacgggatgtgctcccgaaagcagaagcggattttccagacgctgctgctgctgaccgtcgtgttcggctttctctacggcgcgatgctctactacgagctgcagacgcagctgcggaaagccgaggcggtggcgctcaagtaccagcagcaccaggagtccctctccgcccagttacaaggtacggctaacgggacgcgcgcagccggtggccaactttgccccgcgcctccacccgggcaggaaaagtggctttggtgagctattggcactgtggttgccacctctgaccttcagggacgtcagaggtgagcgtttcaggactgccggcaccagagtgtcaggggagatgacattctcatcctcccgcttcttcctcccagcggttaggtttagaacttcgtagcaccagcccatcgtcccgctgggcgtttggtgggcgggtgcacagatagtcctttacccgagctcttgtcaaaggcccagctgcaatcggggcagggaaactggtagccctccgccgcttctgccagccctgctctgaggagcattgttccgtggattctaggtatttgctttcttgttgactttgtcagttgcttaaaaaatgaagagtttggcagagatttctcaaactgtgctgtttttcaagggaaaattaagccatgacccagcagcttaattaaagtcatggcccagtcgaatggaaggaacctagatctggacctgctagtttcttatttcttattcttttaatttaataggatgtctttagagatgctggatgtgtgggaaaagtccacactacataccattcaccatcctgcagtagtttatttctttaaaaacaggtttacttgtcttcctaagtagcttttacttcatcacagagatgcatgtatgttacagttagcttcgggaagccaaagaggagaaacacaggttttcactttgccatgcacagcaaacccaacttgagcaagacctgtagaagaacttaaagtttctatcctattttagaatctaatttaatgtaattttcacaaacataatttactttaaatgtaaattcagaatttgaatttgaatttacttttaacgtaaattcaaagtcagcaccatgtcctcttgttaaggacgtatcctatacatattttttttgcaagcttttacttgtggttagttttcaatacttatgcagctttctccccaaccaaaaaataataataaatagctgtaagtggtgaaatgttggcagactttgctgatgatgcaaatatagcttgtttaatattgctaggtagatagatgcaagctagagggatgtttctgtgtatgtgtgtgcagatatgaaacagatgcctcttctttgcttcagttattttgagtgttttctagtaaaaaatttaagatgagagaaaatgatacacatccgattgtttggacttaacttgctcttcccaacttagaagaaagaaaagtatttttagcttactgacgctgcatagccacaggcaatgaaaatatatggctcggcttggttcaaaagtaaaacccgttttgatacgctcttaggttcacaaaattttctttaaactcattgaaatttacccatgagttattgttggtatgagaatatggatatttgtttacttatttatttacaaggtatcagttgcttccctgtgaagttccatggagtcagaccaagggaaaaatttaccgtctaatagtataacaggactagattttcataaacatggctggaaggggcatgtatggtggattatatgaggttgtgtgtgccttggtctcttaggagtcccatgagggcaaaggctgtcattttcaccattacctcctcagcaccacactgtgcctgacactcattaggggaatcaatgcatgtttattcaaacaacaaacaaaaattattctgaactgtggcgagtaagttcatcccaggcacttttgtctttctgagactttgcttctgtgtctttgctttttgaaagccaaataaaacaagaaaatattttgttcaagtagctcctttgcctcaacggcctatgatggacgatggatattgttgactgaggccctaatttctgaataatggcctttatttgcagtatttcattttgaaattttagaaatttcttttctaatttgccttttctttttttagtggtggtggtggtagtggggaagagaggtggtaaatggtaatacaggatcattaaaatatacaacttttgttttgcagcagatggaaatgttctacctaatttgaataagtggcttcaaagtccctttcttaatttattcttttgtcatttcctctctaattatggtgctacaaaacttgcagtataattgtgcatgaataattatttcacaagcaggctaaagtatttttttgtttgtttttgttttttgtggattcacttttgacttcagtagcatttattttggatttcccatgtgtaagccatttaatgtacattttctggtggtatgcaacttttgcttcccttttccaagacaaatgacattttactcaacagcactgtgtaccacctgcatagatgggcttttaggacatcaggctctccagtcttaatacttgtttagttaggtgggattgcttgacctggcttggattaagatcagaattaatgactttaaaaagagtggtctttttaaaaatgactcttgaaaaaatttcagtagtttagacctataatctgatgatgtgcgttcgttaagtgagcgtatttaggtcaccttcagtttaagaatagattatactccatagattcctttgaaagtgggttacttgtaaccccaagttaacaagttttattgtagaagagccccataactagaagatggtggggatggcatgcagaaaggtcagagactaggcaaaccccttccactataaaaatatctatgtctgcctgtttatctatccctcttagcaatcagtcatctatttatctcccatactggcaccttaattatactgaggagtgggacagaggtcacatactggtggcaaaggtaataacaatctttggccagcacagtgtttatataacctttaaagtttttaaactgctttcaagtgagccatgctccattgtctgtatctataggcagtgtttctcagtctagactgcccattagtatcacctggtggctcccagaccaattaaataacagtctatggggggtggaacccaggcttcaaaagtctttaaagctcccctggtgattcctgtgtgcagccaaggttgagagccacacctctataaaaaatcttaaaactgagcctttccgtgcatttactttacttgtttggccccagagacacttgaattttttatctgagtatgtgattaaaagcagactggtttctagactgtaattcagttctagttctacaaccttttgtgtgaaccttgacgtttttcttatttataaagtggagattagaataacctattttatagaggtattgtgaggattaatgaagatgatagactgtagagctcttagcacatacttggcatatagtaggtactgctcgttaaaagttagctgttatcagaatccctctttgaggtaagctgctttatcccttttactcttgccaggtttgtcatgggtaatttcaaattttgaaattggcagaatttgtttatgtagctaaccacctccttttattgtaccttaaatgaacatcaaggaatatgcaaacatccagtgtactttaatcagaagaaaggaccttccttgacaatttaaacttggactgcggttactgattaactctgttctggatcatatcagattaggagagggtgtgactgctaaggtaataattatgtgctgtgagatctgggagagagatataactatttaaatttttataaaaggcatttagtgtagaggcaaagagcctgacattcctaaaacacagtattgcaatgcttttggacttccagggataaggagaaaccatccagaaaaagtttatgtaaggtttatatgttcctattccagatgaatatgttacaactatttaaaattttaaaaaaaggtcacaaatgtgacgtgtagaagtgcagagttacaagtgtggatttctcacatgcatatattgagttgtggtgaagtctgggctttcagtgcacccaaagaatggacatgtttaccccacaggaaaatttccaactctcaccccctgctagcctcccaccttttgtagtctccacttccactctctatgtccatgtgtgcccgttgtatagctcccacttgtaaatgagaacatgctatcttcgacttttctttttctgagttatttcccttaggataatggcctccaggtccatccatgttgctgcaaaagacatgatttcattccttgttacggctgagtagtattccatggtgtatatataccacattttctttaccagttctctgttgatggacgcttaggttgattccatatctttgctgttgtgaatagtgctgcaataaacatacaagtgcaggtatcttttttgtataattatttatttccctttgggtatatacctagtattgggattgctggagtgaatggtagctctatttttagttctttgagaaatcctgatactgttttccagaaaggttgtgctagtttacattcctaccaacagtgtataagcattcccgtttctttgcatgtttgccaacatttgttgttttttgactttttaataaaagccgttctgactagtgtaagatggtatctcactgtgattttaacttgcatttctctcatgcttagtgatgttgagcattttttcctatgtgtgttgtcttcttgtctagcttcctgttaaaaatgtcttttcatgtcctctgctcagtttttaatttttttttttcttgtcaagctgcttgagttccttgtagcttctggatattagccctttatcaggtgcatactttgcagatattttttcctattttgtaggctgtttactgtgttgtttctttcggtgtgcagacatttgttatttaagtgttttttgcattgggctcctctaacactcaggatggcccactggcctaagcatgaatacatcttgtcattggttacttctttgctttcaaccttccctaaatctacttttagaaaggaaacattggccaggcaccctgtctctcgcctgtaatcccagcactttgggagactgaggcgggtggatcacttgagatcaggagtttgagaccagcctggccaacatggctaaacctcatctctactaaaaatacaaaaattagccaggtgtggtggcacatgcttataatcccagctactcaggaggctgaggcatgagaattgcttgaacctgggagacagaggttgcagtgagcccagtcacccccctgcactccagcctgggcaacagagcgagactctgtctcaaaaaaaaaaaaaaaaagagagaaacatcttcagcacagaaccaggctttttttattccttcatctccagcgtctggtgcctggtagtacctatgtagtactttttcttggcctattaatgtgcatatatatggtggtattgtgcgcagtgaggtataatagatacaggctgaggcgtcagagcacttggatttgattttctgctatcttattttgctagctgtgtggtcatgggcaagttatttaacctttctgtgactcaatctattcatatgtaataatcaggataatagtgcttacaaaaggttatcttgagaatcaatagtgttagctgatgtgcagtgcttagaagggtgtagcttgcattttggatgattgaggaaacatatacaacagagtggttcatagacctcagcaatttagaccacaagtgtgggcaatgtgtggtaggtgtactaattttcaagtgcagcgttagaacttaaaacatgaactagacattgtctattaaatggacatcttcactgaagtacaacttagagttaaatgaagagactatcatttttgcttgatcctgtaccatttagaatatggaacaaaaatactcttaagttcagtaatttttatttgtgtgtaaattccttccctgaataaaagataaaagcttccaaataccttttgaagctctaattcagtgaagcattcttttgaatatgtatgatttgcacataatctataatcgatttcacacgttgtgcccaccttagtcatccctctaatatgtaacatgccaactctaatgagagtactggtgtccaggtaaataattggttgctgtgtaagagaattacttgttatctgggagcctttagtttaagttccaagtagattggaagccttgccttgatttctttttattctttcttttcttaggaaggacagtttccaaaagggctggggtacaataccacattactgtggctgaaggaataagtgaattggagttggggaaatgaatactgactaaatatggtgtgaatcaaaaagcaaaggattggagagaaaccagaagagggcagggaaagaaaaggggacacatatcacctggtgacttttcaaagtactgaggaagagttttgttcacatctttatgtcctaaaagaaaagcagcaggaaatggtgactggagagctggttggggcatcagatgtggtttcagtgcaactcaggcatttaccagcagggtgaccttgagcaggcaaataacctctctgaacttcagcctcttcgtgttttaatttgggttagcaatgtctaacttgcaaacttgtatggattagaaatagtgcatctaaagtgacgagtatgagtcctggagaatattactactaccatttattaggtgaccagaactactgttgttgaattaacattgggcttctttttattttgcccagcctttactacatctagtaggtaagagtgttattagtgctggcctaaaagtggctcctttcactatgtgccctacttggctgaaactttttgattaagatattctcactctgtcttttctacccttttgagccgttcttggggtggaaaaaacctgaaaatgctttacatgatagcaactaagagttgttgtttttcattttgacagccaatggttcttcttttatcattaaggacaaagtggttttgctacttttgccagtagatggtttatgggttttatagctttattttgaagtgaaagttatatatcatatagctttattataaaagaaaaatgataaactatattttctttttagccagtgttctttggagtgaattttagtagaattttgaaaacttatttgagaaaattaaattatttttaatccataacatttattgagtacctaccatgttcgggttcaatgctaagcttattacatgcattatgtcatttaactgtgacactagcactttaatctgaatgagcaatctgaggcttagagaggttaattaacttgccagtgtcaagatctagcctgatgaaactaagcttagaaacctaatgtaactttttccatagtgcatcattgccctcaaaattattttagtgtctctcatgacagtattaatggttttaagaaagtaggttaggtgggtcatatggggattcatgataaaatttagaatcagaaataacgggtgtactatttgatgcagcatttccagggtacaagaaatttgctgctggtatgaaagatgattttggttgatactagagttgattttatgtggcatgtagatgttgcctgaaatgacagtgaatcatataatgaaaaacttatttcctttcaatgctttcctgacaagtaatggagaaattctcagtctgatgctagaatctctctcctagagagttgcttctctgtttttccaaagagaatagacgttaggcagccaacaacttgatagctagaatttgataattgttttgttgtattattgtatttaattttaaaattaaatctattaccaatcattaatgctatgtaaatcagatttttcatttataaagtagtggtgtaaaagtttcctgtttaaagtttattttaaggaaaaataaacttatttaagtgattatttggtggattcaaaaaaactgtacaggttttgcatgagtgtagtaagaactcgcctgaggggtgcctgcatgtctgaagtttaggaatgcattgactgatcaagttggatacagacactgaattttacagttagttaactgaattctaaggtggataagtcacttaccaggtagcttaagctaagctgagagcccacatactctgactctcagtacaagataataccccttcactgctctgtgctgtctctgtagactaggaccctcttctctgtgagaagaaatgggcattgctatttttaaacagtgctgtgtatttctgaatggtatatttgtgttctttgtttttattggcccatgagtgcatatgcagaagacatgtcagtcattgtccttcactgataagctttactaaataggctcatagcccggagggacatgggcatgaaataaattgctctctatagccgtatgacattttaaaaaatactgctttaactatttttcatacataaaatgtcacaatatgatagtgaatagaaaattaagatgtgctgtcattctgaaggataggcattatagaacattgaaatgatattatttgcttttctttgggagtgcatgaagttaaaaaaattataatcattttaggagagtcagacatttcattttccagttcacatctcatttaaaatgcctcctttaattggaatctttgttacaaacagaaaaaataatctgcaaatcaagatatttaggacagctttgacattgcttatgtgttctcttgataatagctatgatgctgtcaaataaatattataaacagattaaaatttggcagttgataattgattaatttggtttagagaagtttatcaagttttatattagtgagatttattaataaataatattaatattagaaatctatgatgcttgcccttctgcattagtagctcaatcttttaacagacagaaaatgttttaaattattttatattttatttagaggtttggatgctataaaacaagttaaattgtattgatgtcaaacatcacttttattaaaatatgaaaaataattttttttactgtataggcggtcatcacctcaaaatctagatgccatccaaatttgatccaggtgtgggtgaggccccttaggtatccatacaatctttaactataattcttcaagtatgcttcctctttatctgtagatctgtgaaaccagagtcaaattacctgccctcaacacagccaacatatggtggtaggacaggcataaaatacctagatattcctgtttaaaaaaaaggcagaaatgtgagaaaaataggagtcacctgtcaataggaatttgaagtctgttgaggcaagtgctcctgtagtaggtctcaaagcctgggaatagttctccagggctcttgactgtaccatttggtttcttggttccactctgagtcatctttcctttttcgtgaaaggtggcatatgtttgcagctgagtggttttctcagcctgcttcctaccggtagaattttaaggacccgtggcctttttaaatttagtactgcttctaccccttttggtccaaataggcagtggttctgctgatacaatcttctcaaaaagtttgtgggtctcctgtgaaacttctttgaattttctccattagccaaaagccacattcatatatctcttggagataagtcttctctactttgggcttgtgccaagatcggggagagacaatgcatgcccttaaatttcccaaaggctcattatgaggctctgaggaacccttaggaggttctgtcatctgatgaaatagtactctgagatatcacttttgatcattccaagattttaacaaaccgattttataagacaccctccgcttttgtctttagaccatgtttttctgatagtgtcctggaattgatcttatcttaaaagctgtttcttaatttcaacattatttgctgtctagagaagctaagaattttcgtaactatcaagtcctgcctcctttttgtttagcagtacttcccccaatgtatctctttcttctcatagtttaccataagacagtaagaagaaaccaggtgacatcttcagcactttgctggtaaatgtccttaactggataagtcagttcatctggcacatttttttttttttaatttccatgtaactataagtgactgctggtcacattaactacacctaagtgtggttattgctaaactttagccactacataatttttagtttccataaacattttctcactttcatttaagcccttccatcagccttcttaaattccaaaattctatgtagagtgtgttcgaggcacattctcactaacacttttcttaaggtccactacacagttccaaagctacttccacctttagatttttatgacagcaccccatttcaaaatctatattagttatcttgttgcatagcaaattatctcaaaacttaactgttgtagaacaatgaacattatctcacaacttctgtgggaaaggaatctgggcttaactgggtgactctgccatggtcactcacaaggttgcagtcaagctgctgatcagtgtttagtcattttaaaacttgattgggattaaaggatctacttcaaaattcactcaggtggttgttgataggccttagaaaatccatttccaatcacactcatctggggcctgccacaggaatacgtcacgatatcataactggttacccccagggcaagtgtattagtctgttctcacattgctagaaagaactacctgagactggctggtttatatagaaaataggcttagttgactcacaattccacaggctatataggaagcatggctgggaggcctcaggaaacttacaatgatggcagagggcaaaggggaagcaagcatgtcttactctggtggagcaggagagagagggtgaagggggaggtgccatacacctttaaaccatcagttcttgtgagaactcagtcactatcatgagaacagcaagggggaaatccaccccgatgatccagtcacctcccaccaggcctctcctgcaacattgggaattacaactcagagccaaaccatatcagcaagagatccaagagattgataaacagtgtaagcactgaagataaaagtgaaggtgttttaataacctaatcttggaagtggtatctcatcacttctgccatattatcttcattagaattgaatctctacattcagcacatgctgaattcagcacaagggaagggcttagtgagattgtgaattacagaaagtggagatcattgggggcagccttcgtagcagcctaccataaggtgagtatagttgtttgagtattattattgtcattgttggcaacatcattattcccaaagttgtcataagctaacattcattgagcacttgctgggtaccaaccactgtgctaaatcatttttcttgcattatctgactcaatacttttgtaaaaatgttttactacattctaaaatgtgacttaccattaaattggaaatatattagcaagaagtggcatttaaaattatagcttcacagggaaattacctggtatttaaaccgtttgacctgggaaaattaaaaatccacgtgactctttgaataaacccagtcagtagttcattaagtaaaatacccaagtggaagacatcatgtccttgggaagtttcaaaacccattgataatatgcgaactgtttctttggcaagtagatatgaatgcactgcagcatgttcttttgactttatagactgcagtccttggtgaagttttatttgataggagatttttttgatacttttactggtcttagtaagatatttttgatttaaagaaagcattaattgtaactggtaatttcaacttgttcattcactcctactttgaaagtcatttaaaaattgcaatatatgagtattcttttgtgatattaataaagtcaaaagtagaatataagaatacgttatgaaaaggtcattaagtgtgttctgaacagttataattccacattcatagtatgtcttcattcacctaaacatagtttagttattacaaatacatgagaaaaatattctttttatttgacttccattgtactttccaaaacatatttctataagagattggattgggaagtggatagattatattttgtcaaaatgtgtttgaggctgtatttcattcaagaattaaagattgttctgctcttgtcagtgagaagttgttgttgaatttctgtagaaccagtgtttctcttcctgccccattgctgtgtgtatgggtgccaggtttctgccatgatgttcactggcattctaagttgctgtgaactcctgctcttggtggtattcatattgacaccgtcaccctctctgtaacatgtattctcttctctactttctctttgacaaaaccaaaatgaggaaaattccctgcatgttctataatgtattgataaagtgccttgtcgttcttagagagacttacatactgttctttctctcgtatcttttgcactgagttcgagcagggtccatgtgaactgagcctagagtatgctcccttatgttgaaactgtccaagggagcagaagctactagttacctagaatggtagtatttgtgagtacatatgtggccctttatagggagactctaagatgtcttcatctaagggtctcacagtaacaatattttgaggaggggctgagctttaaagaaagtcggctttgtctttactgttggcttccagctgttcttagaactgcctcctatccagcaccagctcattgcctaagaccacactgaatgtttttcctgtgatcctgtcttccttaagggtagcattttcaagttgggatccttggcgggggtggttcatgaacgtcctgaagatatatgtcaattttgtatatgtgtctttttccaagacagaagccatagcgttaatcagttcctcaaaacatcattgacctgaaaaaggttaagaaccactgctttagggcaaattcctcctgaggtcttttcaagtccatcttggaatttgacctcccttagtcccactccatgaaccccctctagacatgactgtaagtggcagagtttgtaatggagtagtcagtgtgtttgctgctgttccccttaagccctgactattaaccctcttaccctcccatctccaaattaaagaataattctgattggagacttaaatggcttttaataaattgcattcctagaatccattagtaatttcttagtaaaataaaaaggtcttgcaattacatgagaaatgtgtactttctgaattgccttgtattcatgatattatttgatgctgaaaacaaccctgtgttacagagtaataactctgtgttattaccattatactgtgttattaccattttaaatttaaggaagcagaagtcacacagcaagacagtgacacatgtgggattaatgctcagtttacttgaatcctaactccgggctcttactcacacaatcctgtttccaaggcttccttatcctggagctaaacataggtttaacaggacttacaaaactgagtttctgactttgccacctctgagggcactctacctttttttagattctgccaaacagctaagaatattcccagtccatctgctaccccttacccccttcccaaccctgcctactatgtccatggaagatgctgatggctgctcatgctactaatttctgcttcacctctgcagctttccgctgtcagtctcacatgtgctggaggatctaggcaggctccataaggattgggtcccagggtgacaagggtgatagtcactggggagaattcagcttcactaccctttctctttgttaatatctctggcacattgtccttgatccagaattaggggattgggctgtcccttcccttagtatgatttcttttcagacttgtctgcattctggggtgtaagtaggacttcatctcatgctggaatcctgctaacattcaccacaggctgctacctggtagcatctttagcttgtcttgacttcacagtggggtggtttgatgctcactactcaactgagtctccagctgtgtgttttagattccaggtgtcaaagtcaaatcactcctataaataaatcagagcttggtaaaagcagtaaagaaagttcttagagcccaggttgcacataccagcatataggtatgttttggtttagcccacacagtgctttgaaaaatttcacagtagtttatgtatggaaaaagaaaaatattttatataaacatctagatttccaacgttgtggggaaagtcctattgcaacactggacctgcatttctgtgtcaggtgagtgacttgctgcctatttggaatggggcgtgtgggcttcagttggccaaaactcccactgccattgatttggtcatttatgttaatggcctggcctatagaagcacctaagtttgaaattctttatcttgactaacatttttagtttatcaatgaagaaagtaagccttaaagagatggaatgacttggcgactgcgctgtctaatacggtggccactagggtcctgtgtagaaatgtggctcccagtgtgactgaggagctgaatcttaaattttatttaattttcatgaatttaaatatcaattttaaaactatagcatcaggaagtatttttctgttaaacacaactctcattttaattgtgttgtgtcttacaagatattattgatatattacagtgcacaattactttctactttttaaaatggggctaccagatatttaagagttacagacatttcagagtgcgtttctgttggacagcagtgacctgacagaagtctcccagcttgttaatggcaggtctggaatttgtcagaagatctccgcagctctaatcatattttttttctccattattaaaatgttacccaactgttcttctaattcttgaaactttttgttattatatacttccataggaattagtttttcctcatttttacgtagcacatgacagaaaagagattttatgtaaaggaaaatttagcatcatgtattagcaacaataatacaaaggtaattttagagattaattttaaacttaatattcatgacaaagatttttttttactttaagtgactgacaattttctctgaaatatctatttaagaaaacaatttcagcatgttcaaaatgacattgtgtttgattttggagcaggtatatattaaaatatagtgtaaaattaatgatatattttattgtagctttaaaactagacagaaattactattacatttaatatattgagttcttatattttatacctaagaaatctttcccttttttaaattttgtatttttagttatctaaatgataagataaaaagattaaaaccctgaacaaagtattgggcatgtgtatagcgcaaccaaatataacaatttagataaaataaaattgtttttgacattttacttattcaactttgaattgtaacttacatacataaaagtgcacaaattataagcaaacagcttgatgagacttcacaaacacaactgtataaccagcaatgagatcaaaacacatggcaagaccagcaccccagaagctctcttgcactcatctcattcaaaaattgtcttccaacctcaaagaataagcaccatggtttagtttcacctgtttttgtactttgtgtaaataaaatcaaacaatatatgctcttgtgtctggcttcttttgcttaacattgtgagatccatccagactgttacatgtagttgtagagtgcccatttctattactatgttattaccattgtgtaagcctatcaaaacttacccaatttactgctgatggatatttggatattgattgctgccactatgaatgctctagttcttttaactcttttttttaagggactagcagctttttgatatgattgatgactattttaagctaatgcaacataaggactattttgagtgcatttacaaaatttattattgctcctttcctagtgttacttaatatcctcatacaacccaactataattcctgatctgttagtacaaattttaaaatatgaccaaaagtaaaaacaactgaaacttaaatgttcaaaacacaagcatttgtagcattgttaagccaggggataagctgcacagaggactgcttagacgtataagctggcttgtctgttctttgttaaccattattcatgcttactgggcatgtgctttttctctttctatattctaaaggggtcattttaaaaatgattatttatttataaaaatacaataacaacagacccaccaattaccttttgttaaatcagtttcctgaaacaagttaacaaaaccctggtttagaaatgctacctctggaaaaatgctggttgagaaattctaccactggaaaaattcagaatataactgagcagttgagaggaatattacagagttaatgtaaatatctagtgagtcgttaaactagctgtaaaagtgtttctaagttaaaattttatgatttttaaattctgatgtgctagctgaagtgaacagtgatgagaataagaattacatatagtgactcatattcagcaatttattacatacattgttttctcagtagtcttgctttattatagataaatggcaaaagggcaatggtgatctttgatgtataaaaatgtaattgattttacttttattacttgtgataatttaaagtttgctaccatacaaattatgatagaaaaaattaacaaaatatttgtgtaaacaaaaatatgtcctatttaattttttattaaaataacaatgttctaaattacttaagaacataaaaaggaaaggtctattcattatattcaaataattaacaggggattcctatctagtaattgagggagaccctaaaaatattggtattcaaaagtagtaagttgtacctagtgacattttttaaattcaagattcatactggtttcacctcccaatactagttatacttgtgaagtttggaggtaaactgctcaaaaataaataaataaataaataaatatatctagagtatatcatacattttagggaggtgtgttacattcagttcatttgaaagactgtaaattgtagaaacatttaaggataccaaattataagttgagtttaagtgtagcttattctgtatattatagtttatttttggaaataaggccttagcaatagaatgaatttctttctgtgacaacttaaatctttattaaaaaaattctcattctgttttctgaaatacaatatagccaaagaaaattattattagttgaggagaggtaaatttaaaaggtttagtttgatgcaactcgtgttacatgagtagccatataaagatatagagtcaatatattagtttttgttgtgtgtcaatttcagaatcttagtggcctacaacaacaaacttggaataatgaatataattgtgttcacaggtctgcagtttggctgtggtttggtgatggtgggcagggcttggctggggctgatttgcctgggcctggacaccaggtctttgatcagtttcaggtcagctccacatgcctccattttacaacctgggctgaaaggattgcattacctggagatgctcttcagatggtgggtcataggaaccacaaaagggcaagtgttaacacttgggaacaggcacaccattatttctgtccacattccattggccaaacgttaatgggatggtgaagaatgctctgcccctccgagtggtaagcactgcagaatgcatggcagaatgtggatgtatcattacagtagtgagggatgaagaatttggcatgatgagttcatctaccacagtcaacttcaaaataggtacagtgtgaaataaaagaagaaaacttccttatttgaagaatcattttatagtgatacagacttttaaaatattaacatcaacataattttagtcacatttgtgtacttttaggcggagggtatgagttaataatgaataagcacttagcataaattctaaacaaaaggcaataagtaaatctgtcctttaattcagcaaacttcctgaagcacctagtgtccataactttctgggataatataaatttggttattcaagtgctgctatcaagtaatagaatgtaaataaagtagtctgttaaaaactttcatactggatttttatgactattctttcagtgacatagaacaagtagaacatttttacttaagtattttgacatttaatatgttgattttagcagcaaaagatgatatgattaaccattttattgattgattgattgattgattgattgagatggagtctcactctgttgcccaggctggagtgtagtggtgcaatcttggctcactgcaacctctgcctcccaggttcaagcaattcttctgcctcagcctcctgagtagctgggactacaggtgtgcgccacgacgcccagctaattttgtatttttagtagagacggagtttcaccatgttggccaggatggtctcaatctcttgacctcgtgatcctcccgccttggcctcccaaagtgctgggattacaggcgtgagccaccatgcccggccaggatttatttttttaggtactaatttatgtggattaaaaacaaagaaacaaaacaaacaaacaaaaaacagaacaagttagagcatggccccacagataggcttgagcattttaaattttatgtaaacttctggtgaacatatgtaatgctttacttttaaaaaattaccatattcacttagattcttttatttaaaaattaagtgaaaaatatgtcagtaatatttaatgatttagcacctactgtggcaactataaatgttcatacccaagactttgggaaaaggttgtggaaaatttataaaggcagatgtcgtctctctgtttttaagaatgtatctgattgtaagcatttcttttaaacactcttttcaagttgcacattcattaatttcttccatttaatgtgaggtttgtgtgtgtatatatgtatgtatgtgtatattattatatatgtatgtttgtgtatatgtgagagtgagcaagtgactagtcacttattatattggcctttagaagatcaccaaatagcaatttgtttatatttcatcttttaaaatttgattctctatgtccccttaagaatgtcagaaactgaaaactggtctttaggtccaccaaacatagacttgatttgtcagtggctgtttcccatgagtcgtcttgacatgctttttatgcatatgatagaagaagcaatgagaaaagcaggtgtgttttgacatgatctttttgtgaacagggcttgctcagaatatttccagagtaggaacttgtagattcttgttaaggcctgataaatgaagctctaaaggctctataaaactagtgaatgctgtaatcccagcactttgggaggccgaggcaggcggatcacgaggtcaggagatcgagaccatcccggctaaaacggtgaaaccccgtctctactaaaaatacaaaaaaaattagccgggcgtagtggcgggtgcctgtagtcccagctacttgggaggctgaggcaggagaatggcgtgaacccgggaggcggagcttgcagtgagccgagatcccgccactgcactccagcctgggcgacagagcgagactccgtctcaaaaaaaaaaaaaaaaaaaaaaaaacctagggaatgtccgccaattaccagtgtatttgttttctaacttaaagaaatacttcttgccattaactttgtccctttaaaaatatgtttatgtggaaagaatattagttttatttttgttttttctcatctctgttttattaattttttttttaacttcactggttgattgcttaagcacttactttaacagtctggttggcatcaatcagaacaaaaggaacatttctactgactacttaattctttcataaaagtcctcctttctaggctccacagcattttaatgacaagagttataatttttaactataacacctacaaattatttcttgaattttgatttatgtctcactagatcacatctaatttcctctctgtctgggactattccagtggtaactgggtcactcaaaaaacagaacctattggcatgatgtgggccacatggataagtttttcatataattgtgtttactgttttccaaatacatatctaggatcttcccaagttgtaatatttctaatgtccttgtctgcgttactagatatgacagctatatctcttggcttcactaatgtagtaggttgtcacttggttttcctgctttcaccccaatcttccacatagtagcccagtaggttacaaagatgattctttgtaacatataaattaagtaatgttacttcccatctctctttgaaggaaattttaactcttctcttactactttgttatacttctgtaacaagattgctgtgatgtgggctttttagctgttctcaagctcacgcctttctcatgatctttataactgcccttatttttgtctggaatgtacttccttgatgtctgttcatcactggttcctctttattcaggcctctgctcagatttcaactatttagaaaggctttttcctgaaaagttgactagttatttgtcatgtaacaaataactccaaaaacctagcaccttaaatcaacaaacataaacacttcatatttcacacagtttcctgagagtcatgaatccagaagcagcttatctggatggttctagtcctaggtttctcaggaagttgtaatcaagctgcagtctccagggaggatccactcccaagctcattcacgtggctgttcctcactgttgtccagatacctgtttctctctgtgtgcgcccctcctcgggttgcctacatgtcctcataacatggcagctggcttcccacagaatgaggaatcccagacaggaggagcccaacatggaagccacagacttttttataacctcatcttggtggtgacataacaccacttgggacataggctgttagtcagccagccccattatggtaccatgtagaaggggagtacacaggatgtgagtaccaggtgctagaggtcactggggacaatctggaaggttagctcctacagtagccctgccatccctggagatctcacagctgcttttaagaagccgatgccttctatgttttcacctctgaacaatctatagaagttatacctcttcctttgtgtataagaaaataccctatataagcagaaaaatgataatagtccatccacccaagtactgtctatcccattatcctacattattttcatatttgcacttattagctgaaatctcattttgtatttccttgtttattatatatcttgtttgtctgtcttccaccatgcgattataaggacctttaatacaaaaactggtatttcatgtccatgcccactattctaatccttgaacttaaaacagtgcctgaaatatagtaggtaatcaattatttgataaatggataaaatagttggccttttcaagccccagaagttttattttagacattttatatggctgtgtttccacatgcattcctgtattctaaaagagtttactaaacatgaatgttattactttaactcatatttactggtttatcttatatagaaaggcactatgctagatactctgaagttacaaacacaaagaagacacggtccctaccgtcaagaagtcctattggtaaggaatggcagactatgatacggatcatatgagaacaagtaaaattgcaaggctggggaagtgtgaaacttggagaaggctacacagtagaatgccttcttgatattttagggttagtgcagttattattttgtcctggaatactgtgttccttttaacatcctcagaatataagaaagaaggcaaccatatttttttagcaacaacaaaaaaattaggaagcctggtctacgtaagtattatagaaatggtaaattatttaatcatatatttttaacaaccacctcactgaaatgactaaaaatacatgaaactgtgtttcattacatatgatcatcatatatagagcagtttgctcatacattaaatagctctagatcagtgtgtctttagaataagttctctgagtagtgattgttttttatagtattatttgctgttgttagcttcttactgtaataattctgccttcctctcattaaagttgcttcatctaatttttctgtggacttgaaagccaaataaccaacctggataaaattatatataaaaagaatataaaagacacccaccccctccaaaaagttttcttttcaattaagttttagggaggttttatttttagtctagctatttatggcccatttttacatctgtctgatattcccctatgcttttaacaacttttcttaacagagtgttattttacttaagttttctgttgaactttttgcctctgttcaatatactgtagttggctttggagtcagaatgcctcatagctctgccaagttttagttttatgtcctcaggcaagttgttgaatctttcagaacctttttttttttttttttaaatcacatcttctttacaaagttggtatacaaagtcaatgaatatgttaaaggctaggatgttacttggcagtctgtttccttccccagtcattcaccaggttgaattgacttcccaccccatcactgagtgaccagtgacaaatgccttggtgaacagcatccgtaatgaataccagtttcatagaaatgtcacagtatatctcctgcaatgtagggctggcccaagaccactcctgcaggcacttttgtttcctcagatcatcagtgcaatttggggcgtgatccacgttgagtttcaccacagagtggtaccagaatttggccctatgggaaatccagagtccaagactggccataaaattaaactttttctctaggtatccttccgagatttgacgcccagaagcagatttaagtgctatgttgtatttcactacctgcctggagttcacaacagggaaactccgtcacaggcgtttcagcctttgaaaagagtaagatgatgggagtttcatagggggatgtatcagttactgtggatacttaaagttaacaaaacattcagagtaaggaattttttaattaaagtaagttctacagcatccatgaattacctacatttttccactccctcacatactttctcaagttacccacccttgtgactcattcagtagcaaaatcagtgaagtcggcattctcttttagtcatcaagcaaaaatgggtcatctccctggcctactagattgtctggtttgccccagaaaatctcttttcagtttggccctctttctgttgccatgtttccttgcttttcctggaggtaggggggcgccggggaaagtgggggacagtttccacctatcatcaagaacttgccatgacagccagcttcttcactccaggttgctctcttcttaatgttatatttattgtattcattcatcattcctgcctagagagcagtgctaagattctgtccttgtcttcttttaaattcagctgaaattcattatctgttatgtgccatgcactgaattaggcccttaatttaacattatggatttaaaaaaatgaggctaagaaaggttatgtgtccaaagtgacaaggtagtaaaagatagaaggaacttgaatgcaaatctgttgactcaaaattcagttttctctctactttagcatgactcccctttcctccatgcatgccaagaggttaaaaatcactgacgatgggatgcgagctggaagccttcattaagtcatgcttgagcctgtgccactgatatcctccctcccaggctcaggtgactgctgtaatcagtgtgccccaggtactattctctgggtccagtttgactgtgaatttccagccactggcttgtagaatagacaaaaaagctatcacctttgaattaaaaaggactaatcttagaatagatttagcaagttagagtagaaaacccccactaacaaagaagagcgaacttattattaaaggtatagaagttgaggaactcacctctgacttgttttttaagatatggatttgatctttaatcacaaaggcattacattgaataaataacctttccctttcaagctaaaaagcaacaaccctcttctagaaagttcacagaatttaatatttctttcttttttgtttgaacttctttaataaccttaatgaaaattaaggtagtttccatgggttgaaaccattggcaattattgattaattgtattattggaagagaatagtaaaaacaattcatttgggttttataatgtataattttactttacctttgagtctgtgtttcaccagatagaaaattactttagagactttaatgatgccacagtgtgaacacccatctcaggaagatgaagaaactatgtattttcccaatttggaatggtgtagacctgagttcaggtctataaaatttggattttttgtttgtttgtttgttttgtttttgagacggagtctcgctctgttgcccaggctggagtgcagtggtgcaatctcggcttactgcaacctctgcctcccgggttcaagtgattctcctgccttagcctcctgagtagctaggactacaggtgcgtgccaccacgccagtctaattttttgtatttgtagtagaaatggggtttcaccatgttagccaggatggtctccatctcctgacctcgtgatccgcccacctaggcctcccaaagtgctgggattacaggcatgagccactgcaccaggcctggattttatagttaaatacctggatgacctttggtaagttacctagctacttggcctttgtcgttgcctagtaaagtaaggattatgtttctggagttatgtgtgtaatggtaagttacaacttctaggaaaacaagttagagtatttaccttactaatggtgaattagtagcaccatctttctatacaaagacttcatagttgaaaattaactatattaatgattttatgtaacactaaggaaataaaaatagaagtgacataaatcactaatgatccgcttttaagatttcctttaaggaaatttagtttagcatattacaagatatttttaacaggcatttttatttctcttatgcagtatattttgaatgctctttgaaaggctgctgtttccatagttaattcattttattcaaagacagaacatcaaagcagcaaaactcaattaagtggaatagtcaggaaatgaaatattctggtgaatttaggtggcaatgttaaatagaaagcttattaccttctctacccatatggcttctggtctctgtatttaaatcattccactgaatttgagtttttattgaaatctctgctaatttttttcctagaaaaatgaaggaaaatcaattaaagaaacttcttgtttcaaattatattattgaaaagcatttcaaactgtattaattgcttgacttcattggtaaaaatgttcatcattggaaacatcagttctcttccagtactggcaatacagatcagataggaagattcaactaaatgtgtattgtcccttggacctagcaatgttccggccatatgagtacatttttatctttcgctttcttccaaaaattgagtgtgaaataaaactccatttattttaaatgagcatcatttagtgaaaagaaaatcagcatattaattgatatgatataaacttaaaaaaatagtttgtgtagcaattttaaaagtgcaggccgggcatggtggctcacacctgtaatcccagcagtttgagaggccgaggtgagcagatcaccatcaggatttcaagaccagcctagccaacatggtgaaaccccatctctactaataatacaaaaattagtcggacatggtggcattctcctgtaatcccagctactcaggaggctgaggcaggagaatcgcttgaacccggcaggtagaggttgcggtgagccgagatcgtgccattgagcttcagcctgggcaacaagagtgaaactctgtctcaaaaaataaaataaaataaaataaaataaaataaattaaagtgcagaaaagttttaagaggtaaaataaggcattcacaattgacaaaggaatctctataaaattttagtgtttattctttatttacagaatcaatggcaaatgggtatgcaactcttttttaaaatctaagttgttttgttttgctttttatgtattcttatttccattttaaattttagagaaataagaaaaaaatagatgaacagatatgaaacttccctttttagtattaaaaaaaaactatccttaagttaacattgcggtatcttactggatatgcagaaaaaaagaacaaattgtttttaaacatatttttatcctgcaagaagttgacgtataaacagtaagttgcatacctgttttttaaaattcagaaaaaaattgctttaaataatgtgactattcagaagccacattttaagagattttttttttaattttattttcttacacaaagtgttgaatgagcagtatttgtcacagtgatttttgtgttggtttgctttcagttattttcgtcacaatagggaatggaagcctaacagaaaaatgcatccatgaattttcaatatttgttttatcttacatagattacttactaatctatgttttgttgaaatcttgtgaaagttattttaattctgtagtgcagtagtatcacatatatattttcatcaaatatatagtgatattgtatacattaatttaaattcagaatgagaaattaagctcctagcattttttaatttttgagttctgaagttaaaaatgtgtaaaattattttgtatattcctagtgaaacaccagcccagaaaatattaatatactctggttatattttgtttctgttcagattcattaaaaaaaactctgaaagaaaagatgatggaaatactttctgccccacacaataaatatcaggtatattttgcatatcgataatacagggttgttgttctttctgccttatgggaatttttaatgaatcctggccttgtttttatttttcgaatggctgtgttgtattctctgatgcatttaatatggggatgatttgctggcttctgtccgtactttggcaactacgttcattcatttattcattcattcatttatatttcctataattacttttattaactctactataacatttagtgtgtttcagtttagaaaaatattgatttttaaataaacaatgaaaaacaaaatacacagaataaaatacgccgttctatctcatgtatttttttttgtaaaaagatagttttgtgtgtgtgtgtgtttttttttttttaattaaaggcaactacttttagatcagaagagtttttgttggtttttgctctttttgtattgtggtgtgtgtgtgtgcgtgtgtgtttggtggcccctgaggaaaagctaataacctctctattttttgtttgcctacatatactgctaattatgtatccatttagatagctgcttaatgtgtattcctaagtttgttgctttgagtcaagggctagtattcttcattcataaatttgtggtatggaagagatggactagttgtaagtatggtagtttttattccatcattgaataactaataaagtagtcacaaaattatgctcattaggagtggcatttaatagtgggcactttaaatttttaaacaaaaaatttacccagtgtgttttcaagattctaaagcaaaagtgaaagaactaagcatgaatactgactaaaaactgtcttaattatcttagttacttttattaatgcaggtttatggagggtaggaggataggttgtataaaggatttaaaagtaaatttcaagatactagtgtgtttatcctactgtcttgaatcacactcacaagaactaccatgttaagtgatttatttttcttatgaaataactcttcagaaattcagaacattgaaagaagaccatactaaatcaccaaaaaagtttaatgttttgtaagttaatgcattttaagcattgtgcatgtaagataaactaaggctacaaaaaggtcactagatcttctaatgaatagatactagtaattttaaatcagcacctcacttgttcaccgacaaagtacatgtgaattggatgtataagttatttgtatataaactgtaaaggactataaaagtatagtttgttatgattgatactaaagtaggtattaaaggacactttttttctgaatatatgaacactcatctacaagtatactttacctcatagtgacaggttatctgcaaggtgataaaagatagaaccaagatctttagtggaataactgttctccctgagaagttcttatttacattttgtcaatgaaaaaataacagcaaataaaggtaaaatgtctactattctaatgggtcttacttgaaaaggatagttatagttttattctctattgcttgaaaatgaatatgtaatataataataaacatcagctactcatgttgaaattactatgaacactgaattattggtggaatctggaactagtgaggttattctgtgcctgaacttcctgttttcacctacttcccaattacttgcagctgtcaaaataattttaatcattttcagatactttgcagaaaaaaaaaaagatcttaagcccttcggccctaatcaagggccataagtccttcagctaaaaagatgttaccccttctcttcttgtcttcttttgtatccctgctgagtccttctgtctagtcaggtcagtattctttctgaacatcactattatgttctaagatcttaaacatttattcaggtcactcacaattctgattctgtatccttgtcttctaaaccagatcagagaatcagaggatgttagagcagaaagaggctttagaaatcagttgataagctcttttattttactaatgatgaaatattagttatgaaatacttttcagattaaaaattaaaccagatctctggaccccttgcctctggccagtttttctatgacatgttgtttacagaaacatgcaagcagacatgcagagctctgctgagtccatggaggaacctaaaggttggattcttccacctctgtgtccaggttgtccaccaaatatgcttgtttatttcccagtatgtggaagagttattatgggaaaagtgaatggaaagtcatatacaagacaaggaaaaccaagcaagcatctcattagacccatttgcaattagagtggcagttgtatgcatttactgccttattatttattcagtgtcagaaaaggataatgtgttcgcattttacacagtcatacatacagaaaaagagagcctcactgtaggacaccttaagcatggggcagggtcttagtttatgtataatatttttcaagttattgaaaatcataggtgacagataaaaaatagtcttcttttgccaaaaggcttttcctgaaaaatcagaacctttcttagcattgtgctaaactgaatctttcctctcttacttaaacttaagtcactgagagtattcaaaaccaatttaaaatgaattatgtatagctgatgccactactcttctcctttactataaacatgaatatttaaaatcacagaattttaacatcaggaggacattggtgacttaactctacaacagcttcattttattactgaggaaaaagaaggtgaagtttcttagttgtgaacagtgaatttgttagtgtcaggcagccaggaggtcagggttcttaggcctgtgttattttccccaaactacttgaaaaatcctcattaaattatctcttggcaccatctgtttctctttgtctttttttctctcctttttttttttcccttctgggataaaccatctcagtcctatttaagttatattcggtagctttaatctaaattctatgaataaggttgaaaagaaaaatctggacgtctaattagaatacttatatgtatcatcaaagatttctttttctttgttttctttagcatccagtcatgcacctttccacagatctggactgtttattgattttactgtgcttctttaaaaatttctcatgaagccaggcatggattttgcctgtagtcccagcgactcaggagggcgaggtgggaggatcatttcaggccaggagtttgagaccagcctgggcaacgtagcgagaccctgtctcttaaaaaaaaaaaaaaaatccccaagtattttgttaaacagtacagatgtattctctgattttcatgtaaaaacttagaggttgccaatgaattcctatgcatatattggtgtaagtcaggctatcaaattcaactcttcttataacggactcaaaagtttatcttggtatgtaaccattaacacttttcttatgtaaatttcatgaaataattgataggaaaagtacactgttaatatgtgctgtcttggatttatttgtttgtgtaattcagtcatttaacaaacattcagcaggtaaccacattgtaccagactcgagatgacaatttgcagatcataaagaagctgaatttctcataagtagccccacagtgtagtagtgggagtgacaaatctctacctaaagtattataaaaagactgtggacagagatatgcctatggcctgtgggagaatatcccataggatatttaaactggacatccagggacatccacactgcctggggaagcctcctgggaccatggtgaaggcaaatgccaatctcacctttaccatcttgggtgatattatgatgcagggtggtatagtggaagtatctcaaggcctgcttgccagaataaactttcacaaaatcctccaaatcctctttatgtcacatcatcctcagaagtatcctgctatccacctaaaacccacagtcccataaatactatgccgcttctttttttttccttcaacttttaggctcgggggtacatgtgcaggatgtgcaggtttgttacatgggtaaacgtgtgccatggtggtttgctgcacagatcaactcatcacctgggcattaagtccagtatccattagctatgcttcctgatgctctcccacccccctcccccactcccctgccctttcttaaaggatgaagaaaggataactcttatatttgacctttgagggtctcacccagtgatctcagccttctactcttgaaggcttttacatgctatgcagtgatagtgattaaaatattccctcttcccccaaatcaggcaatgcccaatatctcagtggggaagataccctattcagagtcacatgtattcttcatagcacatcaggaaaatattcattttctgtagccagtatgaagaaaggaagtatatggggaaatctctgtacctttctttcaattttgctatgaacctaaaagtgctattaaaaaaataaaatcttaaaaaaagtatactttcactttcatcccaaaggagagcttgaagtatctgaaagtgaaaagaaagtgtaggatatcactaagaattctagtcaaactggggaagcagattttagatgtctagtgttgaccttatccccagtgttgactttgtcttcatggtctttaggagtaacatctttttaagtttcctcagtggcaaatgtaagaagttaagtagtttggtggtgttgggaaatacaattctaggaagagttagaggtggcagtggtgggtgggcaggggttattttggaggagaacttgtgttaggccttagacatgcaggtggtggtggaagcaggattccagctgtgacctctagctaccagcaacttgcttcttagattaaatgatctaagcttctgttttgatcttgataactctatcaagcattagacatatctaaaatggaaggcacggtggactctcactccctccgccttggagctggatccacattttatacagtagctaagccggaaataccggcaccatccttagagctactttcatagtacactttgaatcaatctctcaggcattttgattctatttcctaaatatagtttgcttcagtgcattcctcgccctctgtcaatgattaccacgtgtgcctgaatatgaggtgaggttccccttttcctgcaaaattactcctcagagaagagggagtcttgaggtggagtcaatgcaaagcctctgctattactgggtgctttctccaaggctttattttaaatagagcatttgtgaggaagacacattagccccacatgaccctgtttaatgcggttaggtattatggagggcacctgacaaaatctttttaaaaaagggtatggcagctttgaaaatagtgtaggaatttattcttaggaatgtgtcctcacagttgtaaatgcaaagtatctttataaacaaacctttccactaaaaaaaaaaaaagccccaatacattcaaattagggatatagaaagcatgaatgtgttcctacattacaaatggaaatggcaactatcctgatttttaccaaatcctatctgaggcttaggacaagatttccagtgatggcaccagacagagattccactaatgctttacctcgggtgatgatggctatgcttgggaaaactgtcagaagctaaaaacctaacttgagttgacacagacacagatgtcagacatgcatgtgtagagtttggaccaaagtgttttgggagatgtggatgtagaaaaaaagtgacatatgtaaatttcttgcatatttcactattttatttatgtaactaaaaataacaaatgcatgatgtgatataaacaggtagctctttcatacagtctgtaaatttttggtaaatgttattgaattatacattcacaaaagtacacgaatcataagtaaacagctcaatgaattttcacaaagcaaacagtgtagccagctctcagaccaagaatcagaacaccaccagcatgagaatcagaacatcactggcactcaaaaatgctccctcttactctcttccagttattgcccgaccgctgcccccatgtgcacagtgtgaatagtatcttgtcttctatcatcagagattagtttcactcgtgcctgtttttgaactttttataaatgtaatcattcagtaagtaccactttgctgtctggctcctttcctcatattatgtttgtgaaattcatctatgaattatttagtttgttcacattgctgaatgatattttgcattttgaacaaccacagcttatccgttctactatgatagatgtggtttcagtttggggctgttatgagtaatgctgcaattaaaactctcctatatgacttttggtgaataaatgtcaagtactgggttgggtacatacctaggagtgggatttataggtcttaggatatgccttcatcagctttagttaacactatcagttttctaaaatggttgtacctttttcacatccattagcaaagtagaagagttccttcctccacattcttgccaactattggtattttgtgtctttttctatattagctgttttgatgggagaatggtagtactgcactatgattataatttgcatttccctgataactaatttagttgagcactttttcatatatttcgtggccagtaggatatatttaagtggctgttcctattctttgccccattttttttttttgcttctctaaaatcttgtatatttggcaaaaaaaaaatcaactctttaatatgcttgctttattggcaaaactgaaggtcatgttatattcaaacaatatgtaagtttaacctccatcatactttttttaggttgctgcgatgacctgctaatgaatccattaacctctactctttctcagatgctctatcttctacacatacaaagttaattttacaatcatgcagatgtgatgaagttctttttagccctatctcattcattcttccctgctgttattatccacctttccatcaatcctatgctaaacatagtattgacaaaactcccctagaaaagctcatggggagtgggtgaggcactcttactaaactttcagattgccagtaaattcggattcagtagatttgagttgggccctgggaatctgtgctagtaacaagcactccacattcttattttaggaaagtttgaggaataccgcggattatttttgattttgtttcattgttcccacacattccctatccactgtctggatttttctctatccttcctgcattgtcatctgtcaacacccaatcaaatgtaacctctgggagtctaactggactcttccaggctgagcacatcactctataatcatatcttacttctgatcttcctcacaaaactatgatgtcattggccttccccatctcagctgataacatgcagtagtttgatcttgagtataaatgtagaatctgaatattatatggcctccacagcacgcacactggtcctcttcttccattaccctcatgcctcaattactgcagaactagtttccctgcttgcatcttgtacccatgcagtctgactagagggatcaatatttaaaacctaagtcaacatcatttctgctcagatctctgcactggagctggcatggtggtatgcacctgtagtcccacctacttgggaggctgaggctaaagcctaagagttcatgtccagcctaggcaacatagtgagaccccatctctaagaaaaaaaaaaaaaactctctaatggttcccaatttctccaagagtaaaatcccaagttctcagtgggctctgtgaccattgcactctgccccttccccttcccttatgctttgactttccgggctcaccctgcctcagtcactctagactgcctgtttctctgaggacatcccagtgtgcttgcactgtacagctttcctatgggttactccctctattttggaagagtctccccctagatatctgtagtactgactgaccccttcagtctttcaagtcttgtctcacatgtccccactgaaatatccttctcagtgaggcctgccctcatcactctattttaaaatgcagcctggcccattctccccacgcctccagtctctttcgatctcttttactctacttctttagcaataattacctgctagcatattatttattctatttattatttatcatctatatctctctgtgagaataaaatcctcctaaaggcaaattgttttttatgttttacttacagtatgtccccatatatctgaacagtgcttggcatatagtaggggcccaattaatatttgtttgatttgttgaatgaaatatttgggatgcagtagtaaccttaaataagactaagagatcttaaatagcatctttttacaagacttacttttatgaaccttttccaagatatgttgcatattttaattttgaagtagaacttgaaattggaagtttgaatgaaggtgagttaacttgtgtgtactgctacattgatttgaaggagaagacagtggtagttaggtgcattccaacctagttgagggtattctctgcaatatgacataaaacttttaggggttaatacttgagtattggattttaggttgtttcctttttgctagcattacttgcagcgtccgtaaaggcaagttcctattaaaaaatcagacaacttatggaaattagatgtcttttaggtttgtttcaagcacatcaattttgaaaactattcatagttgcattttaagagcagtgtgcttttgcatattttatccatcttaagggcattcttacacatgtttgcatcaattttgggagcaagaaacaaccccctcttctctcgcttcccctctgcctctctttttctcttgtgcataattttctgaaatactatgatgctgtccagctgcaatctgattgctagataagaggaatagtactatacaggttctatttatagatatctaattttagaataacttttatttctattactgtgagtccttaagtttccaatatatatgtatatacacttatacatgtctttgagaatatagtatttgctttgtagagtgcagcctttttatggaagaggaggatattattcctctcagctctcaaagagattctgtttaagaatctgctgactcagcagttcattatgtcatcctagcctggctaacctttggtgatctctaattgtcttatgttttacctgtcttagcctcttctcacaacgtgtatttatttgttataagcttttgtataagagtaactcctatactttggtgtttcccgaggtgcctaggccattgctgggttataacataatagctcagggcagctaagagaagaatcctttcatgagaagtgaatagacttcatctgataatgagaatgattattagtagctcagcacttgaaagaatgccaaaaagaacagcatgaagaaatgtatgttaagtcagctcatataatacttatttgaaaaagccaaatctcaattagtggcatgaggaaaagcctgggtatagttttatccacaaaagaaaaggcagttaagcaccaattcaagtcatggttaaaatttccatataagctactttacaaaccgtatgcattagcaaacttaaaaatggacacttgtgtgaactattacagtaactttattgtacagtaaaaaaatactgcaattgccaggcagtaaaaaaatagttaatctgaatgttcttttttttctcagcattctgaaagtgtccgtatttcaggactattatttaactaatgctaatagtgtgagcctacacaccaacatataaatttaatctctattctgttatctatctcttttctgggacatgtggtactaatgagcctacatatttgggaatttagttaaagtgctggggcatagaagatggcagggaaaggtggaagagaatgaaatctcttccaagtgcattcaatcattgaacaagtgctgtcgaatatcactagatattaggaactgagggattgagactgaagtggtagtgaggggctaggatatagatgaaaaggaaaaaggtggctagtcccaaccttcaaggtacttagttgttcattacttcactcactcactcattaatttattcaagaagtatctattgaatgccttgctctgtgtccccacccaaatctcatctagaattgtaatccccatgtgtcgagggagggacctggtgggaggtgagtggatcatgggggtggtttccccatgctgttctcgtaatagtgagggagttcttacaagatctgatggtttaaaagtggcacttgccccttgtaagaggtgccttgcttccccttcatcttccaccatgattgtaaatttcctgaggcctccctagccatgcggaactgtgagtcagttaaacctcttttgttcataagttacccagtctcaggtagtatctgtatagcagtatgagaatagactaatacatgactacaattcagtgtaccagggtgtattatttcattttcatgctgctgataaagacatacccaagactgggcagtttacaaaagaaagaggtttattggacttacagttccacaagtctgggaagtcctcacaatcatggtggaaggtgaaaggcatgtctcacatggcagcagacaggagaacttgtgcagggaaactcctttttttaaaaccatcagctctcgttagacttattcaccgtcatgagaacagcacaggaaagacctgccacatgatttggttacctcccaccgggtccccccctcaacatatgggaattcaagatgagatttgggtgggggacacagccaaaccatatcattccacccctgacccctcccacatctcatgccctcacatttcaaaaccaattatgctttcccgacagtcccccaaagtcttatctcatttcagcattaactcaaaagtccacagtccaaagtcttatctgagacaaggcaagtcctttctgtttatgaagttgtaaaatcaaaagcaagttaattacttcctagatacaatgagggtacaagcattgagtaaatacagtcattccaaataggagaaattggccaaaacacaagggctgggggccccacgcaagaccaaaatccagcaggacagtcaaaccttaaagctctggaactatctcctttgattccatgtctcatatccaggtcatgctgatgcaagaggtgggttcacatggtcttgggcagctccgcccctttggctttgcagggtacagcctccctcccagctgctttcatgggctcgtgttgagtgtctgtggcttttccaggtgcatggtgcaagctgttagtggatctgccattctggggtccagaggacagtggcccccttctccccagtagggactctgtttgggagctccaactccacatttctcttccacactgacctagcagaggttctccatgagtgccctccccctgagcaaacttctgcctgggcatccaggcatttccatacatcttctgaaatctaggtggaggttcccaaacctcaattcttgacttctgtgcacccacaggctcagcaccgtgtggaagctgccaaggcttgggacttgcaccttctgaagccatagcccaagctctatgttggtgcctttcagccatggctggagcatctgggacacagggcaccaagtccctaggatgcacacagcacagggaccctgggcctggcccatgaaaccactttttcctcctaggcctctgggcctgtgataggaggggctgctgtgaagacctctgacatgccctggagacattttccgaattgtcttgggcgttaacatttggctcctagttacttacgcaaatttctgcagccagcttggatttcttttcagaaaatgggattttcttttctgtcacattcatcaggctgcaaattttctgaacttttatgctctgcttcccttttaatactgaatgcctttaacagcacctgagtcacctcttttttttttttttttttgagacagagtcttgctctgtcgcccaggctggagtgcagtggcatgatctctgctcactgcaagctccgcctcccgggttcacaccattctcctgcctcagcctcccgagtagctgggactacaggtacctgccatcacgcccagctaatgttttttttgtatttttagtagagacggggttttaccatgttagccaggatggtcttgatctcctgacctcatgatccctccacctcggcctcccaaagtgctgggattacaggcgtgagccaccgcgcccggccctgagtcacctcttgaatgctttgctgcttagaaatttcttccaccagatccctaaatcatctttctcaagttcaaagttccacagatctctaggtcagaagcaaaatgccgtcagtctctttgctaaaatataacagaagccacctttgctccagttgccaacaagtttctcatctccatttgagaccagctcagactggatttcagtgtccatatcattatcagcattttgcttaaagccattcagcaagtctctagggagttccaaactgtcccacatctttctgtcttcttctgagcctccaagctgttacagcctctgcttgttacccagttccaaagtcatttctacatttttgggtatcttttcagcagcaccccactctactggtaccaatttactgtgttagtttgttttcatgctgctgaaaaaaacatactccagactgggcaatttacaaaagaaagcagtttattggacttacagttccacatggcttgggaggccttacaatcatggcggaaggtgaaagttacgtctcacatggcagcagacaaaagaagagaatttgcgcagggaaactcccctttttaaaaccatcagatctcatgagacttattcactctcatgagaacagtacaggaaaaacctgccccatgattaaattatctcccactgggtccctcccaccacatgtgagaattcaagatgagatttgggtggggacacagccaaagcatatcacagggatacgataatgagataaagtaattcagaaattctcgccctcaatcgaggttctgttcttttgtgatagacagggaattaataagtaaaaattattattttacttatttataacagtaataaaaattattattttataattaataaattatgtttaattaataagtaaaaacaaagcatgatgatcagcactaaagagaaaaataatgtaggaaaggagacgaagtattgagggcagaaagctagttgcaattttagacaggatgttctgggtgtgaacgcatctttctagtgaggatctgaaggaagtaagggagctagttgctcagatacctggagcaagagcagtgaggctcaaggaaaggcagtaggaggggctgaggggaaagtgtgcctggcatgttcaagcctaacagagaggctgctggggtcgggcaggatgaacgatggggtaaggccctgtgagggccttgtggggtttcactcccgatgtggtgagaagccactgggaggttttgcccccccaggcctgggccttgaatgtgtgggaaagggcttattaaaaattaaattcagccataaattatgaagcagactcaaaagattgaattttattgaaggaatgaaactggaattgagtgagaagtaaaatctgggtttcatggtttgggagtcatctgtgagaggttgtagttaaattttgaagatggatgcagaactctgaggagacgtttttgaaggaaacgagaggaggaaccaaagtctgtgccctagcgatgtccttccctacttctgggcactggagggagagtcctgtgtcagccttaaaatggtaatagtggtccacctcctttttctttttatttctttcttttatggggggttgttttctaggagatctccagtattctgtcttagacttcttgtaaggtaaaattatggaagaaggaaggaaaagtaattgaaagaatgcatgatgttgactttgtgttgacccatcaacttgttcttttatggaggaatgggatgggcaggtggctggcttccaccccacctctggtgatttagaattacaaccaaaaactgtcacataaaggctgcttaatttctannnnnnnnnnnnnnnnnnnnttgtgtgactttcataccaagcttctgttgtttgttgtttgttttttaaaaataaaacattatgttatagtcgggaccaaaaacaaaatttcacaggctatttcttctgccaaagaaacattgccctctcttggtttaagatgtcaaaacacttagcagtgttttctgcctaattttggagtgttgctttctgattatgaattggagcagtttgccttgaaattgcatagatatgcattttgcccataagtgaatgtatacagctgatttctcgtgtgactttcaaatggaagtcagagttaaaatggaaaattgctgtaggaagctggcacgtttttaaactcctgagtgcttttggggggaatagaacctctttccattcctggttgcatggaaaatattaaaccccttttaagtaagcaggagatgagatgagtattatggattttcatctttttctcctgagttcttggattcaaatcctattcctgttgcagtgttattctgcattaaagatcttgactgctgagattgaaccattattttcatacttatttttccttaaacttgtttggtgctatgagaatattcaatatatagctttttgttgcagagattttagcagcattagttcatcttgactgatgcccttgacttcagagtataaatagaaaaatagagataggtgacaaggattgattagctatcctcattctaagtgaaacagtaaacctagctagataaatcacagctcaaaagcctggagaatgcatggtaaaagaaagaaaggtagtgcgtatgtgtgtgtatgtgcttaatagtgaagttttctaaaagaggtacaagcacagaaattctatatggtctgttctactgtctttccgtttttattttcaaaaacttaagggtttaaataacatatggaattattatttgctttttcttttatttaaagaaattttttaagtaaaagaaaactgagaccaatgtcattgcctttttaagtcagatatatgtgtgtgtatacatctgtgtgtgtgagagagagtgtgtgtgtgagagagtgtgtgtatgtgtatatatatatatatgcacatatatgcatatacacatacatataattactttgttattagactttaactgtagggttggaagggctcaggggagatcgcctgatttttttctctggcacttttaagctatttaagcattttaatagtgtttactctgtgccaggcagtattctaagcacttgatatatatgaactcatttaactctgacattcagccaaagagatacatctattattatccccacaaaccgtacaaggaaactgaagttcacagaagttcagcagctcacctcatgagaaatgaagctgggattttaacccaggcatcaaggctgtgtcttcagcccttatattagcacctgcctctctccctctcctcctcttctttctagatttttcagttcgaagggccagttttcactctgacttccctttacctgatgtggtttcttcagcctatagtttgagcctttttcagtttgttttcctttattcttttcttgagcctggtgaagaacaacccttctccatgtctccatccgtcaccgctgctccattctttcaccctcctcctcctcggtgatattctccagccttcaaaccatttctgaattcttaagttacattacatcaggattagaagctgctgttataacgacggcttgtccagttctgagtaagatagtattaatagcacaattacctcatagtttctacatatatatactctattcctgtttgccacatcttttttctcctgtatttgcaaaaatacattcttcttgcgttaacagtttgctattatgatgccatgcatgtaatcatgagtatttctcagcttttctaagacctttgaattttaacaataattcgcaaacacgcttgcctttctgtggacattttatgggatttattcaggttatttatgaaagtttataactgtgtcctatgatctcctggctcttgagacacactgctgttaatatgtcaaatatgtaaatttccatttagtgtggaactgtcaaagacagttgtatgattcagtttgataaatgggtactttgggccagctgtcagggtattatcttcctgactgaatccaagggaagagaataaagaatggaataccatcctgcacccagcactcttcacccatatcccccacactccctctctacttggtttcatctagcagagcctccattctcttactgaagatgaaatcatgctgatgagttctgtccttcctaagccaaagataattatgacctgattatctggtaccacacaatattaagtttgcaaaagtgagtttaccctgattgctgctgcattgtattaagtaaacagcaattccaccagattgtaatttgtaaattcagcttttttcccctctatccttgaccttctacaataatgtttaatatttagtctgaggtgactggggtgggtgatgaacagtctgccttgtatgtttttcttgactatgctgctaggttttattattattattattattattattattattattattattattattataggtgttgctaggttagaattgtttccgcctatactggggactttgctgctgtaggatcttggatagttcacctgttcctttctttgaaagttttgcatgattgctgaaattcagtctataatatgtccattagtgcaatcagattcacttttaactggcatatttatgcccttataactttctacccagacggtgagaactttggccagtggattggcggtgaagggagtgtttttccttccagctggggagcttacgtgttcctgagcatcctattcttgcctctgttttatcatgatagtattgtaatttagctctttccctatatgtttcccccacctcagtgaaattctcaaagactgtgagtgcacagttcagggcctggcttcgtgatgttctatagggctaatcttacactttcctttctttattccaaacttaatttaagatggggctattagtagtaatccaaggaacctcttagttttgaaaggattttagtaattgtccaaggggcttacactccatacatgtatatgtttgaaaaaaaattacttttttagcagtggacttggaaccaaactttttggaacacaactatttttatcccagttttacacttctgtccaggtacatggtagagatgccatagatatagagttatattgaattcctttataataataatgcagggggaaaggatcatctggtgaatggaaaaggaaccctggtagaggaaggggatggggcagggattattgcaatgactgcctacggatgagggaaaagttgagattggggtatgcatgtcatcagaggaccacaccatacaaatttgagtggtcacaggcattctaggagttagagacggagatgttagcagaggtgtgaatagaggtagggtctatcgtgatagtagatggagtcctgagaatggaagttttatatgggatgacaaggaaagacacagtgtggggagaagctatagaacgcaggtagatgatggccaacctgaaaagaggacaatggtggttgttggccatcataacaatggagaaagggcaagaagagaggcagggaatcccttaagcagcaagggattgctgcagggatggggaaagggagttttctgggaccctgatgactttggcagcagccagtagtgttggggctgttctgtgaattgtatatggtcaaccagtgattgatgcttaaattgtatgtagtcacggggagcttgtgactggccaaagaatggagtaacacgtttggcttagcctgccaagaatgagatcatatttgaccataatgctgaacaaacaggattcaaagggtagatcagaattttaatttactctgttctcctctccctcggtgcctattcaaaccattttgtggagctgagttttctgttcctggatgaaatcttagacaaacttgtttgcttcactaacttctctcagattaaaagcaaaaaatagttcaaaacttgtattcataaacacacagtcttggttcattaattgttatgtctggtctagtccaggacagttaattcaaaggtaaggcttctccctcctgtccagcttctgcttgctgtaggtgtggagcctgcagtgggaaggagtgttgtggtatgcctcttctcccttgttgtctgccagacatgtctgctcttcctcccctgctcaccaggcgactctggattcttcagagtagactgggtggggagggaggataaagggcagaaaggtcttacagaaccgaacatcggtttgccgctggtttcttctggctgtggctgatggtgaacctgactagttcttttgtggacccttttataaattctttggagagtcccttccttctctatttctgtgcttctctagtctgttttccttgacgtgggaggagggaggagatacacctcctctttcattccagtggtatgctgctgaggtctccttatggatccaggcagccttaattcagatgcagatcatgttgactttgtagtacttatggaatatttaggagaaaatacccttctagagtcagagagaagccagaggtggaagtgtagatgtgggggtaactgctttgcagatgatggttaaaagtcatgagattgagcaaggttgcccaggaagacaggaggaaaaagatctcaaaaagacacttgcatttaagaggcctagaaggaaatggagctggcaaagaaggtggaagcatcattcagagtactggctttagaaaagggcaggctggatgggagccagcccagaataatgcctattagtatgtctgttctttacctggaaaggggaacttaaaacacatatgtttttatttaaattgtgtaaagactctacactgttttcttcctgttttaaaaattgatgttaattttagttttaaatttctaattctttgaagacaaaaatgttaactttttttccagttgtatatgaacacagatcaagattagagaaatccttgcaaaaagaaagacttgaacataaaaaagcaaaggaaggtaagtaaatacataatttgtgttctgtgtttttccagtactcttctttgacgtatcatatacttggtttacaatttttttttggctaagatcgttctcaaatcaacccaaagtcagataggtggacagagaaagacatgtcaagtaatatattatgcattgtgcaataatccctatacaagattggatttagaatactgtattcagtttatgccaccttgtgatagctcatatattggttacacttattatttcaggaataacatataatttttcatctgcatattaaacgggtatattacttacacctggaacttctgtccacagatattgagggggctggggttggggggggaagtaacaggatgcattgtccagaatatgacaaattttatacacatacatatatatttataccgtaatgaattgatcccattgtccattatattttaagttatgcacctgtttttaccttgtgaaagtttttattgacacatcagttgattcagtttgaaagtttacatttaggacagccactgggcaatgctgtcaatttttatcagaatttttccataaaacacaggccttatacagctgatgatttgaagttatctgcattctgatatttatttattcatgttttatgataaatcttgaaatttaaattacgtgttctgtctgcctaccttggtaggaaggaagaggatagcagaggaggggcagtattggttaggatgttttactgacccttggattgagcctgtgtgaagaatagaagttcagcatcattaaatgctttgataagatttggagtctccttgccttcaaatgcagagtgattttatagagccatctagtggataataaggttttcaaagcattaaagatggcttggctggcttgatttctgttttcaggaactgaatgattttagtgtgccatctagtggatagcaataaatcacctttgtcttcagatgtgctccattttttccctcctaaatttcaaggagagttaatcagagatattctaaaagcacttttaatcaattggctataatttggattttgtggatgcaagatttacagctgtaaggtaaagaggaagctgtatgttttttccaattctttctaaagcaatgagagccaaaataaagtatgtaaatcaccaagtagattgttttaaacctaaaacacttttgtaagcatgagtgaagtttgcctttatttctttagatgtttaaaatctgtgtagtgaattatcactgtttttttccatcttgtattttctagattttcttgtttataagttagaagcacaagaaacattaaataaaggaagggtaagttttgttttttttgttgtggttgtttgttttccttaatttgttttcataaaacttgaaagagagagaaatacagttgcgaactcttttactttttgatccctgggattataggactgacaccccctttttttttttttggctgccaaaaaattctaagaggaagactttaaacttacctttacttatcacattgttgataatagggataaactgggaataaccttaatgttcaactataaaaagaagattatttcatttatttgtttgcagtctctcttttttatagaatgtaagatttattttggtttgccttcacatgtgtaacatgcaacacaggacctggcctagagttttcatttaagaacatttgtggaatgggtgaagggatgaatgatactggcatttaaaaatattttacttgaaggcagcatgctcgttaagagtcatcaccactccctaatctcaagtacccagggacacagacactgcggaaggccgcagggtcctctgcctaggaaaaccagagacctttgttcacttgtttatctgctgaccttccctccactattgtcctatgaccctgccaaatccccctctgcgagaaacacccaagaatgatcaataaaaaaataaaaattaaataaataaataaataaaaatattttaaagtccaaattaactggataaaagctactcttttcttactctaagaaaagtatataagcattaattgaaaaacattgatattttggggtattaaaactaagaagaagccaagtgagttggctcacatctgtaatcccaaaactttgggaggctgaggcaggaggattgcctgaggccaggagtttgagaccagcccgtgcaaaatagcaagacttcaaagtacaaaatattagctgggcgtgatggtacacatgcctctattcccagctacttgagagctgaggcagaagatcacttgagcctaggagtttaaagcttcaatgagctatgatcccaccactctactccagcctggacaacagggcagaccctatctcaaaataaaaaaactgagaagagtcacttctttggatagcccaggaggccatcagctttcaactcttgcttgcttttaacagcactaaccaaagctgtgtgcacttgtaatttccttacaaattaaagcagtaaagtgaggaagcaaaaatgcagttcattttagaagtttttaataaaaatatgaaaaaaaatgcatgagtgtatacttgtgctggcagggtaaagtgagggatatggtacctaaacataaacaacatagcatagagagggaaaagaatcaggtgtgttttgcatactgactggttatggctgcccgggactattgggtccatatgtgaagataccccacaggaacacaaagatatacccctggaacctggagctcaggacacgcagttcagccagagacttaggctcaagtttcaatcctggctctgctacttaatgaaatatttgctcttggcaggttcctaatctttactcagtttctcactctgcaaaatagagcctcactggggtaaaatcatgtatatagaatttcttacccgctgaagttcagggaaagaaagtgccttttctcttccccctttaagccatgctcagcttgtgaggcccgctcctcatcggtttatttcttcttccctcttacctcaagcacccagcgcatatattagccctgcgcggtgactctgtgtctcaggacaagttcgtatgtctgggctccagttcttctgaatatgaaagtggaaggaaatcatctctaagggctctttcaagctactgttttatgatttcatatcctgcttttttactctaaaatctagcaaactaaggggaatgttaaaacttcatttctgtgttaaatcgatggctccagcgacatcttggttcaaatgtagaattcattttactgtacacaagtgaaataaataaagttatattttaaagtgctttaagctgtatttaacaagagagccatatttatctttgtgttttctttttttttttttgatttacagcaagattccaatagcagatacagtgcactgaatgtccaacatcagatgttgaaagtgagtaatctaaagttgttatttatgaataaaagaaaggattaactaatacttgaactgactaatggcctttaaagtgattaaagaaagtttacagaagttgatttgtattgtaatatggcattttaaaatcttatttggctaaaaattatatatagttgtaatggcttgtcgtatttatcactcgattacatagaacattttaattattacacattttcttgcaaatcaggctctcggttacctcatttttaattttcttcttctctctatccattagggttttatgttcatttactttctcacagtggttttccttagacattttcttttatcttacacagattggaggctgtagaactattaaaatgcttccttcttgttactaatatttaataaatgtccttttacttaccacaggaacacaaattattatttaaagattctgcttccttggtccttgagtaaaactcattattgtgtgtcaggaagaggatcattgtttctgtcaagctggaagagacgggcagcatgcagttatgcccttctcgcaggatgcagatcatgccggcatctccaccccaccgtgcctccccctcgctttctgtttgctattgtctttccctctgatatcagtagggcatgcactttttattgaaaccggaatcttttcttattatcaagagagcagtaaatgaattaaagcaaaccatgctttcacattaagcacttggagactgtagtgtttatctagatcatgattacattgtaggattataatcggaaataaggtaaataaaagtcaattctctaaacagttgattactattcccaaagggaaaagtctcatttactctctctcttttaaactgagttaccagaaaggctgaaataccaaagaaggaaaattaaatgcattgctgggaaaacatcagatcgaaagaggaaatccataatacccagggagggataattttgccattagctttaccttgtttccacagtaatatgtgtccctgggaattttcccacattttttccctttccatctctcatgctaacttcttaaaaattaaggggaaaattatttttggctgtgatcccaactgttcatttgaaatccaggggaaatggagggaagctgcacaaattaaagcaacttgagaaaaacaaagcctatttcttcatgtgtttgtgcttgcttgctttcatttgtttttgtttactgtgctgtcaagaaatagactctcatataattcagagaatgtatatttctactcaagttttcatctttgcagagccaacacgaggagctaaagaaacagcacagtgacttggaagaggaacatcgcaaacaaggggaagacttcagtagaacatttaatgaccataagcaaaaatacttgcagctccagcaagaaaaagaacaagaactttctaagctaaaaggtatttggaaatctgattagccagtttatctctaaataagtactgatattaatgtttcagtgcaactgtagactgttgttttgagtggtgatcgatttacatttatcatgtggtcctttaccagtcactttttctttgtaatgtttcacatgtatcttcatctatttgggttggtttagggaagcagaatagaatatgtcgtgtgttctgttgtatcgtagtgtattctcttgtatctcagtggggcacatggccctgttgggcaagacgattcttctcttaactgggttgcgagacagatagcatctctgatccttacctactaaatgctataatgcttctcagttattgccacaatcaaaaattgctccatatatttctaaaaatctccaagggagcagagacttgctgttgatcgccagtagtaactgaaaaaagctcaagttctatagtcagactgcccaggtgaatcttggcttcttcactagctatgtgaccatgggtaagttgtgtgacaactgtgggcttcattgtcttatctgtgaaattgagataatcataaaaatatcaaccttgtagaattggtgtgagaaataatttacataaagcatgtagagtagttgctcataaatttgctacccatcaacatctgtgtcaggtattttcatagtaatatgaaacaaaatatgtcacttttctgagtgcatgtgagtcctggagaaagaaaccagtgcattctgcaatcaaatatttaggtgaactccagattaatcacaagacacacgtcttccccatttcaaccggggacggtggctcacgcctgtaatcctagcactttgggaggccaaggtgggtggatcacttgaggtcaggagttcgagaccagcctggccaaaatggcgaaaccccatctctactaaaaatacaaaaattagccgggcatcgtggcacatgcctgtaatctcagccattcgggaggccaaggcaagagactcgcttgaacccgggagacggaggttcttacagtgagccaagatcgcactaaaattaaatgcattgctggggcactgcattgctggggcattgcactgcactccagcctgggtgacagagagagactctgtcaaaaaaaaaaaataggtgctaaataagtttaaagtgagataattggttttaagaggcatatggtgcatgcaaaaacagtggtcaagcccaaatcaagtttgtagtctagttcactgtactgaccccaacagtttcctggttttggtaatgtactgtatttgtataagatgtcatcatgatgggaagctgggtgttgtgtccttaggaccactctatatgttttttgcaacatttctctataatatagcatttcaaaaaaagtaagttacaacaaaaagtcatgcaggagttaaatagtcttgaggcagtactacaaagggttaagggtctatactttctgattattttatttttatatatttttaaaattttaaattatttttaaaaatttgactgaaatgctgaagctttgtttttaatttgtgaagagactcaaatctgagtacacctacgcattatattttattcctaagggtatgcttattgacattaacatctcatttttaattcctaggtaacaaaaattccttatcttttgtctgtcatgcaaaagttgtttaaaagcatttaaagtactgaaccagagtggattgagatgtccagctaaaaccatgctacatcccaatacaatatcatttttgttgattttgaatattatattgtctgagttcaaaataaattctaaaataagttataggtggctttagatatgaaaataatagaaacagaatcctgaaagtttcaaggctttatgtgtgatccttctttttctaaaatagagactgtatacaatttgagagaagagaatagacaactaaggaaagcacaccaagacatacatacacagcttcaagatgtcaaggtaaaagaaaaccaaacgtttcactatttagtgtttgcctgctttatttggtagaatgactttaaaaagtcattccctaattggcctgctttacaaatccacgttgttattgtgggctttgcattaactagagtgtacctaatatttttaccacttcagcattgtaagctaaaagatggtctgaaaatctgaatattctcattagtactgaaattattctcatgctagttacatattaataagctttttatttataaaagtttactaataatgagaaatttgtttctttggttttgatttcattgtaaataaatgattatgatatttgggtagcacgttttagattttggaatactacataaagcgtagtgttctctctacgatgatttttaaacttaacacatgctgctacaacaacaaataaacaagcaagtaacatttgggtagccatatcacgatcagccaaagaagaatttgtcgtagaatgttaaagctcaacatgtaaaattcttttttgtgtagcaacagcataagaatttactctccgagcatgaacaacttgtagtgactttggaagaccacaagagtgcactagctgctgcacaggttagaagggtagcagcctctgtgggttcttttacaagtctgcttaacatttctcaattcctttatgcatgtagtctcttacaagccaatcttcagtgagttccttaggacagagctatcctaatcctgaggatcatgcatgctttcaaaattcaatcagtaagatattaaacttttgattattttttgcactggttgtgcggtacataaatgatcatttctttccactctcgtccctacatgcagtagtctaatacttgtttaaatcacagaaatgatctcacatatatagtcttttgcaactatctgatctgtgttgactcttggtgtagtatctgtaggattttatgctgctagctacctaaaactattgtcagactttttcttctgtgtctgccttgctcccagaattccagcctacacaccctccttttggaacgaggcttatgtgttgttggtcaaattacagaaaagtagaagagtcaacagagaaggaaaaacaagagtcataagctccatttgttcaaacctagaacagctcctggcacaaggcaggccctcagtatatatttactgaatgaacaggggaacaaatacaagtgttggagagcttattaaagcgatttcatgctaagtgttatgcagatttctagcagaaggaaggaaacaggaatggctagtttagttgctgttgtaaactagatcttcacttttattcttactggaggaattatgataaaagaacaaaggtaaacgatctatgctcatcaggaaacccatgttggttttcttttctttataaaattattaaaaggtataattttctgtccctgacccatctcagaggctgtagcatctgtgtttgtgagattccttttctaaacagtcattgattaggtgtctcctcctaagctgtagctgtgtagtgattttttacatgtgtataaatgaaatggacgtcagggatcatttcatttcacgtcttctttataaaaatttttgtcaagtattattttatatgaggctgttcttcatactataaatgtgacaaactgatttgagtgctctgtgtgctgtaacggccataaatgtaagactgagcaacaatttgaaaatccatagaaagataagtaaaatcatttatttgatgaccaaaaccaaattctggagtagaactctgacagtattactcacagggttttataatagaaaaaaaaattttggccgggcaccgtggctcatgcctgtaatcccagcactttgggaggccgaggcgggtggatcacctgaggtcaggagtttgagaccagcctggccaacatggtgaaaccccttctctactaaaaatacaaaaattagccaggcgtggtggtgtgcacctgtaatcccagctacccaggaggctgaggcaggagagtcactggaacccagcggggcggaggctgcagtgagccgagattgcaccactgcactccagcctgggtgacagagcaagactccatctcaaaaaaaaaaaaaaaattttttttttcttaatatatagttataattttctatttattgaaatatcttttttggcgaggatgctcaaggtttgtcctgccttaaaaaaaagtgtcagaactaggtgcaatccttaattagagccatatgtgttagttactttgggctgctataacaaaacaccctagactgggtgtcttataaactatggaaatgtatttctcacagttctggagactggaagtcctagatcagggtgccagcatggtcagattctggtaagggccctcttcttccaggttgcagactgttgaattctccttgtatcttcacatagcagaaagagaccaagaaagctctcctggatccctttgcaagggcactaatcccattctgtagggcttcacccttacgacctaattacctcccaaaggccctgcctcctgatccatcacattggaggttaggattttaacatatgaattttgagaggacacaaacattcagtctgtaatactgtattaagactttccccaaatctccttttaaaaaaaatgctgtttcaggcacctgcatttctcatgtaaatcatcttaggagattctgccttgacaacctgatttttaaatgtagttgagtattttatttaatcctcacaaccttgtgagttatataatattgtacccttttataactaaataaactgagatgaaaagggaagtaaagtagctggcccaaaatcaatgaccagaaccaaggttgaagctcaggttatcctgactttgaaatcacgcttaactcttaagtgatattttttgagacttcctgcatcacaggtacctgggccttgtcctagacctgttgaattataatttcaagagtaggggaccaggagcctacatttttaatatggtccctaattgtgcaacacacaattactgccttcaaagattatgtgtctaggagaaagaaggagtagaattgagttttgtgtattgctccatatttatcttaaaatattaaaagcattgctatgtgtatgtcatttattttttacctccaaagttggtttgcaaatatttagatttctcagataaaggccattgctagtcatatggtgcacctttgtacaaaattattaaaaggcagtgccctgggaattatttagcaagcaaacttcattaccctagtgtacactagaaagaagcaaaaaaagcacctcactcttggggtggaagagcagtgtgccatggtgcatagctatggcagcaggaatgctggtgggttctggctccactcacctgctgcgccccacacactgcggagctggccctgtctgggaagcttgttgagaaaaagacttctgtgttctctgcatgtgtttatatgtctgtttacacacacaacatttctgttttcaggataacagtgttggtgtatagaatgagcaaagtatacacaatgcctcttgattttgttaattaaagtaattgatttttttctaattttctagctccttgtattaaaaatattacacagacatccacacatcccaccccatgtacacacaggtgcagctgtatgagcagattctagtcctgtacctgtgttagtacctttgtcactttagaagaaaagatcattcacaatcaaggataaaaaaatccagtctatatcacagctgtgccactgttttccagaaaccacagagcacagtgtaggaaacattctagccaattagggattctatttgagcacaaattaactgagggggaaaatggtagcctgagtatttatatgtgtgtgtgtttgtgtgtgtgtgtgtgtgtgtgtatgtgtatttaaaatttattttaaacctatgactcctttctactgaaagattttattcagatcatattggtaaaaggtatttgcacttgtatttttataattatatgagtttttaatggattttttaatatgataaaacatcacagaacggtcttttaatagtgatatttatattagtaagttatttacaaaagttctgacttcagtgtagtatgggaaactaacatctgtcttagatattttttctgtttccttcagctctgtttctaatttgcatgcgctcaaaaatgattaagcatgcccaagtaagaatagtgaatgcatggaaacaatctgtatgtttttctaacttgtatttaggtacaatatttttgtctagttttacagtgtacccaaatgcccatctatgaatgggcattcatagattccctcctcaaattgtgcaatttatatgcagactcaagttgcagaatataaacaactgaaagatactctgaataggattccaagccttcgaaaacctgatccagcagaacagcaaaatgtgacccaggtggcacattctccacaaggttacaacacagcaagggagaagccaacccgagaggtgcaggaggtaaggggcgtgaactggtaatctatggttaggtcactttctctgtcaagctgccaagaggggacctgcttttaatattgccaacttttctgggagagcagtagttctcaaattttagtatatcagaattgccagtagggcgtgataaaacacagattactgggtcccaggcccagagtttctgatttagttaatttggagtgaggcctaaagatttgcatttctaactgatttagctggtctgagtagcaaactttgagaactgctgctagtattttctttctttttttctctgagacagtgtcatgctacgtcgtccaggctggagtgcagtggcacaatcttagctcactgcaacctccgcttcccgggttcaagcaattctccctgcctcagcctcccgagtagctgggattataggcgcccgccaccacgcctggctaatttttgtattttcagtagagacagggtttcgctatgttggccaggctggtcttgaactcctgacctcaggtgatccgcccgccttggcttcccaaagtgctgggattataggcgtgagccaccacacctggccgctgctagtatgtctgagaaaggctttaatggctttgtctttattcatgtaggtttatttgtcttcaaggagttgtagtatctgagtttttcaaggttggggattttgcgggggttagggtgagaaggttaaatgatcatgaggattttatgtgacagtcaacccactcaaatattaaagttaataatatattttaacttggagcagtgctaggtctacacagagcatgtcaaaatttgaattaaatgacctgtttgacactcctacgggtatgagtgctagtcaaataatacacctttttatattcttgttctttataaaaattaagccttaagaatatctcataagtgagacatcagaagtagttaccattaccactaatttctacaaaggttgttttttttttttccaatcatctgtaataaaaaaataggcaatatggttatctttctgacaaagtggttgttttaaacttttaagttcaggggtacatgagcaagtttgttacgtaggtaaactgtgtcatgggagtttgttgtaaagattatcttatcacccagctatttagcctagtacccattagctatattcctgctcctctccctccaccttctgataggccgtacagtgtgttgttcccctctatgtgcttatgtgtctcatcatttagctcccacttataagtgagaacatgtagtatttgactttctgttcctgtgttggtttgctacagatgatggcccccagctccatccatgcccctgcaaaggacatgatcttgttctttttttatgactgcatagtattccatggtgtttatgtatcacatttttctttatcaaagtctataattggtgggcatttaggttgattccatgtctttgctattgtgaatagtgttgcagtgaatgtgtctttataatggaatgatttctattcctctgggcatatacccagtaatgggattttgctgagtcaaatggtatttatatctttaggtcttggagcagtctccacactgtctttcatgatggttgaactaatctgcactcccaccaacagtgtataaccattcctttttcttcacaacctcgccagaatctgttatttttgactttttaataatagctcttctgactggtgtgagataatatctcattgtggttttgatttgcatttctctaatgatcagtgatgctgagttgttttttttttttttttgtatgattgttggccacatatatgtttgtgttagtccgttttcatgctgctcataaagacataccctagactggttgatttaaaaaagaaagaagtttaattggacttacaattccacatggctggggaagcctcacaatcatggtggaaggccaggaggagcaagtcccatcttccatggatggcagcaggcagagagagagagcttgtgcagggtaactcctctttttaaaacgatcagatcttgtgaaacttgttcactattgtgagagcagcacgggaaagacttgaccccatgatnnnnnnnnnnnnnnnnnnnnatgagattttggtggggacacagccaaaccatatcagtgtcttcttttgatgtgtgtgttcatgtcctttgctcacaaagtggtttttaacattaaagagaagactgagaaaactttcctccaagttatgggaataattaagttgatatgagtagacttcatatatgagcctcttcactctgttcagggtattccttcaacagacaggttcagtatcttcatggactcttattctttctcaggctcttatgttaataactaaagagagcatgaccagatcactggcctggcagttggttctattttctgcccttgtcagactgccagtttactggattaatcttccagtgactcagatcttcagtttttccatctctgaggtggagataggagttatctgcactaaccttcctcactaggatattgtgaagataaatgacaagtgtttgaaagtacttagagctctttagagaaatatttttctgtaaagccagggcagtattatgtcaaacttgccagatatgtgaggatgtcggtggaatgtgcaactccagttgtcctcaaatgtctgagaaaggacttttctccccagtttattaatacagtccaatttctcagatttgataattatatctctgctaatttaagaataggatttcacatttatttcaattttgggagagcagtctaaccaaagaagatttttttttctgaaggttaaagagaaaaaaagagtgacgtttgtttctgttgatatactatattctctttcttcctcactttctaggtagtgcagatcatatagagatcgctgaaacttatagggagaactgatttgagtcaactaattttagaggagggttattctgaaaaagccatttcttctttttctgctcagggttttcaatattagcaataaaaaatgtttacaaaagagtcctgctggtttacaaataattactactttaatacattaaaaatattttattgtatcttgtttaacaggcactgtgttgaactaacatggatgttcattagtaatggcattctttttttttttttttttttttttttttttttttatgagacggagtcttgctctgtcgcccaggctggagtgcagtggcgcaatctcggctcactgcaagctccgcctcccgggttcacgccattctcctgcctcagcctcccgcgtagctgggactacaggcgcccgccaccacgcccggctaattttttgtgtttttttagtagagacggggtttcactgtgttagccaggatggtctcgatctcctgacctcgtgatccacccgcctcgacctcccaaagtgctgggattacaggcgtgagccaccgcgcccggccaatggcattcttttttaaattagtaaaccaaactagtaaaaactaaacccaactcctcaattttatttcatccttctcttttcaaataattactgaaaacaaaatttacattgaagaaaattatgtaaacatttcatcacttgaagtttgaggttttgttcctttttattctaagggaaaataggaattagagtacttctgagatattggttacttggaggttttattttccaggttatttactgtattcttcacagatgaagttttgcttatattatgtctattttataagtgagattacacagtaagaaacttaagtgactccattgcagccataaagccaggactatatatatttctagacaccttcttctgttgtagccccatgccccatagacatggaaatcaagaaattacatcattacttttgaaattggaagagtgtcattcccagtgatgtgcttggcctaggtgtctcgaaataatgatgtgtggcagaaccatgaagcagttcctggaagagcagaagacacaaaactctatgctcccacccataaggaggcagaatttcaggctcccccagagccaatccaacaagaagtggaacgcagagaacctgaggagcatcaggtggaagaggagcacagaaaggccctggaggaggaagaaatggagcaggtcgggcaagcagaacatcttgaggaggaacacgatccatcaccagaggagcaggatcgggagtggaaagagcagcatgagcaacgagaagcagccaacctcctggaagggcacgcgcgtgctgaggtatgaagtcacccgcttctggtatggtgtactgggatggaaaacctggctttatttttacatattaaggtaatatatcacaatctctaaaatagaaatgtgagtgattctactaaacattatatgctcatatttaagttttctcttgtaatgttaatagcatagctattcgcatacctcagaaagatgattggtgatgagagagcacagctgttgtatgtgtgcattcttctttttgtcagttgtacacagtcagagattcattctcacatcaccttaatagagtagaacaggtgagtacctgatggggcaccttcccagcttgtacccaagttttgtcttgagcatcttgaggcagagaaaaatctcattttctatgatcaggcgtcctcctctccctgttcatttattgtcagtatgttgccttttgtattcaccttcaaggtggttatttaattatcaaaaatctgattttactacttggagatattctactaggtgagcatatctaaacagcctctgctcaggatcccttactggacacgccacttacacgtaagacttttccctttcttaaaaaaaaatggccaggattattataaatgatgctttaaaagaaaactctaccctttcttcttttaaaccaacagttagtgcagctagatgcctttcttttactgtctctaaactgagtctcaatagtaggttacctggcctttacatgggtgtggatcaccttctatttataactctgaagttttattcggcctcagattttctgagacttcaagccgcttgaggctttaggctaagcaggtgtgaagacctctgtagttgccctcttaggtagttgcaaacttaacctcagaaagcttcttccagtcttgtgtccttccccaataggggaagtaattccccaccagctttacttcccaaccctctacctctttccttaagtgagaattgtgtgtgcttttgttagttggggtatggcagggaggatgggtagtagctcaatggggtacagacactttttattgatgcataatatatgtatatattttcagagtatgggcgatattttgaaacattcatataatgtataatgatcaaatctagataacccatcacatcaaacctagataacccatcacatcaaacatttatctcttttttattttgggagcattcaaattcttctagctgttttgaaatataagatagattattgttaatcgtagtcaccctactgaactaccaaacattaggtcttattccttctctctaactatatgtttgtaccattcatcagtctctcttcatcccccttcccagcttctagtaaccaccaatccactctatcttatcaatatcgcttttttaagctcctacatgaatgagaatatgcaacgtatgtctttctgtgcttgaagtttttcacttaacataatggcctccagttccatccatgtcactgcgtatgacaagatttcattcttttttatgactgtgtatatgtaccacattttctttatccattcatccgttgatggatgcttaggttgatttcatgttttagccattgtgagtaatgctgcaataaacctgagagtgcaagtatctcttcaatatagcaatttcctttcttttggatatgtgcccagtaataggatagctggatcatatggtggttctatttttagctttttgaggaacctccatactgtttttcatattggctatactaatttacattctcaccaacagcgtacgagggttcccctttctccacatcctcactagcgtttgttgttgcctttttgataaaagccattataactggggtgagataatatctcagggaagcagagttttaagaattgctgtatcagatttccctttaatcagaaggcaccatcttctcagccattcttagtttctttgaaaaaaaattgaatatctgcttttccactattacctggaatgtggctttttttttttttttttttggctatgcttagcctgggattggtatatacattactagagttaattagcatccctcggtctttaactgttcatggaaaaagccttaggcgtagcataaggtcacagattgcccagttaatgtgaagttaccaaagttaccaactacttgtttatatcagagccttgtgaacataaattttacagtttgaaactgttatcttcggttgtcccttctgttccatttgagaagggagcacattgaaaatctgccttaatagcagtagttggaaatatcagctgctaaaaaagccaagggtgattcagagaaagttgggaaataggagtttttggacttcatgtataatcacagttcacctgacaaatagtcgttaataaaccagctctgcctcctgagtttgtcaggagaaacaaatgaagagaaaacccagaggagctaacccctcttgctctgcaccaactctttttcaccctaggtgtacccttcagccaagccaatgatcaaattccaatcaccctatgaggaacagttggaacagcagagactggcagtgcagcaggtggaggaggcccagcagctgcgggaacaccaggaagctttgcaccagcagaggctgcaggggcacttactacggcagcaggaacagcagcagcagcaggtggcaagagagatggccctgcagaggcaggctgagcttgaggagggccggccgcagcaccaggagcagctccggtagccttccccttccttaatgaacgaagacagcccctgctccagttttcatacgcaaattaaaaacagttttgtgcatttgtgattcatgaagttaaggggctcatattgctcaaatagccaaggcaggacagctacttgaaaattaaataccaaatatttaattttaaaaataatattttttttctgctcaaaagtggtaggttaggtctccaaatagccttgcaggctttgtgccaactttattttattttatctttaaaagatattttatctttttaagataccttttgaaagtgtatctggaatttttattatacctaattgcatacataagaggtttttaaaaatttttcatggcttcttaaaaatgttgagaaacattacttattactgtctttaaagataaatgacctatgtcaaactgtgcctctgaattttgtcccactggatttatcatgtttgtgtctcttgtaggcagcaagctcattatgatgctatggataatgatatcgttcagggagcagaggaccagggaatccaaggagaggaaggaggtggtgagacttcctagatgatgaatgttttaataaattacttgataacattgtatattatcagtgagccaatattatataacatcaatgagctgtatgcatacctaagtgcaaaggaggtttgtgaatcatgtctttttcttaatcctcttaaacagtacatgctggtagtgaaaaatgctcaagataatctgtttcctctctatcattttccctgtagtttaagctttttatatactaaatatttataatatttctgacaaattattataggattattatgctttgggaaacatctgcattttctccttaccttggaagtcctcacatcattgccttaaaatgttttcaaattaagtcaatagtagctttcatttatgataagcacttaatatgtaatttatcaaatattgcttactgttataatagaaccagaatgtaacttactgtctctctggcaccactaacacttagatgtgtatctttttctaaaaagtcagaaagaaagtgattacatacaacctccctcaatagcccgttgtgatatcttacagctcttacagtcaagaaattgttttccttatgtccgccatgtggcactttaagcttttttgttctcatatcagtaagactagagaatggcttgtcctcttctctatgtagtaaacccctttgtgcacttgaaggctgatggtaagttaccccgtatcatcattttctctaggcttagtacactccatatacttaaactttcctcttctatcttacttgttttaaaaagtgatttgttcttctctttttgtgctcatacaattctctttatctaaatattttttcaaaaagcagcaagtaaatgtctgagtatgaatgtgtgctgtttctgggctgtggcggtcatcatcattactgtgatgacatcagaaaacatgtgatgggctatatttgtttctgagctccacagatggggcagttcttccttgcatttcctgaaactatcaatttcttcttttggagcccagctacttcctctgatattatcaaacattagttgatttcttcagcagtgtccaatcaactgggctttcttttattgagagagttttgattgttgttgttttcttgcatatgggggaaaaattacagctcctgtgaaaaatatttattttagaagaaaagtgtctgacccatatcatctctctagacacacagtctgtgaagagaacataaccttattcagaaaagccaggacataggccttatgttgagttaacagaggtggaggtattgtagtctgtagaaaagtccaccggtggcttttctttgagttgaaagggaaatcctgtttgattcattttgggctgattttagttcctttgatttgctagcctatgaaagagacaaccagcaccaagatgaagcagaaggagatccaggtaatagacatgagcctcgtgaacaaggaccccgagaagccgacccagaatctgaggcagatgtaagtatcctctcttctgcccctgacacatgtaaactcataaggtgggaaagagagttgaaaacttgcctgatgccagccttcagccccagatatttctgttatatcctcagcccagaaggaaaatggcttgcataattatatatgggcagtgtttttaactgtaaaccatggtgtacgtgtatgtgatgagctggtttaaaagttgctctgggggaaaaaaaaaaacaaaaccaggattttttttttctgatgacttttagattaataaaactaaaacctagaaaagcaaaactgagagacactgaaatatgtagtaactctgaaagctaggaggaataaaaggcaagtgtggaagttggagatgggaccagagaaaggaaactaacccttcctgagcatgttgagcagtctgctagagtgttaggtatttgtgtgactctctgtaatctcttagcagtctagtgaccattttaataaatatatggataaggatatgtggtctgagacatgaagagttgttcaggtatgcaatggtacagaaaatttataatataagtaggtagacatctaataaccagcattgttgtttgtgtttaccaaaaaagactgagacctctagttcagctgggtgggctagatccttggccctgcctacaagtgaagcaagcaaatgtttagtgagtctgttcctgcgtgtatgcgtagatgatttttacagcttattttagctgccctgtcatctcttgctaatagatcaactaccatgtttataacagtcggtctgtgctatgtcacatgagccctgattaaaaggaggacccatgtccttgctaatcatcaagaaagtcatcctgctagctacttaaagcccttttgctggaaacagcttttccacttaacttgcactgagatgtggcagaacacctttccctggcattccttgcatcaagatttctgaaaatatgctccagggaacctagtcctgaaatattttcaggaaaaggctaatacttgagagcagaaacatatgagagagcaagagactatccaggagagagcaagaaagcaagtgtacaaaggcctgcaaatgtgcatggggtgggaggaagggcatttcagtcacttgtttgggaactgctgtaggctttgatttcttgactatatgatcctttactttcctgtcatctgtttgtttgttttggggaacatgctgggaaacattggcctttgtaccattcttccttttaattagaaatggttaatcccacttgttcctctctttctgttttatttgaacgtaacaactgtgcctgctaattcatacctgttacgtggtcggagttgagctagtcaattttatgaacgtttgcaaaagatatttggtacttttttctgaaaagaatatgttacatttttcctgtaattccatacaaatttttgatagtgcactaaagaaaatccatatgacaagagattgtggagtaattagagtttagtgtgaaggtggtaatttggtagtctctacgttcccaagaatagtgtcatttgcactggagtaacattcatggccagggatgtgcagataatagatcagctgagatggcagtgaactctcaaacatgttcaagactcctaagtgaattgaagtagaatcttgtctggagaatactgatagagaccaaatcctactctgtggctttactgtctcttagaagcatttacagcttagtaagtgtcctattgatgacctgggagtgattggggaagctcatgacaagcatcactgttcctctccatctcaggctctaaaatctaaatctttattaggatgtgtattatttggaaggtgctttgggagcttaagtggaaaattgaaataattctaaagttgataatatgaagggcctttgttgagcacagtaatttgggagatgagttgggaggacatttttcataatatattgccctattgggcagttgggtagctcagccctttttaactcccatccctcgccagttcagcatctctctgtttcatgggaatgattgttaataaagaaattggatccatactagaaaatgaccatttccttttgaattagcctttttcttgtctccttttcgtatcctttttatgggtcctttctggtatgggccttctttcccatcaacaacttttcacctgctgacatgttaaaaattgcttgcacagggaagttactataaaaatcaacatagcaaaaagagttaattgcccatctaaatcccccacctaaattagtattttttttgtcacttggtcctctgacttttattaattattttcttgtttattcagttctgttcacattacttgtgtcagtagagttttgagaactattttgaaatcacttgcaggaaagaagtgctatttgaacctcattctgattcatcaagcctctgacaagtaaagcaggagttttctcttttgacagtgtgatgcttgattcttgtgagtcttggcaaggatagatctgaacaattgagggaaggacaatttcattttctgccagtgggcagccttttcaaatnnnnnnnnnnnnnnnnnnnnnnnnnnnnnnnnnnnnnnnnnnnnnnnnnnnnnnnnnnnnnnnnnnnnnnnnnnnnnnnnnnnnnnnnnnnnnnnnnnnnnnnnnnnnnnnnnnnnnnnnnnnnnnnnnnnnnnnnnnnnnnnnnnnnnnnnnnnnnnnnnnnnnnnnnnnnnnnnnnnnnnnnnnnnnnnnnnnnnnnnnnnnnnnncaaaaacaaagtaatcaaaagcaagagaatacagaagtggaggaacatttggtggtaagcagatgccacgaggaagggtggatttaactgggctattttaagaaacatctggtttatgtaaaaggttagtcatattccacattgacggaaggtttgccacttcggtggtttttaggccactttatgacatgatatgcctgtactctgagagagagggtaacggacatcctgggctttgtattgggaatgattactcatcatttcctggccacagacgctttgaaagtgcccttttcatggtggcatgcttgttctttgtcccagagtactgtgtaaaaggcatctctgatgtacagtaacatgaacctgcccttttgtttccaacagatggcaggaaatccagaccagcaggaggacaatgttgatgaacagtaccaggaagaggcagaagaggaggtagtaaggattgaatcccagagactgatcagattggtctgtcacacacactaaccttaaacaaacctcagcagtattgactttgacatgccttccacagaaatgttcagaaaaatttaagcaggataagaaagggtggtttaaagcaaaaatggatcatggcactggagacatttggttagaagataacaaaagcagggtaatagaatccatctctttggttctcacctgaaattttgaattaagaaggcatttggctttccaggaatggtggacttagatttgtgcaatcttttgtaagaatattttctcctctctccctctgcacattgagggaatctggactgcccctgtaactttctcttcaggcatctccccagtgcctacctcacaggaataccccatagtgtctatcggaatccacttaacaccctccaaacatttttgtaaattttacagtctctccttctggcctcttccttcttaagaattcagtatcttaattaaatttaacaataaaagaggaggaaaaagatgtaaagagctcagctgaataaaatgcatttggatagagtttcttaatattttagtttgcttttcattgtaaacttcgggcatcttgttgttaattagatataagtagcgtttattgtggtgctgcttacggtgtagttgattattgtggtgctgcatgtggtgtaattggtgaatgctgcttgttgtagccgttttatcacagcattccgctgcataaacaactgcaatatttaagagtctgatacaaattaggccaagaccctgtatttagtctcattatggaccagtaagtagttcccaaattaaaaccctggttcagagctgcttctcagccaggtgtcttgcaaatgtgtggttttatccctatggggaaccccatgggaggatggacatatggcagactgaacagacacaccccatcactggagatcctgtgcagaaatcatgagctgtgctctcacacacacagttccctcgactaggtctgctttcttgttcttactgattttgtaagcttttcagagctgatgataaaatttgtgcttataccaggaaaacagaaaaggatgttgctctttaaggtcactggcaacatttctaataacatgcactttaactggcttgatctttttgttctttggtttctcatcctaatcaagacccttggctgtcttgtcagaaagagagcagcagagaaaatagtgaccttgaatattaagacattgggcaagaaaaagatattcatccaggcttctcatataacaggatgtctagactaataccactttgttttattatgtccaatactaggaatctttgagggattaaaagagaaaagttcaccttggcttcttttttaaaaattcagaagattaaacataaaattttaaccagtgtttactgattccttttcaattttatattatgatcagttaaggtacaggagagaaatcctgagatccaagaggaatcaagagtagaaagagaagaaagaggcaagaggaaaggagaaatggtgctaagacagaggaggttgccctggctgagtgctgcctaaactcagcaactgctcctcatcccaccagtcatccccttcagatctgctggactgacaggactcttcctcttgctgcacctggccccaggtcctaattcggtttacctggttccctgccaaaaattcttaaagcagtgttcaggcctcctccagcatgtgctccaggttaccaccccatcactgagaactgttgctccatgtgctcttagtggaagtcccacgtgcctttttttcttcccagtgtaaactttcctctctgcccccgagtgtcccttgttcatgttgtgttgtatttttgtgtgtggttatgagatgattaatgtttgcatcttcccacctctgtccatcgttcccaggtcttcccttgagagaggagaagagtggttcccaaataccatttaagcactagtgatagagacaaagttcttgtcagactatggcaaaatgagaaaaataaaggggaacatagaatatggaaacacatactgcattgtttataagtgcatatgtgtatgaaacctcattggtggaagcactctgaaaaaccatgaaatgttgtggaactgtgcattattgttgttgttgtttttttttttttaatctccatttaaccttagagtcttgcagctgccccagctaaccactagaatgcaaggcctgtggctgccatcgcttcccttcctctccagcgcacaaacttatttctgtcagcatttcctcctggggaagaattgcctcttgcctgggccacacctgttcagaggtatagcccatcaaacttacagacttggcctctaagaggacccaaaagaagtatgattttaggaaatttatactactctgccttcttttatcttagtgcagtagtgttatctttctaagacttacaagcatttcttgtttcttgtttgggattgtttgaatggaaggcatgatcccttccttacgttgcttacattccaaacgttttatcgccttgtaagcaaacaagacaatttatggcattgccaaaaagtgccgtgtaagctttaaaattacttacatgttcaaaaatatatagattaaatgaccaagaaatcagaatactttaatttccctcagtgtaactgaaaactgattaatctgaacatgcagaagagaataagtacaaggcatttgttcaccttcactggccaaatatgtacgtacacctacatgagactaccagcctgtgaatcaccgtgtcaagaagcttttcttttttttttgttttttgttttttgttttttgagacagagtctgactgtcacccaggctggagtgcaatgaggtgatctcggctcactgcaacctccgccttccgggttcaagcaattctcctgcctcagcctcccgagtagctggcattacagacttctgccaccatacccggctaatttttgtatttttagtagagatgggatttcaccatgctggccaggctagtcttgaactcctgacctcaggtgatcctcccacctctgcctcccaaagtgctgggattacaggtgtgagccaccatgcctggccaagaagcttttcgattggaagaaactctcttgttaaagcagggtgttcgtcactatagctaatgttgctgaaggccttttgttcatcacattctatctatctctttggatcctactgttcttacctacttgaggctcagctctctgccctggcacacccataatatcttcaatgtgtaaaagaaaggtgttaatagacaccaagagaggatatctagccaaagcccatttcagactcttctcagtggacctgttttattttggatttggccgtttattaaactttgtgtcatcagataaggctcatttctaaaatgcctagaacatatttcagtagataaaaatgagtaacaagaagcattgtttgggaaatctgacaaagcattgtgacagctttagcaggttgctaagagggccagttgtgggagacataatctgtatgtctacattataaaagaatatcatttggcttctgcttattattctagtcatattttaaagatcagttagaacctccatatcattttgttcctttacattactgagaagcattacttaaaggcattactgcctttcagatgagtttgcattgcttttgccccaaatatcagtaatatattactagaataataatgtgtatttaactaagagtttgttctctatatgtgtggaaaattacaaaattttcatttgtgggttccctaaagagtcgttgaaatcagtggtctctaaataagattatattgacaactggtaaacaagctaaattttctatagcccatctccagagactaatgagataacctagcatccattactcaaggaaatagttctttgtctttgctgtgaataaggatcaccttgaagagtttgtggcatacacagatttctggaccagacccttacccttgagattttgatcttatctgttatggaacctaggaagcagagttcttcataagtgccccttcacccgcccaccaccagctgattctgacggctcaggatcatactgtttagagaaatagtcctagggcagacagttgtggatggcatctgggaagtctgaaactcctatctgtgtatatatgcccatttgctaaagactttctaaccaaagtcttaaaagggtccatgactccccaaccacacatacatacaggaaattaaggatcattgatttttcacccaatgctattattttacatacaagaaatttgggcttcagagggattagttaaaaattggaaggttgcatagcttttatttattgttagaaacatgattagagctcacctaggtctgattttaaaggctaccgtaattaagtgtaccatgcacagtaactatatagttgatgtggggaagttctttatagaaattagtgaatatagacagaacaatggaaatacaaagtgaccatttttttttgtaacccctaattgaagcaattgatctaagcaacagtcatcaatgaatgatgttactagatgaacagaggtcagggaactttaccatgaagggatcaggctgtcaccacctgagctcactggccaaccttagccttactaaaagtgggacaaataaatgtgtgtgcctcctgatgtgatttaaaaaatatgtgtgaaatatacaccatcacctctgaaatacccttatttttaaaatcgaacctgagttcattcaaacttttatgctaacttccatttataggaaatgttgagactagagaaatgagttaagtgatataaagaagcaaataaattcagaatgtgggtcattttacagtactgcaaatccatagcagtagggaaaaaaggggagtgaatccccatgttatgtgttcttttcctttaaatcatgattagaatataccaactgtaaacaggcattagnnnnnnnnnnnnnnnnnnnnataagttgtttattgtttttagatatatatactgtgatacgtgaaggtaaaattacatatcttgaatttttaagaataattcactgtaaaaaatagaaaagtgatagatgatgcaggtgtggcaatattgaaatagcttttgaacattggaggtggctctaaggggtttattgaatgattttcttcgtttgcatgtgcttaaagattttcataacaaaaacaattgaccttatgatttatacagtcagaaaagttgcagagccaagtctttagtccaggtctttctgactccatagtatatgttaggagttggcaaactacaggctgcagcctggttcataagtaaagttttattggaacacaaacatgtctgcttgtttacgtattgtctatagttttttgttttctttttttttttttgtgctacatagagtggtcaagttgtattgtgagagaccttatggctaagaaagcctaagtatttgctatctggcccttcacacaaaaagtttgctgatctctgatttagatattcttcctgccatacggcatagactcaaggctgttttttcccccagtctcaactacaacattttaatgtttataaataatatattttcattattaaggctgtaaaagacatgtctttgttaatcaaaattgacagggacacttcagcaatttaatgacgtttcaattagtcagaccttaagataggcctgaagtaagtacttcattgttttcatcccaatgtcctgtggaatgtcactatgaggttctacgactatgggcagaggagatgttatggaccactgatagaaccataaggtgagacaagataggtctttagctcattccaccaggaaatatgaatacaatagatattcgatgcctttgtcctcaaaatgtatttattttgaggttagtttagaggctgtgggtcaaactggcgttggactggttagaagaggttcacaatggtttggctctgcccagggtatctttgaagagtcacctttgtaggctctcgacaggccaagttttgtccaaagctcttctgtgaggctgcagttcattcttgtctcacctgggctgtacaccttcaggcagcacgtaatttgtttcttctgaattatagcatctgtatacttttcttccgttgttcatttcttagatttttccacagtctcctccactccccccaccaaaataagtgatttttgtgttattcaaggatcttattctctgatcctagaaaagatcggactttctttggtattaggagactgcattatacttaaccgatgttcagcagtttttttgaaatgcattcaagtgacttaaacattttggcatatgtatggttttcaaaatagttaacaagttagaaaatgccctaccctgtatttctgtgagatatgatcattaaatagagactatttagcacaaatatttggatgcttgctttagtttacattttgagataaatattgggatcatttacacagtaataatagtgcacatgaatgaaaactacttaaaacagaaaggttgtattagaacactaaagagagagaggaatttttgaggcagttcaatagactatttcataaagaaattgaaatgattgtattttattttctagatatcttagccagagaaatatattcttaagtatagaatagatacataaaatttctactatattgtatgtaggcagcggtgtctatcctttgtgcctttacagaggatttacagaggccacaggttggacaagcttgatctagatagtgacttgaataagacaggcagttcctgcctccatagaacttacattgtgtcacagctctcaaatttctacagttctcccatatacagaaatgggaattttaattttattattttatttttggggagacagggtcttgctgagtcatcgaggctgttgtgcagtgacacaaacatagcttactgcaactttgacctccagagctcaatcgatcctctgcctcagcctcccgagtagctgagactacaggcgtgcaccactaggcccagctaattttataaatttttcttttttgtagagacagggtctcactttgtttcccaggactcaaattcctgggctcaagtgatcctcttgcctcagtcccacaaagtgctgggattacaggtgtgagccaccacgcctggccagaatttttgattttacaagctaaatgtcttcagatgttttatatttggaattttaaccattattcagataaaccagaaattcaaacagaaaagtcctacattcaggatcaatcacattgatttttgtaataggtgtattatacatttcttttttttattattattatactttaagttttagggtacatgtgcacattgtgcaggttagttacatatgtatacatgtgccatgctggtgcactgcacccactaactcgtcatctagcattaggtatatttcccaatgctatccctcgcccctccctccaccccaccacagtccccagagtgtaatattccccttcctgtgtccatgtgatctcattgttcaattcccacctatgagtgagaatatgcggtgtttggttttttgttcttgcgatagtttactgagaatgatgttttccaatttcatccatgtccctacaaaggacatgaactcatacttttttatggctgcatagtattccatggtgtatatgtgccacattttcttaatccagtctatcattgttggacatttgggttggttccaagtctttgctattgtgaataatgccacaataaacatacatgtgcatgtgtctttatagcagcatgatttataatcctttgggtatatacccagtaaggggatggctgggtcaaatggtatttccagttctagatccctgaggaatcgccacactgacttccacaatggttgaactagtttacagtcccaccaacagtgtaaaagcgttcctatttctccacatcctctccagcacctgttgtttcctgactttttaatgattgccattctaactggtgtgagatggtatctcattgtggttttgatttgcatttctctgatggccagtgatgatgagcattttttcatgtgttttttgtctgcataaatgtcttcttttgagaagtgtctgttcatgtccttcgcccactttttgatggggttgtttgtttttttcttgtaaatttgtttgagttcattgtagattctggatattagccatttgtcagatgagtaggttgtgaaaattttctcccattttgtaggtttcctgttcactctgatggtagtttgttttgctgtgcagaagctctttagtttaattagatcccatttgtcaattttgtcttttgttgccattgcttttggtgttttagacatgaagtccttgcccatgcctatgtcctgaatggtaatgcctaggttttcttccagggtttttatggttttaggtctaacgtttaagtctttaatccatcttgacttgatttttgtataaggtgtaaggaagtgatccagtttcagctttctacatatggctagccagttttcccagcaccatttattaaatagggaatcctttccccattgnnnnnnnnnnnnnnnnnnnnnnnnnnnnnnnnnnnnnnnnnnnnnnnnnnnnnnnnnnnnnnnnnnnnnnnnnnnnnnnnnnnnnnnnnnnnnnnnnnnnnnnnnnnnnnnnnnnnnnnnnnnnnnnnnnnnnnnnnnnnnnnnnnnnnnnnnnnnnnnnnnnnnnnnnnnnnnnnnnnnnnnnnnnnnnnnnnnnnnnnnnnnnnnnnnnnnnnnnnnnnnnnnnnnnnnnnnnnnnnnnnnnnnnnnnnnnnnnnnnnnnnnnnnnnnnnnnnnnnnnnnnnnnnnnnnnnnnnnnnnnnnnnnnnnnnnnnnnnnnnnnnnnnnnnnnnnnnnnnnnnnnnnnnnnnnnnnnnnnnnnnnnnnnnnnnnnnnnnnnnnnnnnnnnnnnnnnnnnnnnnnnnnnnnnnnnnnnnnnnnnnnnnnnnnnnnnnnnnnctttatttccttctcctgcctaattgccctggccagaacttccaacactatgttgaataggagtggtgagagagggcatccctgtcttgtgccagttttcagagggaatgcttccagtttttgcccattcagtatgatattggctgtgggtttgtcatagatagctcttattattttgaaatacgtcccatcaatacctaatttattgagagtttttagtatgaagggttgttgaattttgtcaaaggctttttctgcatctattgagataatcatgtggtttttgtctttggctctgtttatatgctggattacatttattgatttgcgtatattgaaccagccttgcatcccagggatgaagcccacttgatcatggtggataagctttttgatgtgctgctgtattcgttttgccagtattttattgaggatttttgcatcaatgttcatcaaggatattggtctaaaattctttttttttgttgtgtctctgcctggctttgtatcagaatgatgctggcctcataaaatgagttagggaggattccctctttttctattgattggaatagtttcagaaggaatggtaccagttcctccttgtacctctggtagaattcggctgtgaatccatctggtcctggactctttttggttggtaagctattgattattgccacaatttcagctcctgttattggtctattcagagattcaacttcttcctggtttagtcttgggagagtgtatgtgtcgaggaatttatccatttcttctagattttctagtatatttgtgtagaggtgtttgtagtattctctgatggtagtttgtatttctgtgggatcggtggtgatatcccctttatcattttttattgcatctattagattcttctctctttttttctttattagtcttgctagcggtctatcaattttgttgatcctttcaaaaaaccagctcctggattcattaattttttgaagggttttttgtgtctctttttccttcagttctgctctgattttagttatttcttgccttctgctagcttttgaatgtgtttgctcttgcttttctagttcttttaattgtgatgttagggtgtcaattttggatctttcctgctttctcttgtgggcattcagtgctataaatttccctctacacactgctttgaatgcgtcccagagattctggtatgttgtgtctttgttctcgttggtttgaaagaacatctttatttctgccttcatttcgttatgtacccagtagtcattcaggagcaggttgttcagtttccatgtagttgagcggttttgagtgagattcttaatcctgagttctagtttgattgcactgtggtctgagagaagtttgttataatttctgttcttttacatttgctgaggagagctttacttcccagtatgtggtcaattttggaataggtgtggtgtggtgctgaaaaaaatgtatattctgttgatttggggtggagagttctgtagatgtctattaggttcgcttggtgcagagctgagttcaattcctgggtatccttgttgactttctgtctcgttgatctgtctaatgttgacagtggggtgttaaagtctcccattattaatgcgtgggagtctaagtctctttgtaggtcactcaggatttgctttatgaatcttggtgctcctgtattgggtgcatatatatttaggatagttagctcttcttgttgaattgatcccttgaccattatgtaatggccttctttgtctcttttgatctttgttggtttaaagtctgttttatcagagactcggattgcaacccctgcctttttttgttttccatttgcttggtagatcttcctccatccttttattttgagcctatgtgtgtctctgcacgtgagatgggtttcctgaatacagcacactgatgggtcttgactcttcatccaatttgccagtctgtgtcttttaattggagcatttagtccatttacatttaaagttaatattgttatgtgtgaatttgatcctgtcattatgatgttagctggttattttgctcgttagttgatgcagtttcttcctagtcttgatggtctttacaatttggcatgattttgcagtggctggttccggttgttcctttccatgtttagcgcttcctttaggagctcttgtagggcaggcctggtggtgacaaaatctctcagcatttgcttgtctgtaaaggattttatttctccttcgcttatgaagcttagtttggctggatatgaaattctgggttgaaaatttttgtctttaagaatgttgaatattggcccccactctcttctggcttgtagagtttctgccgagagatccgctgttagtctgatgggcttccctttgagggtaacccgacctttctctctggctgcccttaacattttttccttcatttcaactttggtgaatctgacaattatgtgtcttggagttggtcttctcgaggagtatctttgtggcgttctctgtatttcctgaatctgaacgttggcctgccttgctagattggggaagttctcctggataatatcctgcagagtgttttccaacttggttccattctccccatcactttcaggtacaccattcagacgtagatttggtcttttcacatagtcccatatttgttggaggctttgctcatttctttttattcttttttctctaaacttctcttctcgcttcatttcattcatttcatcttccatcgctgataccctttcttacagttgattgcatcggctcctgaggcttctgcattcttcacgtagttctcgagccttggttttcagctccatcagctcctttaagcacttctctgtattggttattctagttatacattcttctaaatttttttcaaagttttcaacttctttgcctttggtttgaatgtcctcccgtagctcagagtaatttgatcgtctgaagccttctctcagctcgtcaatgtcattctccatccagctttgttctgttgctggtgaggaactgtgttcctttggaggaggagaggcgctttgctttttagtttccaatttttctgttctgttttttccccatctttgtggttttatctgcttttggtctttgatgatggtgatgtacagatgggtttttggtgtggatgtcctttctgtttgttagttttccttctaacagacaggaccctcagctgcaggtctgttggaataccctgccttgtgaggtgtcagtgtgctcctgctggggggtgcctcccagttaggctgctcaggggtaaggggtcagggacccacttgaggaggcagtctgcccgttctcagatctccagctgcgtgctgggagaaccactgctctcttccaagctgtcagacagggacatttaagtctgcagaggttactgctgtctttttgtttgtctgtgccctgcccccagaggtggagcctacagaggcaggcaggccttcttgagctgtggtgggctccgcccagttggagcttccccactgctttgtttacctaatcaagcctgggcaatggcgggcgcccctcccccagccttgctgccgccttgcagtttgatctcagactgctgtgctggcaatcagcgagattctgtgggcgtaggaccctccaagccaggtgcgggatataatctcgtggtgcaccgttttttaatcccgtcggaaaagcgcagtatttgggtgggagtgacccgattttccaggtgccgtccgtcacccctttctttgactcggaaagggaactccccgaccctttgagcttcccaagtgagacaatgcctcgccctgctttggctcgcgcatggtgcgcgcacccactgacctgcacccactgtctggcactccctagtgagaggaacctggtacctcagatggaaatgcagaaatcactgtcttctgcgtcgctcacactgggagctgtagaccggagctgttcctattcggccatcttggctcctcccttatacatttctacacacctagtagataaatccttgacatattttttcaattgtatatttactttaattttgcttctgctattttgagtgaactttttggaaatcaaaatatattattgcaagtctttaaatgataacagtgtcaaaatatattatcgcaagtgcttgaaagacaaaagtgtttaaatgatatctgtggtttgttttaggttcaggaagatttgactgaagagaaaaaaagggaactggagcataatgctgaagagacctatggtgaaaatgatgaaaatgtatgaccgggatacatatttctattgagcacttgagtgtttgtgggtgtgcatgtgtataggagagatatatgtatttgggatacgtaccagtgggtaatggtacctctgagttaccactgaatttaacaggcccacctgaaattaggaaaagttgtgacaacatgaaaagtaggagagacagcagcactgttgcttacatatcatttttcttccttttttttcctccaaaaatgagtaatttttcatcctgtttttagagagaattatttatcactaactctatactatctcttagtttttcttttttcttttaattttaagactgatgataaaaataatgatggagaagagcaagaagttcgagatgacaaccgccccaaaggccgagaggaacactacgaggaggaagaagaggaggaagaagacggggctgcagttgctgagaaatcacatcgaagagctgaaatgtagcggcacccaatttctagacaacgctcagccaacggattcttttcaagctgctcaaacataaatctgcctactgaactctaggatatttaattacaaaaattaagaacttagacttttttaaaacttttgtattagaaatgcgcatacatttatatgaatatattttgataacgtaggtctagagcttcttttatattcaagctaaacatgaaaaagaagaaaaacaataaagtaaacctgagcccccacgtcccaatttttttaatagattatgtgatgttggaaagctcattgattttgtatatgtttcagcgtgttacctttctggcttccagttcccaggtgttctttgtttgcctttgataaaatacaggatttaagaacagagagtactgcaaaatgccatgcagactttaaagagaatggcctgtttactaattgctgcccttctgatgtctttatgtatagctctgatagaattttcaccagtctatgtatctctggagtgagatctatgtacaaagtgacatacaattggaaatccatttttgttgtaaagacattgtttttcagacttttcagatcaattagaaaaatgtcattgctttaaaatcatagctgttctgtttaagaggaattgaatttaaaaatgagagagtattaaaactcatgtggcagtatcctggtcttaatcaggtattgcagtgttcaaacaaggtatggacacatcaacatattcaccttttggaaggactagtgacttggttaaaaactaatgagtgtttgcgtgtggtgtttctatgcgagcacccattctcaatttttttttttttttttttttgtctgaagccattgattgatattcttgtttcagtgtctggttccctataagtaatatatatttcctctttaagctctgtgcctcaatatgcaatcactttgataataagtataaatatgaagacataccaaactgcaaataggattatttttcaaaactatatggtgaaacatatggtgatatgatagacttatggtttttctgtttgctgggattgggtctgctttttgcctatgtgtaaggcattttaatcattgtgaatataatagattccttaaaataagaaaattaaaaatcagaaacttcccttggagtagagacatttcagttgcaagcataaagatttttaaatatataacactaggttatataattcatatatgtgtggttttgtattaataatcaaattaataaaaacatttcattttctaccattgtatgaacgtaattttattttttaataaccacactcatagatggttttgattgttccagttgagtgattgtgtatgtacgcataggaatgttttgttcagttgtactttgtatttccaataatcagaaatcttacctttatgtataaaaacccattatgtaatgtaaaatgtataatattgtacataatattcagaatacaattattttggtaaattagcttgtatttttaatgtcccagttgcagtatttaattatttgaaccatactgaaagttggtaatagtcaataaagctaaaaaaaaaaagtggcaaatcttttaaactatgtggtctcttattagtttatgaccttctaacattcttcacttctttttcataaaaagaaaaattttaagagataccaatataaattaatgaattataaagtgccttttcccacctgcttctgttttctgtatctttctctacttggattggcatgtgattttcccttctttttctaaagaaagagctaaagatgtttattttatttgagctagctctgagggaagaaaaaagaaatggggcagaatgtatgagagtgtcatgtgcatgcacacacaaaaaataaatgaaaaactttaaatccccttaggaaagcaacaatcacaaaccattctactctctgtatagcaccaagttacagnnnnnnnnnnnnnnnnnnnnnnnnnnnnnnnnnnnnnnnnnnnnnnnnnnnnnnnnnnnnnnnnnnnnnnnnnnnnnnnnnnnnnnnnnnnnnnnnnnnnnnnnnnnnnnnnnnnnnnnnnnnnnnnnnnnnnnnnnnnnnnnnnnnnnnnnnnnnnnnnnnnnnnnnnnnnnnnnnnnnnnnnnnnnnnnnnnnnnnnnnnnnnnnnnnnnnnnnnnnnnnnnnnnnnnnnnnnnnnnnnnnnnnnnnnnnnnnnnnnnnnnnnnnnnnnnnnnnnnnnnnnnnnnnnnnnnnnnnnnnnnnnnnnnnnnnnnnnnnnnnnnnnnnnnnnnnnnnnnnnnnnnnnnnnnnnnnnnnnnnnnnnnnnnnnnnnnnnnnnnnnnnnnnnnnnnnnnnnnnnnnnnnnnnnnnnnnnnnnnnnnnnnnnnnnnnnnnnnnnnnnnnnnnnnnnnnnnnnnnnnnnnnnnnnnnnnnnnnnnnnnnnnnnnnnnnnnnnnnnnnnnnnnnnnnnnnnnnnnnnnnnnnnnnnnnnnnnnnnnnnnnnnnnnnnnnnnnnnnnnnnnnnnnnnnnnnnnnnnnnnnnnnnnnnnnnnnnnnnnnnnnnnnnnnnnnnnnnnnnnnnnnnnnnnnnnnnnnnnnnnnnnnnnnnnnnnnnnnnnnnnnnnnnnnnnnnnnnnnnnnnnnnnnnnnnnnnnnnnnnnnnnnnnnnnnnnnnnnnnnnnnnnnnnnnnnnnnnnnnnnnnnnnnnnnnnnnnnnnnnnnnnnnnnnnnnnnnnnnnnnnnnnnnnnnnnnnnnnnnnnnnnnnnnnnnnnnnnnnnnnnnnnnnnnnnnnnnnnnnnnnnnnnnnnnnnnnnnnnnnnnnnnnnnnnnnnnnnnnnnnnnnnnnnnnnnnnnnnnnnnnnnnnnnnnnnnnnnnnnnnnnnnnnnnnnnnnnnnnnnnnnnnnnnnnnnnnnnnnnnnnnnnnnnnnnnnnnnnnnnnnnnnnnnnnnnnnnnnnnnnnnnnnnnnnnnnnnnnnnnnnnnnnnnnnnnnnnnnnnnnnnnnnnnnnnnnnnnnnnnnnnnnnnnnnnnnnnnnnnnnnnnnnnnnnnnnnnnnnnnnnnnnnnnnnnnnnnnnnnnnnnnnnnnnnnnnnnnnnnnnnnnnnnnnnnnnnnnnnnnnnnnnnnnnnnnnnnnnnnnnnnnnnnnnnnnnnnnnnnnnnnnnnnnnnnnnnnnnnnnnnnnnnnnnnnnnnnnnnnnnnnnnnnnnnnnnnnnnnnnnnnnnnnnnnnnnnnnnnnnnnnnnnnnnnnnnnnnnnnnnnnnnnnnnnnnnnnnnnnnnnnnnnnnnnnnnnnnnnnnnnnnnnnnnnnnnnnnnnnnnnnnnnnnnnnnnnnnnnnnnnnnnnnnnnnnnnnnnnnnnnnnnnnnnnnnnnnnnnnnnnnnnnnnnnnnnnnnnnnnnnnnnnnnnnnnnnnnnnnnnnnnnnnnnnnnnnnnnnnnnnnnnnnnnnnnnnnnnnnnnnnnnnnnnnnnnnnnnnnnnnnnnnnnnnnnnnnnnnnnnnnnnnnnnnnnnnnnnnnnnnnnnnnnnnnnnnnnnnnnnnnnnnnnnnnnnnnnnnnnnnnnnnnnnnnnnnnnnnnnnnnnnnnnnnnnnnnnnnnnnnnnnnnnnnnnnnnnnnnnnnnnnnnnnnnnnnnnnnnnnnnnnnnnnnnnnnnnnnnnnnnnnnnnnnnnnnnnnnnnnnnnnnnnnnnnnnnnnnnnnnnnnnnnnnnnnnnnnnnnnnnnnnnnnnnnnnnnnnnnnnnnnnnnnnnnnnnnnnnnnnnnnnnnnnnnnnnnnnnnnnnnnnnnnnnnnnnnnnnnnnnnnnnnnnnnnnnnnnnnnnnnnnnnnnnnnnnnnnnnnnnnnnnnnnnnnnnnnnnnnnnnnnnnnnnnnnnnnnnnnnnnnnnnnnnnnnnnnnnnnnnnnnnnnnnnnnnnnnnnnnnnnnnnnnnnnnnnnnnnnnnnnnnnnnnnnnnnnnnnnnnnnnnnnnnnnnnnnnnnnnnnnnnnnnnnnnnnnnnnnnnnnnnnnnnnnnnnnnnnnnnnnnnnnnnnnnnnnnnnnnnnnnnnnnnnnnnnnnnnnnnnnnnnnnnnnnnnnnnnnnnnnnnnnnnnnnnnnnnnnnnnnnnnnnnnnnnnnnnnnnnnnnnnnnnnnnnnnnnnnnnnnnnnnnnnnnnnnnnnnnnnnnnnnnnnnnnnnnnnnnnnnnnnnnnnnnnnnnnnnnnnnnnnnnnnnnnnnnnnnnnnnnnnnnnnnnnnnnnnnnnnnnnnnnnnnnnnnnnnnnnnnnnnnnnnnnnnnnnnnnnnnnnnnnnnnnnnnnnnnnnnnnnnnnnnnnnnnnnnnnnnnnnnnnnnnnnnnnnnnnnnnnnnnnnnnnnnnnnnnnnnnnnnnnnnnnnnnnnnnnnnnnnnnnnnnnnnnnnnnnnnnnnnnnnnnnnnnnnnnnnnnnnnnnnnnnnnnnnnnnnnnnnnnnnnnnnnnnnnnnnnnnnnnnnnnnnnnnnnnnnnnnnnnnnnnnnnnnnnnnnnnnnnnnnnnnnnnnnnnnnnnnnnnnnnnnnnnnnnnnnnnnnnnnnnnnnnnnnnnnnnnnnnnnnnnnnnnnnnnnnnnnnnnnnnnnnnnnnnnnnnnnnnnnnnnnnnnnnnnnnnnnnnnnnnnnnnnnnnnnnnnnnnnnnnnnnnnnnnnnnnnnnnnnnnnnnnnnnnnnnnnnnnnnnnnnnnnnnnnnnnnnnnnnnnnnnnnnnnnnnnnnnnnnnnnnnnnnnnnnnnnnnnnnnnnnnnnnnnnnnnnnnnnnnnnnnnnnnnnnnnnnnnnnnnnnnnnnnnnnnnnnnnnnnnnnnnnnnnnnnnnnnnnnnnnnnnnnnnnnnnnnnnnnnnnnnnnnnnnnnnnnnnnnnnnnnnnnnnnnnnnnnnnnnnnnnnnnnnnnnnnnnnnnnnnnnnnnnnnnnnnnnnnnnnnnnnnnnnnnnnnnnnnnnnnnnnnnnnnnnnnnnnnnnnnnnnnnnnnnnnnnnnnnnnnnnnnnnnnnnnnnnnnnnnnnnnnnnnnnnnnnnnnnnnnnnnnnnnnnnnnnnnnnnnnnnnnnnnnnnnnnnnnnnnnnnnnnnnnnnnnnnnnnnnnnnnnnnnnnnnnnnnnnnnnnnnnnnnnnnnnnnnnnnnnnnnnnnnnnnnnnnnnnnnnnnnnnnnnnnnnnnnnnnnnnnnnnnnnnnnnnnnnnnnnnnnnnnnnnnnnnnnnnnnnnnnnnnnnnnnnnnnnnnnnnnnnnnnnnnnnnnnnnnnnnnnnnnnnnnnnnnnnnnnnnnnnnnnnnnnnnnnnnnnnnnnnnnnnnnnnnnnnnnnnnnnnnnnnnnnnnnnnnnnnnnnnnnnnnnnnnnnnnnnnnnnnnnnnnnnnnnnnnnnnnnnnnnnnnnnnnnnnnnnnnnnnnnnnnnnnnnnnnnnnnnnnnnnnnnnnnnnnnnnnnnnnnnnnnnnnnnnnnnnnnnnnnnnnnnnnnnnnnnnnnnnnnnnnnnnnnnnnnnnnnnnnnnnnnnnnnnnnnnnnnnnnnnnnnnnnnnnnnnnnnnnnnnnnnnnnnnnnnnnnnnnnnnnnngcctgcctaagctgaggaatagatgctatatctgtaacacgttccttgggtcttgtgactgtgataggagggccagttgttattggaataggatatgtgctcatccactggttggccttttgtctccacactatcacttctgcccctcgtttgtagcaggtcctgtaaccacaggagtaggccaaaacctgatcttctagaccccatcttctagaccccatcttctagaccatagtgattgatggaggaaagcaagcatgtcccaaaatagcccttcaatttctcagtctgagatttctgcactgaggctgaataagagaaatgctgtctagatgctttggagatggcgtgaaacacatacaccaggagattgcaggagtcatagtcctcatcatgtggagaaaaccaagttgcagcagacaagaatgatgccaatacataaaaaggagtaggaatggagggaaggaggagacaggagaaggcaggaaaaggagagagtcagagaaaggcacaaagaaagtaaatggtgttcaaattcccatgttctgccttcctatgattttatttgccagaaaatctccctcccctttatatcttaactagtttgaggatcttaaactgaccaaactaaagaaaactggcttacttcagcattatacattttatgaagcagaacaatattagcgtgacaaaggaaatattttgattaacttttagtcctttggcctcaaatgtagtaagttttaataaataatgacatggtttttaaaaaaaaaatcttttttcttcttggatctgtctttgaggcccagaggatctgtgataaaagcttaaggattatcgttaatgaagttatgagtactcttgtatccccattgtttcgtctacatcaaaaattggcaaacaacttctgtaaaaggcagacagtgaatctcttagtcttttcaggccgtggagccttttttgaaattactcggttctgcctttgtactgtgaaagcagtcagaaacaataggtaaaggaatgagcatggctgtgtgccaataaaactttatttacataaacagaaagcaggtcaggtttggtcctcagactgtaaacacctggtctacatggtccaaatatttgtcgtaaaaacagttatttctacacacaatagaagattttgagatcatcagctattaaggctttctggttctttgttataatcccttctattttaaattggcaagcactcaacattatctttgttgctacatttgtacactattttaaataattggaaatgaaatccttttgtcctttaccatcttggctgaccttgttctccccattccctgtatgttactaatggagcttgaaattcagtgtcatttctgtttatctgttattaacgcatacatagcatgtctcataaagtacatatcttttaaagaactagttcattggaacatgggcttgtacgagatgagatgatatcttttgatctggtgtgtcctttcttctttcaaaatttaaagtatggataccaattacaatagctgtgtattaatacattaaattcaaatttgtggtcttagctctgagtgttttgggttctgtgggtatctaattcctgttaagtttatataccctagtataattagactctatttcataaagagagtcaaaatacattttatattctgtaaaacctggtcaattatcttctgtaatggttttaaaattggttcacaaaatctttgatagtcttcccttcaagagatagagcctagttccctttcccttgagcataggctagacttagtttctggcttcaaacaaataaaactgaaggaaagtgaccatgtatgactcagagattcagtcataaaagccagtttagtttcctccatgttatctctcttggatcactgactctgaaggaagccagctaccatgttataaggctattcaaacagccttgtaatgtgaccttcattcatgtggcaaggaattgaggcctttggccaacagcctgtgaggagctgaggcttcctgccaacagccacgagtgagcatggagcagatcctccagccccagtcaagccttcagatgactgcaacatgactgcaacccttttagaaaccctgagccagaaccacctagatgagttatcctagacttctggcccacacaaactatgtgaaaataaatgtttattcttttaggtttgggagtaattggttacacaacaatagataactgatatatcttctaggcagagtttatgactcaaaagggagaggtcaggggtaaagatgatctgcagctgcatggtgttactgggcagccagccagctgctctgctggaagacaggtttagatgtgttggtgaaggaagatggaattcagcttaatgagctgaataaatttaagccaatttatatgttcaaaattattagataatattttggcagatattagtaacctttcaaccttggctacaaacctggagagttttaaaataatgatgcctggatcccattcccagagactctgaattaattgctctgcgttgcagtctgagcatcaggatttttaaatttccctaggtgattttaatgtgcagccaagattgagaactactgctttgtaagttaggagttggaaagagtaagcttcccacctcaacatttctctaccagatggcaaattacaatgaaagcaagtctcagaccaaatctgcaaagcaaatatttacaggcaagtcgaaacagacatctaaacttttcttaaggcccaatgaaattatagttcccaatcttttcaggctttctagacaggcatgaggcatgaaggatttgctcaggacaaatcctataatattttaggagcagaattctgttaaacctgtagttacatcctgtgcccaagccttcccttaagaggcatatgttcttctgcaatgggtgttggagttatcagatcctcatacctctttgtgagagggtagaggtgcctgtaccataattcctacaactcattcacatattttgaacactatttccccaatgaaaagaagtctttaatatccataatgctggccaacgaaacacttaatgctgaattgagataaagatagtggaagcatttatggtagcagccttcagaatgtggacttcgatgagagcaccagtttctcaaccctggctgtgtattacatttttaaaaaagacctccagacctcaccccagtctaattaaatcagaagctctgagagcagagcttgacattaatattttttaaaagcttctcaacaaattatgattgataggggtaatagttatgagaagattgggactctgaagggatagaacacacaggagaattttttggggtagtaaaatggtgtttgggttgtgggggtagttatacaaatctatacatgtattgaaattcattgaactgtacaacaaaagaaataaaatatactatacaacaaaagaatactgtacaacaaaataaaatattaaactgtacaacaaataaaatattgattttattgtatgataatttaaaaataaaatagtataactgctaaaatatttttgaaagccctctgatgatcttaatgtagagccaggattgagtcactgtactagattaagagctggtcaaccattgctgggatgtgtattcataattaggcaccaccaatattaacctcctaagttgactatcctctaaccactaaccacacacatgcccatacccttgtttgtagacacgccacattgtctatggtgaagtagttttttaataattacaaatatataaaagtgagatacagctgtctttcacagattagattcacactgaggaattttagagtatggcaatgggaaattgcatgagtcagtagttttattcatctctgctcttagagaaaaaactactagtgtagttgctctccctcaaaacagtgtttctcaaacctattaactctggcttttatagaataatgcagaatcccaataggagagctgtttggcagtttaattagttttatttctaagtgagaccacaggaagaaataaatgtatcatgaaacagtgtgtatgaatatatgtgtatatattgtataaataaaataaaagtttcaagaaacataggcaggcctttcctattttattgtgcttcagtggagtgctgatcatgatatcatgatgaatatatatcatcaggggatggtgagccaattacagttgactggacaatagaaccaggttctactctggaataatagacccaggcatttatgcttctccctgctgtgacataaggagacagataggaatttgacccatggctataccattcaaatgctttcgaagctttattctgcatccctactttggagtgggtgttaacagcacctgggagtttctgctatcctccctttttatagcatcttggcttccatttcctcagagctgtaagaaggcatatgggcacagtcaaggttaatagaatggagactctgattcccatccttctcctctgctttttccttttttagccccacacctggaaatattcctggtttttgaggacagaacagctgaattaataaatgcctgtttgtatgcacatagaacagaggaatatatgcactttaatccttttggtatttccctgtggcctgtgctcagctcttgaattgatgtgtgctacctatggatagataagcttggctttgcttccttcctcctcactctaccattcattctccttgcactatcaggctggtgacatcaagatgctgtgagccacagttcagtgtggaggatcaactagccaccagcaaacatcgcatagtttcatgacattatgtatttttaaaatatttgatgtcataaggataataagacaaagtctacattatgccagggattgacttctgggaggaatcttaatgctaattcaggtttcttgatatcttagaaaagcagacattctatggcttgatagtactactgattttatatgatatctacgatagagagaattttctcatttagcatagactgttcaatagccattaaagaatgtcataggcattactaatggaaactgaatagtatagtatgaatttgatgtgtagctgagactctgatatgaacgtatgatcagttttaatgaagaagtaactgagctgagtatcatccatatacagaaccgatg

SEQ ID NO: 327 - DNA, 2977 bp, Homo sapiens
gcccgggcggcgtcgatggctgcgcgccccgcgccgcgcgggggctgagcgggcgccacttcccctccgggccggcttttgtgtctggcatctcctcctcatgctgcgtctggccacctactgcggcggccgctgctgagacgctcgctcggaccaaggggaggagacggcgggggcggccgcggctttgggtccaggcgggactatgggaaacgggatgtgctcccgaaagcagaagcggattttccagacgctgctgctgctgaccgtcgtgttcggctttctctacggcgcgatgctctactacgagctgcagacgcagctgcggaaagccgaggcggtggcgctcaagtaccagcagcaccaggagtccctctccgcccagttacaagttgtatatgaacacagatcaagattagagaaatccttgcaaaaagaaagacttgaacataaaaaagcaaaggaagattttcttgtttataagttagaagcacaagaaacattaaataaaggaaggcaagattccaatagcagatacagtgcactgaatgtccaacatcagatgttgaaaagccaacacgaggagctaaagaaacagcacagtgacttggaagaggaacatcgcaaacaaggggaagacttcagtagaacatttaatgaccataagcaaaaatacttgcagctccagcaagaaaaagaacaagaactttctaagctaaaagagactgtatacaatttgagagaagagaatagacaactaaggaaagcacaccaagacatacatacacagcttcaagatgtcaagcaacagcataagaatttactctccgagcatgaacaacttgtagtgactttggaagaccacaagagtgcactagctgctgcacagactcaagttgcagaatataaacaactgaaagatactctgaataggattccaagccttcgaaaacctgatccagcagaacagcaaaatgtgacccaggtggcacattctccacaaggttacaacacagcaagggagaagccaacccgagaggtgcaggaggtgtctcgaaataatgatgtgtggcagaaccatgaagcagttcctggaagagcagaagacacaaaactctatgctcccacccataaggaggcagaatttcaggctcccccagagccaatccaacaagaagtggaacgcagagaacctgaggagcatcaggtggaagaggagcacagaaaggccctggaggaggaagaaatggagcaggtcgggcaagcagaacatcttgaggaggaacacgatccatcaccagaggagcaggatcgggagtggaaagagcagcatgagcaacgagaagcagccaacctcctggaagggcacgcgcgtgctgaggtgtacccttcagccaagccaatgatcaaattccaatcaccctatgaggaacagttggaacagcagagactggcagtgcagcaggtggaggaggcccagcagctgcgggaacaccaggaagctttgcaccagcagaggctgcaggggcacttactacggcagcaggaacagcagcagcagcaggtggcaagagagatggccctgcagaggcaggctgagcttgaggagggccggccgcagcaccaggagcagctccggcagcaagctcattatgatgctatggataatgatatcgttcagggagcagaggaccagggaatccaaggagaggaaggagcctatgaaagagacaaccagcaccaagatgaagcagaaggagatccaggtaatagacatgagcctcgtgaacaaggaccccgagaagccgacccagaatctgaggcagatcaaaaacaaagtaatcaaaagcaagagaatacagaagtggaggaacatttggtgatggcaggaaatccagaccagcaggaggacaatgttgatgaacagtaccaggaagaggcagaagaggaggtagttcaggaagatttgactgaagagaaaaaaagggaactggagcataatgctgaagagacctatggtgaaaatgatgaaaatactgatgataaaaataatgatggagaagagcaagaagttcgagatgacaaccgccccaaaggccgagaggaacactacgaggaggaagaagaggaggaagaagacggggctgcagttgctgagaaatcacatcgaagagctgaaatgtagcggcacccaatttctagacaacgctcagccaacggattcttttcaagctgctcaaacataaatctgcctactgaactctaggatatttaattacaaaaattaagaacttagacttttttaaaacttttgtattagaaatgcgcatacatttatatgaatatattttgataacgtaggtctagagcttcttttatattcaagctaaacatgaaaaagaagaaaaacaataaagtaaacctgagcccccacgtcccaatttttttaatagattatgtgatgttggaaagctcattgattttgtatatgtttcagcgtgttacctttctggcttccagttcccaggtgttctttgtttgcctttgataaaatacaggatttaagaacagagagtactgcaaaatgccatgcagactttaaagagaatggcctgtttactaattgctgcccttctgatgtctttatgtatagctctgatagaattttcaccagtctatgtatctctggagtgagatctatgtacaaagtgacatacaattggaaatccatttttgttgtaaagacattgtttttcagacttttcagatcaattagaaaaatgtcattgctttaaaatcatagctgttctgtttaagaggaattgaatttaaaaatgagagagtattaaaactcatgtggcagtatcctggtcttaatcaggtattgcagtgttcaaacaaggtatggacacatcaacatattcaccttttggaaggactagtgacttggttaaaaactaatgagtgtttgcgtgtg

SEQ ID NO: 328 - protein, 655 aa, Homo sapiens
MGNGMCSRKQKRIFQTLLLLTVVFGFLYGAMLYYELQTQLRKAEAVKYQQHQESLSAQLQVVYEHRSRLEKSLQKERLEHKKAKEDFLVYKLEAQETLNKGRQDSNSRYSALNVQHQMLKSQHEELKKQHSDLEEEHRKQGEDFSRTFNDHKQKYLQLQQEKEQELSKLKETVYNLREENRQLRKAHQDIHTQLQDVKQQHKNLLSEHEQLVVTLEDHKSAAAQTQVAEYKQLKDTLNRIPSLRKPDPAEQQNVTQVAHSPQGYNTAREKPTREVQEVSRNNDVWQNHEAVPGRAEDTKLYAPTHKEAEFQAPPEPIQQEVERREPEEHQVEEEHRKALEEEEMEQVGQAEHLEEEHDPSPEEQDREWKEQHEQREAANLLEGHARAEVYPSAKPMIKFQSPYEEQLEQQRLAVQQVEEAQQLREHQEALHQQRLQGHLLRQQEQQQQQVAREMALQRQAELEEGRPQHQEQLRQQAHYDAMDNDIVQGAEDQGIQGEEGAYERDNQHQDEAEGDPGNRHEPREQGPREADPESEADQKQSNQKQENTEVEEHLVMAGNPDQQEDNVDEQYQEEAEEEVVQEDLTEEKKRELEHNAEETYGENDENTDDKNNDGEEQEVRDDNRPKGREEHYEEEEEEEEDGAAVAEKSHRRAEM

SEQ ID NO: 329 - DNA, 59458 bp, Mus musculus
  misc_feature (1)...(59458): n = A,T,C or G
gactgcacaagtcgatcatgaaaccctgagagtggctttccagatccaaacaggtctgtgactggcagcaatgtcacaaaccaacactggagagtatggtcacttaaacaaacaacactaccaacagacttaaaacccaaactaataaagagggcttacagtaaaaagtctgggttctcagcaaactcctccacacacttttggcttttgtggctgcctctaggcagtaaataacatgcctagcctgctgtttcttgatttattgactttggactggagctatcaacttctacaagtactggagagagccaccttacttccccttcctgttgtcgccttgctttgttaagtagacgctcttgcgcagactcctgcatggaccttggcttgggcatttgcaactttgtttccaagatgagttcaaagtcaaggattctggcccttgacaggatcgtgtggaaggagaacctggcctacctggtccctagcccatgctgtttcctctgagtaactcagcctgcagtggctctacagagctgtgtgagcaccctggctaagtacctaagagaggctggcagaggctgttacttagagatgagggcaggagtgtttgagggggcaagtgaagccagtaagcactttattctcctccattggtcttttctgcacatctggctttccagatcacaagccctggatctccagagaaagatgagccagtagctgaagccagtggaaggctcgcacccagcacccaaggttttggggggaaaagaactgcctttctattgccaagtcttgagtcacctggtagaaacttcaaatgacagaattggcactgggcaccaattcaaacctgtttagtcagaggccaggcaagatgccaaactgccagacaggacagtgattggcaggggccagtgattggcaggggccacacaacagctgagggcacaggagtccttagagcctctttatcttagggaagaacatgggtcctgtttgtggctttgcatatagagaggccctgtactcattacgttacagactttactgtgcctgggcgtcccagcctgtaaaatggttagataggcaagcagggggtaggcatttgaggactctggttttgaaattccgaactgaggctggctcaggggtaataatacacgagagatcctgtcttctatctccagcaccatgaacaataaataaataaatacatgtaaaaagaaacaaataataccagctgaggaagattcttgcagctgtgctaggtggactgttactatggctacggtaatgcccacaaggtgattgttagacagggaatggtccagactgtttagggtgagtatggccaggtagggtaccagatatgcatccttcttttgctctctactccaagatatgccttcatctgagctcatggccaacagcatgtgttcatactcagaatagtaagttggggaagatggaaatgcatggctcttgtttttaaaactctttagaatattatgtatgtatgtatgtatgtatgtatgtatgtatgtatgtatgtattgtgtatgtgtgtttggccacacataccatgtgcgcgtggaggtcagaggtcaacttatggagacagctctctccttccaccatgggggtcccagggatcaaacctaggctgtcagtggtagcaactacatttaacctgatccctctcactgcctgggcctctgatgctcaggaatggggagcccagcagtgcaggctcaggttccaggggccacctattgtccagtgctcagtcacctggccacccttaactgcaaggtgacccagccaaggaagtctggacccagctgtaaaacaggggttctgctcctcacagtggtggtggcattgggaagcagccagccttgacactgactcgagaaggtcccagttggagccggggctgggttctgactttagatggactccattccacctccaatggctttccatccttcaaccactgccaaatttttaatagttggatttctcacataaaattcacatttctaatttctctggcaaaaactgaggaccagggctggagagatggctcagtggttaagagcactgactgctcttctgaaggtactgagttaaagtcccagcaaccacatggtggctcacaaccatctataatgagatctgatgccctcttctggtgggtctgaagacaagctacattgtacttacatataataataaattaatctttgggccggagtgagtaaaggcccagagttcaattcccagcaaccacatgatggctcgaaccatctgcacagttacagtgtactcaaatacataaaataaatctttaaaacaagcaagcaagtaaacaaacaaacacccctgagcaccagactacatggtcccgtatttactgcagcgaacatcctctgagctgggcactgctgttgagcactgggctctcttgttcatgctctctccctcctcctgctggttccacctccctgctctgggccagttttgtcgcctggcttatgagtatcatggtttgtaattcttgtcccagtacagctaccagcatgcaagagacaaagaaattgaggccagagaaacaagggaccaacccccaggaagatctcagcatacctcctgcctcacaggacaccccaggcccagccaggtgcttctgtgcctgggaggaagaatgtcctcttgtggagaaacaggtaggcttgggtctggtctccaacctgaattctgtcctcttctaaatacagcaggtgacaatagttctccaagactcatattcagactttatctttggcagggcatccacagagtctgcttccttggagctcaagggacagtgaatatctactgtgtctcttaactggaccagatgtgatatgaactcaggagatgtgagaaagcaaaggtttgcctcccaacttgatgtggaaagtctgtggctaccgggtctgtgtaagctgcagtttctttcttctgtggttgtggccagaaccatggtactaaagctatggtgagaacagccccggacagggtgtagaggtgagactgagccctgaaaacacaatgtcttcttggctataggagcagagctgcaggccttagcgttctccagcccctggggctgccttctggggatttagttatggcccgggttggtataaccttgggaagacccagctttccctttgagtcagctattttaaggaatgacatgtttcagaactgggctcagccttcgatgcatccccacatctggttttggtctccggataacctgtgtgtgtacctagatactcatgagttttgttttgaacaaacaacctttgcacagccacaatggaaatagttctaacgtggtttttaaacagcacccacagtcccagcccatggttctgcatccttgcagcattgcctgagagcttgtgacaactggggcactgcatggtgggaaacacaggcttagacaggaaagttgaggccccagtggtaggtcacctccttaaggtcacttgaacccagtttgagagtctgccccttactgctcctcagaatggcactccttaccccacactgctactgtgctcaggccttggcttaaatactctaattcttgctatatagatgcttgccatgtagatggtccctaggtaccagctctaccttggaggagaaatactcttgagacaagcaagggcacagcctttgtggtctctgtttctactaaagtgaccactgtagtaagcatgctgtcgtttgcctagaaccaagcagtttcttagagtgcagcactttttaggcaaaaacaatcgtggacagaatgaggtagttggttccctccaggtgaaagctggggccagttgttcctggcacggggcatgtagactctttctagctccttgcttgtgagcctgacagccctgtcacggtcacttgtcaccagagtgtcccttcctgtgtcttccccgagatgaggagaccaggcctctggagttccacagaggaaacatacaagactcaaacccaaagtgtgacccatctcttatctgagcccacaggagacccagagctcacaaagctacttagtaaatgtttagaccacctgcagcttggctgttactgactgtgaatggacaggactgggnnnnnnnnnnnnnnnnnnnnnnnnnnnnnnnnnnnnnnnnnnnnnnnnnnnnnnnnnnnnnnnnnnnnnnnnnnnnnntcagatacctcaaattaaagttcagcatgtgcatgtggtcccaactacgtggtaggatgaggcaggaggattgcttaaggccagaagtttagaaccagtctacagacagcaagtcctgatcacaagaaaatagaaagaaagctgaagggcgagggagaggagatgaggaggaggagggagaggagggagaggaagagggaaagggggcaggaaaagggaaggagggagaggagggggaacgaagaggaggggagaagggagaagagaaagaaggaaaagggaaagaggggaagaaggaaatggaaggaaggagaggaggagagagaagaagaagagagaagagggaaggggaggaggggaggaattcggttacataaacaaaattataaagtagtaaaactcagagtgaagaacttttttctttgcattctgagacaggctctcactctgctggcttggaatttacagagatcctcctgcctctgcctccagagtgctgggattaaaagtatgtgtgtgtgtcaccatgccccacaatggagcactttctagttattacatttaactctaatctgtcaccattgctcagctcctgtctccttttgcctcctttgtcatgggaatcaaggttctgggacccaagcactggatggtttgacaggtgtgagggcagggtctttcctgagttcgtcctgttagctggaggctcctagggacaagccttataaaacagggaaagtgggcccagacaggcatgcagggaatagaagcagaggcccagcaatgctacctggtccagaaatgtcaaagatggccttcatccaccagaagatgggaagaaatgttcttggaaccttcagaaggaaccagccctgctgactccttctggactccagaaccaacaagacatttgtgttctttaagcccctcggtctttagtacttcgttatagaacccaggcagacccctataccttgaggttggtgacatttactacatgaagatcgtggcaatgctgagccttgggctggagagatggctcagtggttaagaccactgactgctcttccagaggtcctgagttcaattcccagcaaccacatgatggctcacaaccatctataatgggattccagtgcccttttctggtgtgtctgaagacagcaacagtgtactcatacagaaaatagataaatacatcttttaaaaagaacacagcagggcgtggtggcacatgcctttaatcccagtactcgggaagcagaggcaggcgaatttctgagttcaaggccagcctggtctacacagtgagttccaggacagccagggctatacagagagaccctgtctcaaaaaacaaacagaaaaaaaaaaagaaagaaagaacacaaatgtgttgttggttctggtcaagggttaaggtgttaacagggttggttccttctgagggccacaagaacatttcttcctggcttctggtggatggaggccatctttggatggaggccatctttgacattcctgggtctggtagcagaaccaagtcaggcagagtggccgattctggcctgctcaggacagacagatccaaggctgcctaacttgcagcttccctggtaactggagtatgtgtctctccccgggagggaggtgtcctctcctagttctcaccatacttaaccagctgtcagcttctctacacttgggcccatccccttctaagcctccccatcctgtctgtgccctgagtctcttcctcactcttgggttatatgtaaatattcatcttcatatttcctgggttaccccattactcctgcaagtttgaaacctctttcctgtcttcatcaaggcatgagtaccctaaaaaacagacatatgtgtgtctggtcccatagagaccatcctgacacttggaagatgaacaaatgagatacatcaagtaagacttcatgatgtagataagccagggatggcatccattcaagatgcttttgctggctttgcctggcaatgcagttacatttgagtctcagcctcctagtccacaatccctggatgagactcagtgcttggacgggacctgaacacacagggactccaaggtgttgaatgttcttacaagtaaaaggatgtgggacttcaggggaggggggtgccagggaaagagctaacttccctggttaagagggagaggacaggtgaagtttctctggcagaggagggatgagaagtgggttccctgtgtgggtggaacccttctttggggccaaccccttctatgcttttctactgtgggccccgatgtgacatttggtttcccccagtttcctgtgtctgtctagtgggctcagggggagtgccaactccaggctgaggtgacggtgagggctgcaaatgtgactcagtcacctcaagaaacagggccaacctggagaagagcgatgtcacggaacactgaggatgtggcccgatagtgtcgattcaccgtggagtggcacaggcacgtctctcttgcctgtaaaacgagggcagatattactcttaggtctgctggctgctggcatgggtgtgtcttccagcagtatcctcccccatgtcccccactccatctcctcatgtgacttacttgaaaacacatcaggatggacctctcattgtcccctacggactgaagatctaagaaaggctccagctccgaagcactgaagtgctactgggtggcaaacgctcagacagcaacagggtgcgcgggggtggggggtggtttcccagttctagattgggcacagatggatgactctgtatggaggaatctagatgccagacttgacctcgaccaaaggacacaaagcttctacgaatgagctcactgagaacttagcccagtcaggctctgctgcacagcccagggtggccttgaactctccaccctcttgccagagcctctcgctgggatgtgatagccatcacaccaggcttaccatgagctaggcagtgccatcagctacccatcccgactcttttctgcagagcatggtgagacagcccggcatgctactgggggtgggctctagagcagtgagctcacacacccacatgcccctgaagnnnnnnnnnnnnnnnnnnnnnnnnnnnnnnnnnnnnnnnnnnnnnnnnnnnnnnnnnnnnnnnnnnnnnnnnnnnnnnnnnnnnnnnnnnnnnnnnnnnnnnnnnnnnnnnnnnnnnnnnnnnnnnnnnnnnnnnnnnnnnnnnnnnnnnnnnnnnnnnnnnnnnnnnnnnnnnnnnnnnnnnnnnnnnnnnnnnnnnnnnnnnnnnnnnnnnnnnnnnnnnnnnnnnnnnnnnnnnnnnnnnnnnnnnnnnnnnnnnnnnnnnnnnnnnnnnnnnnnnnnnnnnnnnnnnnnnnnnnnnnnnnnnnnnnnnnnnnnnnnnnnnnnnnnnnnnnnnnnnnnnnnnnnnnnnnnnnnnnnnnnnnnnnnnnnnnnnnnnnnnnnnnnnnnnnnnnnnnnnnnnnnnnnnnnnnnnnnnnnnnnnnnnnnnnnnnnnnnnnnnnnnnnnnnnnnnnnnnnnnnnnnnnnnnnnnnnnnnnnnnnnnnnnnnnnnnnnnnnnnnnnnnnnnnnnnnnnnnnnnnnnnnnnnnnnnnnnnnnnnnnnnnnnnnnnnnnnnnnnnnnnnnnnnnnnnnnnnnnnnnnnnnnnnnnnnnnnnnnnnnnnnnnnnnnnnnnnnnnnnnnnnnnnnnnnnnnnnnnnnnnnnnnnnnnnnnnnnnnnnnnnnnnnnnnnnnnnnnnnnnnnnnnnnnnnnnnnnnnnnnnnnnnnnnnnnnnnnnnnnnnnnnnnnnnnnnnnnnnnnnnnnnnnnnnnnnnnnnnnnnnnnnnnnnnnnnnnnnnnnnnnnnnnnnnnnnnnnnnnnnnnnnnnnnnnnnnnnnnnnnnnnnnnnnnnnnnnnnnnnnnnnnnnnnnnnnnnnnnnnnnnnnnnnnnnnnnnnnnnnnnnnnnnnnnnnnnnnnnnnnnnnnnnnnnnnnnnnnnnnnnnnnnnnnnnnnnnnnnnnnnnnnnnnnnnnnnnnnnnnnnnnnnnnnnnnnnnnnnnnnnnnnnnnnnnnnnnnnnnnnnnnnnnnnnnnnnnnnnnnnnnnnnnnnnnnnnnnnnnnnnnnnnntgaagtgtgggtgtcacaagttagggatacaagaaatcactggcactcccctgtgtccttatcagggcagacagtgcctctggggccatggggatctgtagtcaagctttttctctgggtcctttttttgacattcatcttccttggctcctccccacccccatctgctcagttctagagatccagtttgtgctgggcagagcaagtttgcatgcccaccctgtagccagaagttcccacgtggaaggggttatggcgggattgagagtcccagtggggcctatgcaaacaggtgcttgtgtcatctcaggggactggtgctcccttttgatatccttctcaactctgtggcctcgtctctgtctttggttccttcattcagttgcacagcagtgagcaccctcctcctcctcatccctaaagtcaggatcaccgaccccagggcctttgcacaggctcttccatccactagaatgctctgctcttggtaccccgtaggctgcctccttggatgctgtctacactcaagcatcatttctcaccatgaatccagccctgctcctttatcaacttccctcaccatattttctccccattattcttactatagctctggatagatttcatatttattgctcattaaatttatgatctgtatccctgcagctttgagcgggcagggattttagtatatggcttgtagctgtcgctcctatgccctgcacagtgcctggatcacagcaggctttccacaaacatgtgacggaatccatccgctggtccatctgtccatccacctatctatctatccatccatcttttcttatccactcactagccatacatcttccctctagaccagaccctattctggccctgctctggtaactgctggggaaaagcagacaagacaagcatggggattgacctgaggggcaagaaacacagtggcggaaaaacatggcgggagggcccggtggggagggaagcgaggtagatcctaggggactgacaaccccatgggcctggcccacaacagtgtttcataccccttgctcagaggatcagcttctgcttggattggcgtcctgagggaagtatggctcagccagcaggtctctatgttgggagctgggtgtgtgcatcaggactcacacacataccccgcccccatactcgtgcctgattgcaagagcattgaaagagaggtgggtggcagggtctgagggaagtgcctgcacgaggcctctctccattggtggagctcgcctggacttctccccttggcccccttccaagatacctggggcagctgccacctcccatccctagcaaaaagctccagttcctgccccctcaccttctgcctgctctgatcccacctgagtccagcaggacatattgtgagagccccacccacagccccggagccctcctgtatccagcctgtggctggtgtgaatggcgctgcagacaggatatggtctgaagaggctggagaagccacaaagggctggcagtttgcaggtgtgtgtgggcgtggcggcctgcctcccacagcctgaaagggtctctgaagcccagagacagcgtgatcccggcctcccacggggcagcttttactgtctagggaagaaatccccaaagtccatggagtctgaagactctgtcaagcctcgctaggaaacctaggagttttagagggcacttggcaccggaagctagccgggtaggcggagcctcacctggattgagttcacagctgcctagacaggctcagactaggtgctgggcacctggaaggaggaggagacattagcagcaaaggctgttaacagaagtgcctgcctaggcttggaggcaagacgctgctgttcacagtgcgagacggaggtaagagagggcagcgggtacggcatggacttcgcctggcctggcccgcttgaccttagtctaaggtttagcgcagtgcttgggagttctcgagtgtgtgctggatcgtatctcccagggaacgactgagtttgaggttctagctggtcctaggatactccttgccgctcagagtgtggggctgggcgtgctcacgagggggcactggaacacgttggccagctgtgtccctctttgctcagaagggcaccactgccacgagggccagagtgaagcttggaccctggcgtgtggttgaggactggcggcatgaaccccatttttcccttcgtccctagtgcttcccaagcagtttcctcctgagatccacgggggcggggagggcggggggtggggggaccggtttagcagcagctcactttggttgtttgacttttgaggaggaagaggcaggcagcctttcctggtaagccagcaaaagggtagatagagctcatgtatatgtctctctgttgctgccagccacaggtccccatgcctgtcagcccaggtctgtcaccccgtctgcaagagtcactagagggggtcccaagagtgcacacctcctaccagttgcttcccccacatggtaaccccaaagatgcacccagatagataaaagttcaggcttgccatggcctctggtgggaccctggcattccttccagctggacccatgtccctagctgtaccatgatggagatagacgggcccccagatgtcaaatcatatatggcttctaaagccccagtgcccagcccccagccctagctcacagcccccactcaaccagacaaaggtgggcggctggcgccgctgtttgcctctgccagtctgactccctgaggcgtgtgggctgcatggtgggcccctgctaatgagcatctgttatcactccattatgccgcctgcgccacctgcaccccagcacttagtgggagaccccggggggttccctggcagctgggcagaggggcatgcagaaggcaggaggtgttgggggggggcaaggtcttccggggctagggggccccatgctctgtgggatttctacaaagtacttaggattccagctctttattgtatcaaaagagaagtgctggggatgggcggggtgtaatcgccacactaggatggatgaggcagatcggttttgagttccaggccagcctgggctacgtggagagatgctgtattgaaagaaaaagggggagggaaaaaggggaggaggtggtggcagtctagggggattttgggtgaggaaacgagtgtctgtgaattcccaagtgagtctccccagccaacatctcacaaacgcatctgtgctgtgtatgtattgagaaggggatgtggttgcacatgagggcacaaccaagattccggtcctggagactggcagtgagtgacctggcatagtgttcttcgtaagatggaatgacctacccattcttcgtacggggctgtactgtcttgtggggtagtccctaaacctctctgggcttcccttgcctgccttggtaccgaggagataatgcttctctgcttgatcagagacagttggaccagttctggtatctgagcagcttccactcaaacctcaggacaggacccggggaggggcggcatagaccgggcacaagtgtgaaacagttggcagcagctgacatggcctttttggggaatgctagtcacctcagaccatgcctggctctctagctgaggcagggtggcttctgtggagggccgaagtccctctgttcctgcacactggagatattttaggagcagcctcaaggggctagggagataactcagctggcaaacatgcttgctgtggaagcatgaaggtctgggtttggattccccagcgccacagtaaaaagctgagcttggtggtttgtgcccgtactcgagagaggcagagacaggagggtctccagcaattctagctgaatcagagagcttcaggctctgggagagactctgtctccaaaagtaatttgaagggccagcaagatgtttaggctaaaggactttctttcaggtctcatgacctgagttatccctctgggtcccacatgaggcaaggagagaaccaacttctgtgagttatcgcacacacacacagacacacacacagacacacaacctaattcctaaaacatttaacacgtaagatggagagtgatggaggaagacacacacagggttgacttctggcctccaccccatttgcacataaacatgcacacatgcatgtatttcaacatatgctcaagagcaaacccagtggtcaggagggtgccgtacccatttttacacatgagaacactgaggcatggaaagatcaaagcccaggaatttgatgctagactctcacggcagttatggagggctttggagctatactgggaggaactagagtgtcgtggagagtggtttggcagcttagtcagtggctcccgtgggtcagcctgcttctgagcagagtacaggccagagagtcacaccctgaagaggccgagcggaagtcttcaccctgagaggaagatctcatcataacaactccccctgatcacctgggctgcagaggggacctctgtttagagatgggtagggtctcacaggaggaccccaggcctctggatcctgaagaacaggcaccagacttgtgacaggattggtgagggcttattcaaggtgctcatctttgccttgggcacaggggcttctgaatgctgagaggcaggggcatggcccatgtgactctctgagcaaggatctggctggatccagccctcttactggagggctcttggagcgggggtggctaaactgagggtcagacattccgtcatgccacaacatgaacaggcggttcttagccagtttgcctgtctcaggtagctgggcaccaggtatgcccacctctgagggcagtcagtgggggatggccttggaggcagccagcatgaacttggctagggaacaagacactggattggcctcttccctgcagtcaggaatgaggtgagcacagggagaaaggtggtgtgcccatgccggggaccaagaccacttctcgttggcatgccatcaaacatcattggggccagaaagagagacctgggggaaggaactgtcctggaagtcaaaccctggttccagccatgacactgggctagggggctccttccctctcctagtgtaaaccccttggcagggctgtaggggaaaacaccacccactcctatggcttatgacaagtctaccactgctatttggcacaaggggtgaagagggacagtgctgtggccacgagggggattaaagaatttctgctagcatctaggatatgggacttgcctcagaccgcaacctagggctttggaaatccgaggcaggtaaatttaggcagaacctgcttggctccattcccatggacctagagtggactccaaataaggtctcagaaatcaggcatacttgacttgggcagactcagctcacatcttgtcctggccttgattccacattatctgctatgttgtccttgaaccccaagcccagacttgaatccctatgaggcccagcccattttcatggcagagagaggcccctgtttcccctcctcttggaccaaccgtttttttttttccgactcctcccttgctaggggaagggatgccccccagtggggaaggctgtcctgagtgctggcacacagctgcctttgtaagtgtggctgagtcacatggacacccccccatccttgctggaccccggggcgatgtgactggaggtggggaggtggcgttatcatggggctgtggcttcccccacccccacgcttgtgggtgggagactttcccacgggaatgaagggagcagggaggtggacggaggaacacagccctagcacgtcttctgtgttcggagctactggattgtggggtggctttgggaaggtcccctttctgtgcctcagtttccatctctgtaaaatggtccaggcattcctgttgtatagaaaggaccctggatgttctcaaggtggagctttatgcccttgtgtccctgttagcagcagcgggctgggtattgtgctctaaaatatacaaggacgttgagcttgcaagagaaacctgtacttgaactctttttgttggttaaaaacccacctctgatcaggcagtgggtttccaggccccttggcaagggtggatacagcttgttgctcttgacaaggccagcttgtgtaacctgttctatcaggaagattggaaagactgaggcctgaaggtccccttgaagttccaccagccacataccctgtcctcagtgctcaggccttgcctcaggcagtagccaccgtaagcagcactgtttcttatccctgtccccgggggtccatgtgtccctgaaggtctctcctcagtgcccagggagcaggcgctggtttttgtcttcgactgacagcaaaggggtgtctgggcagagatgctcgcccaagtcaccagctggcagagtctgctgtagccagttggccagggaccagcatcagtatcgtctctcttccatttcttataaagaaggggcacccatcagccttctgtgcttcccaacccgtgctggctctgtcaccagcctgtaatcccacaacccttcccgtggagctgccatgttttttttttttttttttttcctggctgggccctggtattgtgcttccagtagccatgggaaccagagaggacatgtggttccctaatgctgcacgccacagatccactcgcatcggaccatatattaggacggccttttctctcttcccagatctgtaccccacccctgactatacatgtcagggatgcttttgatacctcgcctttccctgtttgactttcctcagccttgtttctggtcttttggatgagaatcttcaccccagcttttctctgtctccatcttcaaggccccagcctgagcccagccacctgtccacacttcttacaccacgcccacccagttcaagccggtagaggagagatgggcctacttaagctttgtcaaaaatgatagccatccgggaatcctgttaaattttaagttcttatgggatggatctgggggcacatctgaaatctgaggtttctcgtaaattttcataatttgagaacctagcatagatatctttcctatgctcaaacaccttcccagacgcccctgtgccttggattagacttcagttccattcactcaaaaaccttccactatccagccctacttccttcaaaaatagctctccccacctctccaccctgctgctgtccccctagaagtttcttctgagggtctcctttccttgaatttcctgacttctctattatccagctaggactctggagccatttggtccatagccagcctttgaagggtgtggctgagagcccccttgctcactctatatatgggcctcttctgtgtggtggagacatggtggagatgatgaggttaagggcctgtccctactggatgtttgctgagagccagaaacccagctgtgtcttagctgtgctgccttggataagtccctggttgtctctgatgtctcatctcacgtagtggtgatggtgtgcagggtccaggtgccctgggctcctgcctgtctgcctgccccttctacgtccccagctgtgagaccttgaagaagttaactaactttcctgagcattctctctctctctctctctctctctctctctctctctctctctctctctctctctctgccttgcccttttccttcttcattaccacattcctggagaattccttgagactcattaattgtctgggcaggtgctgggaagcagggaggaggcgggaaggctggaactcagcgagtgtgattgctgttaccgccattattgttattgttgccacttgccctcattaggttgtgaaatcctcctgggcgcttcatttggctcacacagtatggagtatgggagagcagagtataggagcctttactctggagggccatgcnnnnnnnnnnnnnnnnnnnnnnnnnnnnnnnnnnnnnnnnnnnnnnnnnnnnnnnnnnnnnnnnnnnnnnnnnnnnnnnnnnnnnnnnnnnnnnnnnnnnnnnnnnnnnnnnnnnnnnnnnnnnnnnnnnnnnnnnnnnnnnnnnnnnnnnnnnnnnnnnnnnnnnnnnnnnnnnnnnnnnnnnnnnnnnnnnnnnnnnnnnnnnnnnnnnnnnnnnnnnnnnnnnnnnnnnnnnnnnnnnnnnnnnnnnnnnnnnnnnnnnnnnnnnnnnnnnnnnnnnnnnnnnnntgtgtgtgtgtgtgtcagggtcaggatgtgagttttgaaaggttgagactgagggagactggtctggctccctgctgggaagacgctcaagagacatgggtcagcagtcagccacatatggcctccagccaggcggcctgacacccccttcctcttggagtgccttccgctctgccagtcagcaccggctctgcctgctgccacagaggttagactgtccttcaggaaggggtagttgttggctgggcctggaggaaggggcagcagcagctgagtagcctgttgccatggcaaactggttgctttgaaagaacttcaggggagcccccagggacttaatgatgggggcggggtatgtgaggggacacactcatcccagctcatacccatttttgaaactggcaccagggtctgggatgatgagaggagagacccaggtccccacttgccaggcctgagtcacgggcatcccttagggtccccgcctcacctccgtcagtcagccctgcctcctcctgcctccctctgagaaagccatgactcacagttagccagtcatctcatctctagcctgaagggaggagctgagcaggagggtgtcccggccctcccccagttctccgggttctccagctccacacagcctgctgcctgggctctatctactatagagaaggggctgctggcttggtaggagcctccccaaccccagccagtgcacttgcttgctctagctcacactcttacccagagacccagactgtaaaattcagcattggaggtgaatcctgaaaggtggttcagctgcctggctccttccagaacccgtcgcctggcaccaggtaccggactaagggcagccagtgggtgggagtagatggggagggcatgtggctgctaaacagagattatagaatgtaaagggatctggagggcgggggtctttagtgcaccgcaggggtagagatgtgtgtaaactgagagctgcctagaaagaggatgacatcagaaggaccagaacttttggagccattagttgttgggcatttgggaaaccaagcctccactggtgtggttcagtcttgggcccagcagtgtggtggcaacgctctgggccttttgataggctggctgttctcaccttaggctgtggcattcacctgtaatcccggtatttggggaggtaggggtaggtaggctctcaagttcaaggcccgcctgggctacgaagaagccgtgtgggagttgggagactcttgagtgggcaggcagcttgtctgaggtcacacagcaagttcagagacattgagagccaggctccggaagagggcactgtggtagactgagcatggtgcccctgacagtggcctcctctatctcttagggacaggacaggggcccctagagaaccagggcagtaacaacttttgacaaaggaacgaaggcacagtgcaatgttggtctgaacaggaggcacctggaatgaagatcctgggaagggaagccaaggcgccaagagctccttacccactaaccacaagacctcagggccccagctgcctgggcctgataggacctcaggccccttcccctagtataggaaatgggggcagggttcctgtctaaccccactctccaaccagccctctctgtgtggtgaccgttagggcctctaaggggctcattttactgagggagggggctggagtgaatagtggcagaaccccttttccacctgggccatcgtgtcatgggatgggtgacatgggtggagaaatcctgtgtctccttcagaaggccaagggaggttgctgatttgaagcatgaagtgcctactgtgtgctgcacagtgagcaacaaggcaaaggtcagttggaacttgcaaacggctccctcctggcagcagccctccaggatttggagaccgctgaaagagcaagctctggtcattgagtgctgcaggctgccaaggggaccccagagtttaggccagtccctgtgtggtcctccctgccctgttcagagtctgtactagcttttggggccagacttttatctccttttgttattagagccccaggaacttgagatacatcccaccctgatccaccttggtcaaagtcaatgcaaccggcttctctttgggttgctaaattggcatgggggggggggtgaccctaaccactgtgcctctgtgtgggctgaggacctggctcctagagtctggggcagggggctcctggctcctggtgcgaactttggctaggaggttgaggttgtcctaatcagcttgtatgtggcccgccatcctgttagggacaggctggtaaggaggtctgattgcagagatgacaggagctctgggtctgttagaaaggaggagtgagtatggccctaaaatgggtagaagcaaagagggaagggcgggatccgggcatagatgtgtggaatgtccatggcggagaatataatatggggagaatttgggggaacaatgaaagctcggaaacatggtgccagccacagaactgcagcatgacatgggtcacaacagagggtctcaatctcccgtgctgtgggaagcgatagtgagaggaccgggcagcagggtgagcagggcagaggatgaacactgtgggtccgacctggctgctcagcccctggctgctgagtctcaggcttagggatggcttcctgggtaatggaaaagaagtggaacttatagtacaaccacaaggaagggaaatgaagagagtagacagacttacagccataaaggtggccactgtggatgacctcccggccagtggatgctgagccctcatcgggattcgggatgcaggatgagcttctagtcagtaggggaaggggcaggcccttgataagggtgttagaggtactggtggggaggttgggggatgtgtgacaacacaggacccaaacctcagtgttgtgccccctcccctcggggtagaggtcctcagggtggccctactttctgactcacatcagatgggggcatcatgtgagtgcgcccggcagccgagggtgaccagcctccagggacctggcagatggcaagtagggggtggggcagggctggcacaaaggggcctctcagatgcagtgggtggagcactggcaagccatcccttgctcggctgagagcttgtccctgctccaggctctggacctccagcctcatctggagttgctgagggcccctggggagcctgtagattctgaggtcaggcctgagctgctgaggagagggactaagggtagtagctctctgctaatcactgacctgcccggcgtgaggtggtctgagatactgtctggggccccatgtgctctgagctctccaggttccctagaagcccagcctggattagaacaatcctgaacgttccattctggactcattgcttactgtagagacaaggaatgggggtgaggagacttccctggtgagggatccaaatctttggggctccatgtctcattgttgttttctgcctctcttgggaggcaaggaggtccttgtctgggtcctaagctatctgtaggcaggcatgtgcccatgccccaccactggcaagcccttgcatttggcgatgggattcaggcacttgtcaaagaggacttgactatactcctttctggttgtgtgggcttgtgcctctgtttccttgtctttaaccacatctttggggggctgctccgagcatcacagagttaacacaaaaacatgcagaatagcactggaatcatgggaagttagcattcatccttctggctcctactggatggataggcataccgaagccggagtcgtcacttcttatctccaaggcctgtgggggagctggatgctggaacaagtcggcttgcccccaacgagtccaatccgtgtcagcagcaaggctagcatgggtggttgggcatcaggctcctgggctggcactgcccttagtgatgtgtggatgcagttccaggcaggcagagataagagcttagagctgagaagttggcggagcatcccacatcagcaggcagtcctctctgcattaatgggagatggtctggggatgagggactggctctcaagtccatgttccatggttctgtggctaatagcctcagcctgcctttcccatttcagggccactttgactctagaatgacgagatagaaaactgtccttactgcttcttcatcctacccttctgtcccccaggcctctgccttcttcctcccagcaatatctgcctagattcccactttctgtagcagaaagtgggtgagcaccagagactcacattatactgtcaaagatcacggcttctctgggcctcggcttccctgcctgtgagtggaaagaaccagacccatctcttgtaagatttgttgcaaaaaaacagggctacaaatgtacaatcagtacgctgcaccttttgggggnnnnnnnnnnnnnnnnnnnnnnnnnnnnnnnnnnnnnnnnnnnnnnnnnnnnnnnnnnnnnnnnnnnnnnnnnnnnnnnnnnnnnnnnnnnnnnnnnnnnnnnnnnnnnnnnnnnnnnnnnnnnnnnnnnnnnnnnnnnnnnnnnnnnnnnnnnnnnnnnnnnnnnnnnnnnnnnnnnnnnnnnnnnnnnncccccccgccatcctgtcctccctctcctgtcctctttcctctttcctcccctcctcttcaattccactctttccttttgctttttcacacagggttttactatgtagcccaggctggcctcaagctcatggtctcctcacctcagcctcccatgtgctgagatgacgaccaggagctgccatgtttggcaagcaacttgcttgttttgagtctcatttgcagtaaggtgaggatgaagatacttggctctctaagaggcactgtggggagcgaagggaatagccacaggtcgctaaggctcaggagaagtggccttcatcctgatctgccccagatcttctcagtctcccactttggcagtgccctagcatagatcagatgggtggttaggactcagtgtcggcctggttccgtctgagcgccttcagctgtgtgaatttggatgggtgtgtttaccctgccccctggtttcctttagttttaaagcatgagtaacaatggcatcttgagagccgtgagacattaagtgcttccttcccagtcctgtaagtgctgtgctgctagtggtaccatttctggaaccttctttggcagagtagcaacaaacttatcccagagaaacagtctgccccatctcaaaatgtcatgtcatcaggaaggcttcaaaccatagatagcccatgccctcagatattccactgacagggtcttggttgctgttctgaggattgtcctgactcaatcctgccttctaagacctggggccatcctgtcagactcttgcctgggtgtctcttgaaaaccaatcagttttattcaagggtcacctcctttgggactgtcttcctcagagttccatctggggtccttgggtgcgcagacattcttgtctggagaggatggcagtaagatagtggacagacagactgcacatgatgagcagtctttgccatctacggtgtctgatcctccttttcccaggaggacactgttgaccttgaccttccagaactcccatggcccattagacagatgttacttgtctgcaagagaagtctctcagtggtttatggtttgggttcattactcgcagatgctcagcagtagcgggaatgcagcccattttgacactatcttagggtcatcagatttcctgggttctgcagtctttgagagagatgacttcacagttatattacagnnnnnnnnnnnnnnnnnnnngaagaggcaggcagcctttcttgataagccagcaaaagggtagatagagctcatgtatatgtctctctgttgctgccagccacaggtccccatgcctgtcagcccaggtttgtcaccccgtctgcaagagtcactagagggggtcccaagagtgcacacctcctaccagttgcttcccccacatggtaaccccaaagatgcacccagataggtaaaagttcaggcttgccatggcctctggtgggaccctggcattccttctagctggacccatgtccctagctgtaccatgatggtgatagacggggccccagatgtcaaatcatatatggcttctaaagcccccgtgcccagcccccagccctagctcacagcccccactcaaccagacaaaggtgggcggctggcgccgctgtttgcctctgccagtctgactccctgaggcgtgtgggctgcacggtgggcccctgctaatgagcatctgttatcactccattatgccgcctaagccacctgcaccccagcacttagtgggagaccccgggggggttccctggcagctgggcagaggggcatgcagaaggcaggaggtgttgggggggcaaggtcttccggggctagggggccccatgctctgtgggatttctacaaagtacttaggattccagctttttattgtatcaaaagagaagtgctggagatgggcggggtgtaatcgccacactagggtggatgaggcagatcagttttgagttccaggccagcctgggctatgtggagagatgctgtcttgaaagaaaagggggagggaaaagggggaggaggtggtggcagtctagggggattttgggtgaggaaacgggtgtctgtgaattcccaagtgagtctccccagccaacatctcacaaacgcatctgtgctgtgtatgtattgagaaggggatgtggttgcacatgagggcacagccaagattccggtcctagagactggcagtgagtgacctggcatagtgttcttcgtaagatggaacatgacctacccattcttcgtacggggctgtactgtcttgtggggtagtccctaaacctctctgggcttcccttgcctgccttggtaccaaggagataatgcttctctgcttgatcagagacagctggaccaattctggtatctgagcagcttccactcaaacctcaggacaggacccagcgaggggcggcatagaccgggcacaagtgtggaacagttggcagcagctgacatggccttttggggaatgctagtcacctcagaccatgcctgnnnnnnnnnnnnnnnnnnnnacagctgggtcatgcagaacctgggcctgattcccgtctgttgtatcatcacctgggcacgtgccaaatggcttgggtttggccaaaagcctgtctccgccatagcctccattccactgctcaaagccctcattccatctctggtacttctgaggctgaaattttcaatccatgcttcagagatgatgaagtaggttgaaggtttttggacagtccatggtgacagagacctggactctggtcacttacctgtgatcagacatgttcccgtgttgtcgaaatggctgtttgcacgggaggtagttagctctccatccttgcaagtagttaagttggtcttgaagggacctgaggggtcaagaggctcttcttcacagctgtttccagccatgagcttttccatccctagaggggtggcaccaaatgaccacatcctttagtgttgtcaagtgttacggagcacatgggtagtaagtagcacatggttgttctagtgtatcaggtgatgtctgtgagtgatgtctcccctactgccttgatggtcattgcacctagctcccccattggtgtgtctcactacaccttcaggggtgaggagctgggggtgagcgaggttgttttgttcagaaaaggcacacacctatctgcagggtctggggtctcttgatcttcctaaagccctgaatctaggcagggtgtccacgctgcctgctcttcttccccaacactggctatgatatcaccttgtgggcagtgggcaggccaataaggaaccttcttgccagactcctgcgagctgtacttatcctagctagtagagaagcttgccccaccctctcgggatccctgctggtagggtctggcagaggaggagccatcaccagctgtgattgggaaagacacttggcatgtctctctagagaccctgctgtgggtttcaacacaggcaggtgtcccatctctgtctccctactaagggaaagcttcaataaacatgatctgcaaagacagtggtgttcacacagcacatgcgtgtagagggttggtctggcacagcccctctgctgtgaggctgtggggtttcggtaaaacctctgtgagcctcctccatcttcacctctgccaaatggcaggggcggctagcactctacaccgtggccctgcccatgcaagggtgacgtgctacaagagcaccgtagagatagagatgaaggagtcaggttggattgggatccagttttaccagctccatggccctaggcaaatagtttctttctaagcctgtttcctctgccggcccatgcgattagaaagaaaacccctcctcacagatgacagtggaagtgtgggggcgggtgcacatcatggggctcacaggtgtgtggtccctgctgtgacttaactctgtgtgcccatcctagtcttcagaggcacctgccctgggttctcagttctcaggctgtgcatggtctagggatccctgcactgccctaacacccagcagaggcatgcgatctcctaatctagtcagaggctagcgagagcccagtgccctgttcttgagcagatgtctttagcctgaatctacagtatcaggaatcagctgttggggagacagagcctgtggcctggctttgagcctcaatttttttcatttgttcatgtgttcaactagcttcactgggcagctgctctggtcttacactgtaccagcaggggtgtcagaggtgctaagacagacagactgaaagacagacagacggacagacggacagacagacagatggacggacagggttagagagacagctcggtggttaagagccaacattgctctatcaggggactttggttcccagcacccacgtcggggagcttactctagtccacctttaaccccagacatagagatcttctacctctggccccacagcaccggtgctcataggcacagacacactcagagaataacaagacagcaaaggccactgaagaatagcaaacaagctaaatgcaaggccacttcagaaatgccctagggctctcaaaatagaacaggtcactagagacacagaagtcactttgaattggggagtcacagatgggatttcaagagagaggacatttaaatgaaggcccaagaaggccagtcggaggggaggtcttagaaagtacccataatgggggaggggagcaggtgcaaaagccctggggtgcacctggacttggtgagtgtgaggagggcagggtgacaggtgggaccagggtcactggcttgtgtggacagctgtattgctctgtaagcatcggagaagctctgtgagaacagagttggttctatcccaggctgtggtttctgagcagtcgttagctctgccaggtttctcatgggtgaagatgggtaggggtctgcagatgggaatgtgtggccgtgccctggtttcttgctgtagtgagtgagaactgagtgtgtgcgaagagtctgagtgccctccttctgggacctcagcaccctgcaccagcttctctgaggtcttagggtcctttgatccaatatggctgccttcccagctagtgggccttggagctctctctggaggcaggggaaggtgtccccaccccacccccacccctgcccaggacagcagctcctttctttgctttcttttcctcttcctccagacccaaaatagagcctgaatggtcccaggctctggcagtgagacaatagtggcctgctgaccgaggcagcctgctggccggggtccatgggctggaggcactaggctagtatgcctggggctccaagctcagctgcctttcccagggcccaggccagccctttcacctgaggcgtgagatctactggagtcagtggtgctctggggaaaggcttgccacagcgcatcagagagctgggtgggaccctgtgcctcagccttcccagcctgactccgtccttctctgctgccaactggagctggaggccttcagatacctctctctgttcttgctcaagtttggagctcagaggtgaccccacgtgatgaagatctttcccttttgactcactgggtagaaaagtgtcacagaggtaagagctgtgctcgcttagaaaggagtgagtgctctgtctagaaatcaaatcaagcttggatgagatgggttcttaagcgtctcagagatcggtgtttgagtttcataccctgcccttcccagctatgtagccttgagcaatcatattccctccccagactctagagtcctgtctcagcatgggctcagccaggcttaccacacagagcggtagaaatgagcttcaaaaattcccggtgctaggggcaaggcttcagaagccttgactctgtcctgctctcctcctgggtaggtaaagaggggcccagaaacttcctgccatagcctgggagcactaggataagcaggaggagcctcaggcctgggctggctcactaaggggattatgagtgagctgtggcaatctgggaaggcttccaggaggagacagactcggcgtcttcaaggaagaatggcatacactctgttcactgcagccaatggtagggattggaggctctgccacctggcttgtgaccaaggccatggggaggcaggcagcaagtggcagcctctaacaagtattcatttggtcaagggtctcgctcccatcctgttctcaaaccacttggtgttaaagtcactctgagggctagaagtggtggcacacatctgtgatctctgtacttgagacagaggcaggaagatagcaagttctcgctcccgttaaccctgtatcccctccccgttcccctgatactgacgtatagctaatggtggggtggggtgttattggggaccctaggaaaggggtatcgcacatagctggtcctctaagaagacacagacagcccacttgcctggactacattgcaagaccttcttccctcaaagggaaaaaaaaagtcactgggagatttcatgcaaaaatctacccttctgcttctctagagaacttgggtgctctgagattttggggtctccccaagacagatcccttaagctctaggacccgttctctccgagtgtgaacccagcttgtccctgctagtaacctgctttagccccaggcagcctcaggacgaaagctctcacgcttgggtacagacaagttggagagcccgcgctgtaagccaggcagtgacgcagtccatgcagctgccaacggttgccaggggaacggttgccaggggctgctgtcacctgcgccccttcctcccccttggcgctggaggcccgggcttctcagctcagcttcccgcctgccccctttgtttgaagccctagtaaggggatggtgactggggggggggggttagggggacccaggctttcattcgaccttcagccccctgtactaagaggaaagtgtcccttactccagtagtctgctgcctgcaaacagggaggctccgtccagtcacttttgcctggaggagaaaaccaggtagattcttgctcctactcctttttggcttctttttcctcccatctctcccttcccaccatctcctttccttctccacagcctcctttcttccctctctttcttgttatcctgaatcctccctcccccctcctctgacactgacatgtagttaatggtgggttgtcaggaccctgggggccatcatagctggccctctaaggggacgcaaacagcctggagagccatcaggaagtggttaggggtggccacactccctacctctccagctgaacatttttgagtctcagctgtcacagcataggtctcagagaagggtagtgggagataactagacaaggagaattggaaataccacagccttgggaagagccagagaggagctgagatccattgtcacctgggtaagttcatgcagacccttggactggggtcttgcgcagatggcagtctgcttcacccaaggagaccatttcactatgacttctaaagagaggctctcactagcaggtaagctttccattcaagagcgggtctcttctggagctagcctggactccccatgcaagcttcattctttgctgtgtgaccctagtgggtgacttggcttccccgggggcttctcatttgtccgttcagtgggtcatgggctttttctcatgggttttaaagaagattaaatgtgttaatgggggctcaggcctgtaatatgaacacttgggaggctgaggcaggaggatgagaagttcattgccaggctgggctacatagagagacaccatctcaaaacacaagcacataaatgtattaattgctcaaagagctttgagtcctgccctgcctttctgaagtatttttattatattgctggagctatattttataagtgtggctgtattcctgaaggggcaggcacctgcttgtcacagaggagctgagagaacctttgtgtgcttggggatggggggggctctggttagtgcctccggtctcctccatagttgggagctgcctggctttgtgtccctgagctggcagcctctgggccaggaaagagggggagaaaagggaggtttggtagctgaccttgggaacagaaagatcctgcagtccacagacgggcattctgcctgggccttggggaacccagtgcatcccccagaaagccagcggggtggccttgggcaactcaagaaagcagatagaaaaaggggaacttagaggggacacagagactgctgtagtctgaaagggaagaaagtctggacagatctgtgcgtcttctttgtccctcactgcctgctcaaaggtaggtttttccctaatgtacataccctaaattggccaaggatgggggccatagtctcccattgcagaggacggggtcatagttacccattgaccaagcaggaaactgagacccactgagatgcaggctagctcaagcttccaggtttagagacccactgagaggcaggctagctcaagcttccaggtttaggcagcctctctgtaggtgccacctggctctgagaggcagatgctgaccctgtgtaccgattcgaaaggctgaccacagtggctcattgaatacaactgtgtgactgtgacaaaaatgagagtctggggtttttgatgctcaaagccccgtggaatcttggggccaactggagagtcagagaaactacgggagagggagtggggcaatgcccggagagctggatcgctctagtggactggattacttccggtcaggtacgacactattgtttccccatgagctgctgttgcaggtgaagggaggcaggatcgtcctggatgcaccccaagctcacgggggacccgtcgcctggaagtgtcagagatggtgatgagggcctggggaacactgcaacctaaatggcttcagtggctcatcttgtgcttgctaatagccttgggggacatctcagaaaagaaaacaagggacgggagacagaatatgtatgtgcacatacatgtgtgcacttacatgaagacgtgctgataggctacgctctctgtggtgccagggcatctgagaatttgtttctcacatgagtgatgggtgtctatgcagaaaagggcctgccacgttggtttagggaatggcccccgtaagttttgtgctgtttctacttgtggcacttaccagagtctttgctgtgctaaggcccaaagtagggtccaaaggtctctctaatcagaggataagtagcaagtccccccaccgtaaggtcagggagagggagggaggggagggatgcagtaaccgcggtggctgaaaccattgctttgaggttagaagaactaggtttgaatcacagcgtggctccttctttgctttgtgatcttggctgcgatgtaagacctttgcatctaatgcatcgctttagaattagtgggaagtgagtgggctacagagttgagaccctgggctgccctgtggcaaggctgctgctggtgctggcacagagtgcttgctggaggatacctggattccagagtcccttccattgttctggataaatccctgctgcctcctagctaccatgatgctgtaaaggaagcctgagccagggaccgtggatgtgttacaagttagcaccacaggaagggcctgtgggcaaggtcagttaaggaagtaaccaaggctagttcactcctgcttggtgatgatccctagccttcctagccgcccccctccccaatgtgcatgcctagttgtaggaagaggaagctgcagaatggtcagccactgaggccttctaagggcaccttttgtacccacaggtcttctgctgggctggcgctcaatgcccacagctcccctccctcagtttccccatggggcagggcttggcagagggtattgcagctcatggatgttggcaggaaatcacaagaaggtgagacctgtgctagctgagtagtcctatatagcaaggctgggtctagatggtcctacctacagccatgctcagtgtggtagctcaggcctataaacctggtgcctgacagactgaggcagggggattgctatgagttcaaggccagcctgggccaagtgcgagacaaacaaaaacaaacaaacaaacaaacaacacagaaagtgagccttgccttagtgggtaagacctgggaacctgccagcctctaggacaggtgccaacttgatttttattatcatgcagtctagacagattcctgaagcctgaagtcacggtgctgccctgtgaccccagtgctccctctcagtgaggggtaggttccgaaggggtcagcttgcttgggtgtcagtctcccaactgtggagtggggggcagatgcagaaggcagagcccagcatttacccagaagctggggacatagcccagtgagccctggctgagtggggaagggtaatgcaggtctcctgggtctggtaaacagctcctttgaagatgtggctatgtggtgctgataagtgaggagttgtactgatgagccaagcctggaaggatccccttagccctgtgccccactcctactctagccttggatgtgtgtttgagccacctcctccgcagagattggagtccacgccagccatcctcccgttcctctttacccagtgctcactgcaagtgcacactcatgggctccaggacacacacacacttgcagctctgcacgttcataccgtgaaggctcctatcatctcccatcctctccccgagtttccatagctcccaaggaacacattctacaactgtacaaagtagctgatggtaagctgaggccacttcagtttccccagataggccctgggtcggtcacaggagactcagacctggaaactagttagctcctgccttccttgatctggctttatctccatctcttgccggaggcccctcagatgaccagctccctgccaaatactgggaggccatatatcatgtcgtggggaagggacagggatcaggagaggcaggctgcctttgtctcttgtccacattttgttctttcacagctgagtaaatccagcagacccttgcctggctcctgggtaccccctggcccccatgggtggcctgtcaatcactggatactgccaaagccagactctgggccacacctgagctgtggtgcaaggatccaagccatgtccttcaaagtatctttcctggggttggtccccatacactagcagtttggggcaactctgatgaagccagcccttatcagggaggctcacagggccgtatatggctgggaggaagttggatactcctggtgccttgggctttgagcagaaggtcacagtggaaatctgtcattcagaactcaagaacacatcccagcaaagacctaaagctatgacagatgcccttaggatagctaatttgtaaccgtagtgggtggaaaggggtcccgctcaacatgtgaggtgacagcccaggaagggttaatttagagctctcttagtcccgttcaacttccacctccatctaggaggaaatgggttttccaggagctggtggcgtctaggtgacgcaggtccacataggatggcaggggaagtgactcaggcctcgggagagaaagtgagctctaatattgctgctgcccaccatgctggccctttccctagcaaccaatcatgctaggaatggtgggggctcacacagccttagcccccctctatcttgtggaatccctggggaccctgtgattttatccattgtatcaggctggctcagcgtgttctgttcttagcatgtttacgggaagctgaggtcaagaataacagccactctgaaaggggttgtcagtccagcaacttctgtctaggctggacttgcctgctttgtgcccgtgacctctgtagctcctgcttttctctctttgggggaccctaagccaggggggtgtgtacctcaggaacttttgaggagagggcttgggagcagccttgtgtgctcttgtgagagatggcctttttctggcctcagtttctgcatctgtaaaatggtaaacccggaacagtactctgcagatgtggttgtgactattggggtggggctgctaacataccttctcagtaaccattggctctggcagtgctgtggcaggtggcatttggtggctgaagccggtctgctttgccgttcttcatctacacaggccaaaggtggtccctaggaggtgggcctctgctgctggctgcagggactagggtaaccagatcttgggatgcctgcaggaggcactagggtgccatcctatgatgttgctcttaccctttggagtgtgaggctgggtggcaggtgtgtgtgtgtgtgtgtgtgtgtgtgtgtgtgtgtatgtgtgtgtgtgtgtgtgtatgtatatatatatatgtaggcctgggagggggctcaggcaggaatgtgctgaatggataaataggactcttcctgacccatgtggtggtcccttagctatctgaagagacccccctccccagttgttctccttgtccagcttctggcagcctgtgacattcagggccagctaggagggaagttctctgggtggggtcacagccttcccgatactctgtccggaagggaggttcatgttctaggaatttcccctcaagtgctccgaaggccaagctggccacctgcagtagacagaggcctaaggaggggagcatgggatagagagttggggggaagggtctgagtcagggacggaagtgcactggtcggaaggtacacagagacagtctaacttcagtggaaccccatgtgcgctccccacccccacccccagttcaaggccctttttgatgagtggtagacttaattctcacagtgacagctgaggtaggtttgatttgtaatcctctttacaagagaaggaaatgaagcccaaatatggtgtagttaacttaagagcacacagctaggaaaatagaggggnnnnnnnnnnnnnnnnnnnnnnnnnnnnnnnnnnnnnnnnnnnnnnnnnnnnnnnnnnnnnnnnnnnnnnnnnnnnnnnnnnnnnnnnnnnnnnnnnnnnncaaccatcctcctcctccttacctccctcctcctcctccccctcctcccctccttcttcctctccttttcctcttcttcctccttctcctcctcttcctctttctctttctcctctttgtcttccttctcctctttctcttcctcctcttccctcttcttctttcttcacttcctcttcttcctcctcctcaaaccccaagaatgcagacaggggtgtttatcctccttaaagtgactccacaaaggttcgaagtggaggggaagtcccttgtttgtgcttgatcccttccatgggttgccatggtgatccagcctcactgtgccccgcccatgaggcggagcttgctcccttccctgcctcttttgttctcaaggccatttggggagagtcagtgcaagacaaatggctctgtcctgtcctggaccctgtgctgacagtggtggcccactgagaaggcaagagcccttcctagttagctgtgtgaccacatgaagttgttggctatctctgggcttcagatctaaaacgtcacaaaatggagatcggatggaagtctcaagtgatttgtaagcttcaagttaaagagaggaatctgtctggaagaagagagatttgggttaaaggttgaatggacagtgtcagggacagcagagagcagaagggaagagatgctggccttctgctggcagtttgatgcagggaaacccatgcctccatggagggagcacgctctcccctacaactttcctgttctccgtgcagtgctctggcaccggatgaggaccgtggcctctgaaattgaccttcccttctgcgtgtttcaatgctcctcatgcctgggtgtatgggactggctctcacttgaagggcccagggtgaccagaatgagactggtccagaaaggagacagcaagatcctgcttgagccacccagtgctcagtttaacctctgcctcttctaggaagccctcctagttttccccccaaattcagattgcctttgctccctaggtttccagccttccctttgcctaatggtggaagatgagtgtctgtcactgtggtctgacacaattccctacagtctgagggatggtagtcgggggtatgtcagcacccacttggccactgggccagctgggagggccaacaacggaggacatcgccagcggtggtatagttcatgtgggtgtagtgtaaagaagcacccagctaatagtgacccatggagtcagtatggagagatggagctgaccctcagggcgggagcacatagactaaaccacacctctctgccaccagcttctcaggtcctggtggctggctccccctagtggtcatgacaggaaacatccttccctccagcactttttatcacgttcaccctgctgctttcctgcttccgcctctgtactaggctctgtttcctgaatgaggagggactgtgccagttgatggcgtgtggataaaagattcaggcagtggggcaaggggtggggttatcaaatgtcattgtgactggtcccaggagcaaggttcctgtaactacctaggccttagggactgtgacacttggttcccaggaaaaactcagatagcccgttcatttccctgcatctcctccaggcctggcagatgcaggatagtgttcaggtggatctagacaaggcccctcgtggcccctgggctcctctgtgagccacttacaccttgtggcagagcagcaaaaggcagagcgtgtggccatgtctatttatagcctcttgatgctctggagagaagcctgaccattactttgtgacctttagctcactcccatccatatacaggcctcccgctgtggcgccggcccctcccccattcccctgtccccgtccccaccccggtcataatgttctcactctcttccaggtaggagtataatggctgtccaggtgctgcggcagatggtctacttcctactgagtctgttttctctggtgcaaggtaggctttcttggggcccagggtttgtggtgactttgtctaatgcctccatgtctgtgtgagggctctctgtgtaaaggatgggtctgcaaagcagccctgagggcaccttgggggaaaacaggcatctcttccttcttagatgcggctccacagagcgaaacttgggatgggtgcagtcctctcttcctttgcagggagtgtccttggacagtgcacacgtgtgtgtgccacagtctaatacaatcatggtctcattaattaaataatttgcattaaactttggcttttgactttgaaacaannnnnnnnnnnnnnnnnnnntccccccccccccccactcccctgcaagacaggctttctctgtgtagccccggctgtcctagaactcactctatagaccaggctggcctcgaactcagaaatctacctgcctctgcctcccaagtggtgggattaaaggtgcaccactgcctggtctgaaacaaattctttatcttcacttttatctatttatttatttatttatttatctatctatttatctatctatttatttatttgttggaaaccagtaaggtctagcaagatagatacattgttatacattgttgtagactgatagatacattgttgtagaccaatagatacattgttgcagacccttgaaatctagagccttagaatgtgtgtgagtcccaggtcctagcccctggctggtcctgtttatagcctctgcctcctcaggtgcacacagtggcagcccccgagaagacttccgcttctgtggccagcggaaccagacccaacagagcaccctccactatgatcaatcttcagagcctcacatctttgtgtggaacacagaggagaccctcacaattcgtgcccccttcctggcagccccagatattccccgcttcttcccagagcctagagggctctatcacttctgcctctactggagtcgccacactgggagactccacttgcgctatggcaagcatgactacctgcttagtagccaagcctccagactcctctgcttccagaaacaggagcagagcctgaagcagggagccccgctgatcgccacctctgtcagctcctggcagattccccagaacaccagcctgcctggggctccgagcttcatcttctccttccacagtaaggctggggggacatatgagtgtggggtgggagtcacggaagacatggaaagcccatggaggaggacctgggtgctgatggcagctattgtcacctgacctgggtatcctctaggaggataggtggctggggaggggaggattggactgttttgcctgtccctgttatgatctgagatctttgtgatgaccatagcatcacttcagccattaggagagcatcttagctacttttcctctctatgataaaacactctgccaaaaacaacttaagggagaaaggtttcctttggctcgcagttctacggcacactccatcatggtgggggaagtcctgatggcaggtgcttgaagcaactggtcattagcatttgtagtcaggaagcagacaatgataaatacttctgttcagcaagcctaggggatggtgctgcccacttttagggtggatcttcctacctcggttagcctaacatagatccctcacagacatggctcctgtcaggcggatgagcaatattaattatcacagagaacaagggatggagagaaagagattattacttacaggtcctgaggtgcagtgcacacctggaggtcatgcttatatacacacaaaggtcaggacgcagcgggaggaggctaggggggaacataacttgatacatacctgggaatgtaacactaggaaatgtgagctctggcagagccactctccagccagaaggcccagcttctattcaaagtacaggggctggaggaatggcttaatggttaagagcatttgctgttcttgtaaaagatccaagttcagttcccagcagctacaatgggttgtccccaaacatctgtaactccagttccaggagcccccacaacctcctctggtttctgtaggaacccagtgtgtacacaatacgtgtttatacacacacacacacacacacacacacacacacattaattaatattaaatcattaaaaaacaaaacacaggtagaagcaacataaactgtgggcattccgtgtaccctagtatcagcaaagaggaaactggggtacagggagctatgcaactaacagattggggctttaggatgtgaagctagcagctgattagcagggacagggagaattaagggttggggaagcagggaggctgtcagggaggcctggggaccatgaccttgtgggtcaggaaatggatgctttctcacttgggtctcctcctagagacacccatgtttccaggggctcaggtagagatggcgaagctagagactgggagatccccaaagctggcacaataacccacataatcacataattcccgaggagatctgcttaggcctggtccctcagagccttctgtgctcatgtgtagcaggccctaggagacacagccccacttagctggcttcaagtatctgtgatctgtggcccctctgcctcttgggcccttgggtccctcttctgtggagtgccatatgagggttgcataaggctgtatgctggccgtgggaacctcaagcagtctgttgccttcccagatgccccacacaaggtctcccacaatgcatctgtggacatgtgtgatctcaagaaggaattgcagcagcttagcaggtacctgcagcaccctcaaaaggctgccaagcggcccaccgcagcgttcatcagccagtaagtgtggattacctaactaggggatgatggaaggtctaacctgggctaggaggaactgggaaatcttctctgaggctggaccttcctcattggctcctgctgggttgtcagtaaagacagatactaatgcaatgcccggcctcttccctacaagagactccatcctggagtctggcacgttgagttcccgagagaggtttggacatagcataagtgggacataggcatgagctgaattccaaagtactgtccctcgctgccactcccttgaatctgcatactcagctgcctgtgtcctttgtcctcagcaccctctcctctctgttcctgtctatcctgtgtatctagaccatcaccactacccccttccctctgtcacctgccatgttctcccccacaccaggcagttacagagcctggagtcaaagctgacctctgtgagcttcctgggagacacattatcctttgaggaggaccgggtcaatgctacagtgtggaagctgccacccacagccggtctagaggatctgcatatccactcccagaaggaggtcagtgccctagggtggggtgggctagaagggcaggcaggagcactccctacagcatagcggtaacccttgttttcccctgggtctggggacaatccacagcccacagggagagctggtgtctgaagatccaggttgcaagaccccactgaagacctcttagcctttgctcctgccacccgactccctggtctcttgtggggtggcccagagcccagtgtttagaagggggttgtttggcgtgaggggggaatctggggtgtttgctgggccgggaactgaggatcctcgatatgcaggaggagcagagtgaggtccaggcatactcgctgttgcttccccgggccgtattccagcagaccagaggccgtcgccgggatgacgccaagaggctcctggtagtagacttcagcagccaagctttgttccaggtacggagtctcctctcacctgctcctagggtaactgataatacacacacacacacacacacacacacacacacacacacacacacatatgcaaatatatgtatatgggtatatatatacatatatgtgtatatatgtatgtgtatgtatatatatatgtttacatgcatatatacatatgggtatatacatacatacatacacacacacacacacacacacacacacacacatatctgacagaggggtggaaaggtggtagctaacctactccaggagccaaatacaggcaggaagggccctccaatgcacagagctcctaggagaggtgtgaatagtgctgttctcatccagtgtgaatgaccagcaagaccctcagagcaaaatgttaggagcgacagtagtctagaaagggtgggcagaggccttcttagcttttcttcttctcagccttaaatctccaacctgtcccccctacccccaacctcatctatctaggacaagaattctagccaagtcctgggtgagaaggtcttgggtattgtcgtgcagaacaccaaagtcaccaacctctcagatccggtggtactcaccttccagcaccagcctcagccagtaagtgtgagcaagccaaccccagggcaagggtcccttcctgctgggtcacatgtctgcttcctgtgtctcccaacccacttgtcttttatggaagggttgcccagcagccagctcccagattgggggcgggggtggggactgcaaggtgggtagtgaggtgaataggaaggttaggccgtaggagggaatgcggagggtgggtgatagagggaacatgaaagatgagcaaagagaacacagagtggtctatagagagaaaacgcagggagctggctgtggaaaggaacagaggctgagttatggtggcccatgcttcttgtccccacagaaaaatgtgactctgcagtgcgtgttctgggttgaagacccggcatgtgagtagggcgggggtctctaggggaacaagtatctggaggaggcatggagttctgttggggtaggagagaggagaagccccagggatgaatttctggagaagatgggcgtaggggaaaggtgcgacggaggccagggatctgctggtggtgcaaaagtttgcaccaatgacccagtcttgtgtggagtgcatggtgggtggggtcttgaggactggggttgaccagggtcctgtgctttcccctcagcaagcagcacagggagctggagcagtgcaggctgcgagacagtgagcagagacacacagacatcctgcctgtgcaaccacctgacctactttgcagtgctgatggtaggggtctccccgagatccccctgcagtcccgccacaggccaagcctatgtcctgtgtcatgtacttggaaccggcttcctcatttaatcccaaataacctgccaagatagctctgatcaatcaccctatttcaaaggatgctgaggctaagtactgtatataaggctgcacagtgttggtgtgtgacgaacgtgcagattcctgctcccaacccacaggcctgggccagcaaactgtttcctataggcccccaactggaagccactgagatgggctcttgcattccccaaatatcagaggctttgttgaaaatatgctaagtcaacaaaggcatagactctgcccgaccccagctctgctgagcacagtgggtgagcatctgctaggtctcagggctgatgtagcttcagtggtcctaggagatctcaaactctgagccgagcttctactgacaactggggcttgagtggacaatccccagctaaagctgccccccttagggctttgtggggttcaggcctggcctgagcctacttcttgggcgagggttcctgtggtgtgggtcagagacttactggcatgggaggaagacaaaagggtattcatgtgggaggggctggctagctcccagctggccaggaacagatgctagccccttggaggggaccgtgctgagattgtcactctgtccccatccaggtgtcatccacagaggtagaagccactcacaaacactacctcacgctcctgtcctacgtgggctgtgtcatctctgctctggcttgtgtcttcactattgctgcctacctctgctccaggtaggccaaaggaagtagagtggacccatttcattcctatagactaggactcgtaccgtgcaggcttgcttcacccaaaatatgtgcgttgttgggaagctatgggtgggctctctgctgaccaccacactctgtggccgtcggaccccaacaataacattagttaatccagcattagcactgagtatctgcacagtcaaaatccaaactgcagnnnnnnnnnnnnnnnnnnnncgagcttctactgacaactggggcttgagtggacaatccccagctaaagctgccccccttagggctttgtggggttcaggtctggcctgagcctacttcttgggcgagggttcctgcagtgtgggtcagagacttactggcatgggaggaagacaaaagggtattcatgtgggatgggctggctagctcccagctggccaggaacagatgctagccccttggaggggaccgtgctgagattgtcactctgtccccatccaggtgtcatccacagaggtagaagccactcacaaacactacctcacgctcctgtcctacgtgggctgtgtcatctctgctctggcttgtgtcttcactattgctgcctacctctgctccaggtaggccaaaggaagtagagtggacccatttcattcctatagactaggactcgtaccgtgcaggcttgcttcacccaaaatatgtgcgttgttgggaagctatgggtgggctctctgctgaccaccacactctgtggccgtcggaccccaacaataacattagttaatccagcattagcactgagtatctgcacagtcaaaatccaaactgcagggcacacagggtaataacacaatgataataagaactaggggacttctcatggagtgtccacatgcctcacactgttcaaagagggcagcagactttgagacctcacagggagggagtgacagaagttgtccaattatcagtgtttggtatagcctccattaaggtctgctagaacctgggcctgcctgagtggaggagagacactcttggctgtgggtcttcagttgtcctgaggaaggagtaggggtggagctgggaaggagtaggggtggagctgggtacaggtgggctgtaagcaggtgcatcatagccaagtgcatccgcaggtgcacactcccaaggctggccaggtgctttgtggagggtgaggtaggcaaagcactgagcacagggccaggggcatgggaactagtaggaaatgcagagcttcctgcaccagacactttgccagatccatcctcctgctgtgtagaggaggaggcattctgaggtggactggactagcccagggcagtacagaagtcaaggatagtaatgtcggggccagtgtcttctggtgaaattctggaactccttagaatgccgtggtacaggtacacactgtgctagtgggcagatatccacagctgctcagagccacatggccagatagctatggtgcagacatgaaggcctcctggaagagggggagagggaaggagggaaggggggggggaagaggaatatgagaaaggggaacaggacagggccatgcccctgactctgcccctgcgctggcctgctagcccatgctcacgttctccctgtaggaggaagtcacgtgactacaccatcaaagtccacatgaacctgctgtccgctgtcttcctgctggacgtgagcttcctgctcagcgagcctgtggcactgacgggctccgaagcagcctgtcgcaccagtgccatgttcctgcacttctccctgcttgcctgcctctcctggatgggcctcgagggctacaatctctaccgactggtggtggaggtcttcggtacctatgtgcccggctatctgctcaagctgagcatcgtgggctggggtaagtggcagggggagaggggaccccagaacccactgtctcatctactacacactaggcttcgttcaggccaagcacagacagcaggttctgccctcccccgttagggaatcaagcagttcctccagctggactgggggcatggactttagtagagactccaagatcccccacaaacctccgtgacacagtggcattttgtcttggctggtgataacttagttcacctgtgactcagactactcaagtcagactgaggcacagagtttcatgcataatcattttacacagttnnnnnnnnnnnnnnnnnnnntattcatgtgggaggggctggctagctcccagctggccaggaacagatgctagccccttggaggggaccgtgctgagattgtcactctgtccccatccaggtgtcatccacagaggtagaagccactcacaaacactacctcacgctcctgtcctacgtgggctgtgtcatctctgctctggcttgtgtcttcactattgctgcctacctctgctccaggtaggccaaaggaagtagagtggatccatttcattcctatagactaggactcgtaccatgcaggcttgcttcacccaaaatatgtgcgttgttggaaagctatgggtgggctctctgctgaccaccacactctgtggccgtcagaccccaacaataacattagttaattcagcattagcactgagtatctgcacagtcaaaatccaaactgcagggcacacagggtaataacacaatgataataatggtaatggaaacagaactaggggacttctcatggagtgtccacatgcctcacactgttcaaagagggcagcagactttgagacctcacagggagggagtgacagaagttgtccaattatcagtgtttggtatagcctccattaaggtctgctagaacctgggcctgcctgagtggaggagagacactcttggctgggtcttcagttgtcctgaggaaggagtaggggtggagctgggtacaggtgggctgtaagcaggtgcatcatagccaagtgcattcgcaggtgcacactcccaaggctggccaggtgctttgtggaggctgaggtaggcaaagcactgagcacaggggcaggggcatgggaactagtaggaaatgcagagcttcctgcaccagacactttgccagatccatcctcctgctgtgtagaggaggaggcgttctgaggtggactggactagcccagggcagtacagaagtcaaggatagtaatggtgtgggaccagtgtcttctggtgaaattctggaactccttagaatgccatggtacaggtacacactgtgctagtgggcagatatccacagctgctcagagccacatggccagatagctatggtgcagacatgaaggcctcctggaagagggggagagggaaggagggaagaggggggaaaaagaggaggatgagaaaggggaacaggacagggccatgcccctgattctgcccctgtgctggcccgctagcccatgctcacgttctccctgtaggaggaagtcacgtgactacaccatcaaagtccacatgaacctgctgtccgctgtcttcctgctggacgtgagcttcctgctcagcgagcctgtggcactgacgggctccgaagcagcctgtcgcaccagtgccatgttcctgcannnnnnnnnnnnnnnnnnnnctgactgtggcagccttggctatgtgctgttccctcccccaatgaactttctatttctacttataagtgcgtcaataagaccaaggcaatgtcttctctactagagttgtctccctgccctccccaccagccccatcatcccctcatctccctgactgaccatacttccacagtgtaccacaggccttttctcctgggagacccaggaagggacagggaaaagttgaaagagagtctacccattatggaaacagaggggacctacccaggcccacggggatcagagaaaatggactcagagggtggactcagagcttcccccttgctctctgcaggttttcctgtcttcctggtcactctggtggcgttggtggatgtgaataactacggccccattatcctagctgtgcgccggactccggaacatgtcacctacccctctatgtgagtggctatggcaaggacaggaatgtgggtctcgagggtcgggcagggacagcagccttaattggccaggttgtctgggagctatgggctccagtatgctgcaggaataggccccacaatggtcagagcccgggattaaggaccacagggacaaggagaagccaagtctgccctttagcagtcaggtgcctgtgcccagagccgggcctttctctgagcctcagaggagaagtgttgggctacatggtcccccaccaggcttccttctcacatccattggttctgaagcagatggaagtctgtggtgcagagagcatgaaccacttgtaaccacgccgtgattactatgtggcaccagctggcaggggacatcctgaaactagacctgaggagccagggtgctcaagccccaggtcagggaggaatgctttcccctggctccaccctgatgacatagaaccccaaatgtcccccttcccccacgccaggcctggttgaggcttgccccaaccttgtactgtcaagaacacggcttctttaacaccttccttaaagttatctgactgggtaactggatgccaaagatggctcagggcttaagagtgcgtactcctcctgcagaggacctgagtttggttcccagcactcaaaccaggcagctcacaaccatctacaactccagttccaaaagattggatacctctgagttctgtgtcctccgtgtgtaccagcacacatgtgtacatatctgcatagaggcacatacacataattaaaaataataaaaataactatatattttaagaaactaacttttaagatgacaggaggccagtggtgcttgtcactagtgaatggtcccaacaccacaccctgcaccctccaggtcccgctgttcactctcctgagctgagctgtttcattcttgtccaggtgctggatccgggactccctggtgagctatgtcaccaacctgggcctcttcagtctggtgttcctgttcaacctggctatgctggccaccatggtggtgcagatcctgcggcttcgcccgcacagccagaactggccccacgtgctgaccctgctgggcctcagcctggtccttggcctcccctgggccttggtcttcttttcctttgcttccggcaccttccagcttgtcatcctctacctcttcagcatcataacttccttccaaggtaggcatgatgagggccccgcccctactcagtagcccttgtccctccagctggtggtaggtaggctttccatatgtggagcgggagggggagagatgccctagggacccccagatgctcccttctctgggcctcagctgtcacagtccaaaatgagcacatgcaggccacacacaggacaagcctctgctgagcacttacttctgtgtcggtcctatgagaagcccctgggttccagcatgagctgaccactcagttctcatgagggggacagtagagtcaagaaagattgaagccaccaaggggactcagagtaggagagttggcaatgacaagtgttgcacccggggcccagtgcagacagtggtcttgcgtcatcagcgtcagcatcacaggggaccttgttggaaaggcaaactgtgatccactctggcccaccgatcctttctgcatcttagcaagatgcccagggcatcctgcctataacaccagtcagagagccctggnnnnnnnnnnnnnnnnnnnncccctccgggaggacacatgcatggcgtccgctcacgatgtctgtggcccagtgctgtgcccacccagcctttgttggttagtggcatactagagaaggccctggtccttgaaggcgtagggctgttgctctggtaggtagatacctagcttgccttggggacgactctggtcctcaaagggctcagaagcacactgccattctgtttgtggggccgtttcagtctggagctaaggccttgtctttctggccacctctgggtccagctgttgctgctgggtgttgagacctgcagacccaagctggggttagatctcgaaggaggctgacacatccggcctgagacacagctaactgtcttgacttgctgctctgtctctgtggtcaccatgcagatcccgagggtggcactgggggtaaatgttctgggagaaggtttggaggcagagcaccttaggagctgagcatctcccccagcctttctgcaaaccctcctcttcattccccatccccaacccctcctctgtgttcccctaaccctccacctgaagcctggggtcctagaccaatgctgtgatttggggtggtagttcccagcagtttcctggtgccagctatcaacttctgtctgttgtgtgggctttggcctctgactcagggcaggtttctgtctgagccctctctccaagctgcctcacctttgctcgcacctcagagggacctccatctctcctgaagcctcctccctctggcaagtactgggatacagccaccctttcaacccagcactctgaagaccaagacagccccctctggtgacactggccaagcttgatctttttcctaagaagtggtcttcagatccctgcaggtcgctcagaagacactgggctgcctagtgtgaattctgtcctactaacgtacagtgagcagctcctcacccccacccccgcaaaagctctcaccaagtcctggagtgtcaggcagggggctggaaatccaggaggacttcctgcaaaaggcagcatttcatcttgacctcagccttcaggttggggagaatgttctttttaaataccagttcatttgtcttttgatattaaagctctttatagagagtctggaaactgtaggcgattgtcgagaagagaaataaaaatgagctgttatctaatgccatggcaaagcagcacagtttggagagttgcccgtctcagttttgtttgggtttgtctttgtttttttgtttttttttcctcccacttctgttactagtgttgctgattcaggagtcttggggatgatcaggaaatggccaagagggaaatgtgacaaagaaggcatctgaggacactttctcaggagaacaagagaaatggcccactggtacctcctcgggtggtgccgggcagaggcccgtcaagaataacccggagatcctgaccatctgctgcagatggccattgctggcgtggagggagacctgggtagccacatcagttgcctttcatggggaaaccagactggttcatcaaagccattgatcttacaatgttggcatatacaaaaccttccgtagccaaagaggtcactcttgagagctgagttcagattttaactagtcaggtgatccaaggaacagtttggccatcagtctggagcagctgggctgtgagaaatgactcaggttttctcccagcgtctagcctgctcctcaagtcccttctcccacttatgtggcacaggttagacatgtcccaggtgtctgtctcccttgggttatatgtgattgtccccatctgagttcaagtacaaagaggtataaaaagcagggtgtggtggtacctgcagtcccagcacttgagatgctgaggcaggagattgagagttcaagaccagcctgggctgtatagtgagcctctcaaggagtgaggagaggaagctaagtcccctttattcgaagtctgagattcgcccaggtccacagccccaccccagctcccaccctcagcccctgctgtgccaggggaaggtgggggtactctggggcttgacagggtgagtggaacactgccttggcagttctaggtataccagcagttcccacagcatggcacagatgtgacagatttgagacctgtctggactttggcccgtggaagccccatgtctctctccatcttcctccacaactctggtggcctctgcttttactttggagttcttttgtttgtgtgcttgattgcttttttttttttttttttggaaggggggggcagggtttctctgtatccctgcctgtctggaactcactgtatagaccaggctggtctctacctacctacctacctctgccttttaattgctgggattaaaggcatggaccaccatgcccaccttactttggagtccttatgttcctccccctgcggaaagaaccagactttcccgagcccctctgctgcgtgtcctggcctgacatcccccctcctctcacaggaagaaagcctccaccccaatttcttctttcctaacctctggttctgaggctggctcagagaaggagatgggacccctgatgtctctgagtcttctttggcccgagtagttctttctaggctgaggatcggtagacaacacacttaccttcccattaaggcaagcaagagagtctctaaagacacgtttctgatctggatacagtcaggtgataccggctggcctggcaaagggcttgagaccttggaataagctgcggtgacaggagataggatgggacatgactgttatgttagtcctgaaatgtgggggcccagggctctgcaaaggatctcaggctagtacctagctagtctcactgggtccttctagaagctctgcagggcctggctctcccacctctctacctcccagggacactgggcactatgcttctgcctgcaggtcaccaaccttttttttttctctctcatgtatccatgagacccatggagccatatgagacacaacccagcatatcaggaaccaccgtgtcacgacatccttgcctgaggttgggagagacgccacaagcaattaggggaggctgactcagggcagagcaggcccagtggctcccatcttcctgtcagaggaagctcagggacacaggaacttctggattctgacctgggactccaggctctatccgtccccacccccaccttctacagagcaagagtgacctgtatcccttcccacaccccctcagatccaaagggcccagcaggggaccatgtgaaaggaaggagagacagatgatggttataactggacagctccccagaaagagcagagctagctcagtcctaagggggtgtcggtaacaggtgacggtattgaggctcttttacccatctgagtagctgtggacaaccaagggcctggccttctccatgactttcttggggtcagccgactggtaggctccacctcttccccaggcatgtgcatgtgtgtatgtgtgtttgtgtgtatatgtgtgtatgcgtgtgtgtatgtgtatatgtgtggttgtgtgtatgtgtgtttgggtgtatgtgtgtttgtgtgtatatatgtgtgtttgtgtgtatgtgtgtttgtgtgtatgtgtgtttgtgtgtatgtgtatatgtgtgtttgtgtgcatgtgtgtatgagcctatatattccccatcctcctgcctggaccagcannnnnnnnnnnnnnnnnnnnnnnnnnnnnnnnnnnnnnnnnnnnnnnnnnnnnnnnnnnnnnnnnnnnnnnnnnnnnnnnnnnnnnnnnnnnnnnnnnnnnnnnnnnnnnnnnnnnnnnnnnnnnnnnnnnnnnnnnnnnnnnnnnnnnnnnnnnnnnnnnnnnnnnnnnnnnnnnnnnnnnnnnnnnnnnnnnnnnnnnnnnnnnnnnnnnnnnnnnnnnnnnnnnnnnnnnnnnnnnnnnnnnnnnnnnnnnnnnnnnnnnnnnnnnnnnnnnnnnnnnnnnnnnnnnnnnnnnnnnnnnnnnnnnnnnnnnnnnnnnnnnnnnnnnnnnnnncaggttaggtttgcctctggcctcattcataggctttccacatctttggcctcatgggtgtgcttggctggttacaggtctcatcaaatccagacactgacaatcagcctgtgtatgctctgtggaggatgtaaataagccgataaccagcccaagcacatgatagtaatcacttctgtgaagtgacagtcacccttccccctcccccaagatggtcactgctggtccaggcaggaagaaaggggaccacatacacacatacaaacacacatacagaggcaggaatgagtctcagacacccttgctagggagatggggaaggtatgactgactccaagtcttagggtttcgctgggcagagacacctatggctgctgggctcctactccagcatccactcatacagtggtggaaggttagcccagttccctctgcaggtggtctcaggagcatttgagatccagagctccgcccagttcctcacattcacctttcacaacccctcgatggcgccattcattggtcaggaagaacgagaaagaggccacaggaaacagtggccgcacgtcagggggcaggaagaaggtcagttggacagtttgggactgagggaccacacagccatagaacttcgctgagcactgatggcgacagccaggagtctgggcctcctgttctttctgctgctgacttcaggtgagcgggcggggctcctctagctatcctgctaagcctgggagactctgtgctgcaaagggccccaggggagcatgggaagagacccagggactcgtagtgactccctcatcatcccttctggccttgtccctccaggtcatccctgtccatcttgctgggtctcaggctcctgttgtcaccccatagtgtattgtcggtgggcaagaaagacactgcccatctgttctggctggaaccaggttcttggacatggtgggtcaaacaagctattcagttctgggctccaggcaaaggcatcagaggccctggaagctgcctgtaagggcggacagctgctctgcccacatagtccatccatcacaggctccccgttcctgtcggcaccattcagtgtcatcagtgacaggagacgggacccagagcactcccatcacatacagctcaacttaatacaccgacatgagattcccagtcctgcctctacccaagttgagcctgctacccccctcacctccgtagatggctatacccttcttgactgttgagagatggctatgtggagtgatgaggtgctcccgtctccatgccccgcctctccttgtttgctccaactttggcaagtatccttaggtgtctgcctttctgagtcacttatggacaagtgactagtcacacagattagcatctcttggttcagaagaaaaaaaaatctcttctcttccaatgctgggacagtcagtcaaggatagagttgagtgtctgactcagaggtggaccaggtattgtgacatatacttgcacttggaaggtagagaggcagaggatcaagactttgagttctgtttcagctcatagtgagtttgaagccatcctgagctattggagatcctgagtataaaagtgggtagaaattgacagggctgtctttcagcagagcaggcaatgctggacaggccaaaaagactcctccgaatggagatgtggatctagtagtggcagggatgctcatgactgggcaatgtgtcagtcacctgagtgacataggaggtagcatcggatgccttttgtccatttacctactggctctttgcttacatacccaagaaatatacatggtgctaaaaagaggcacaaaagtggtagctacttgcctgagggaggctcttggcaccctgagtctgaaggctgaggaatgggctagccccaggtattggctgcagaagggaaagaggctggcagtaagtggagggagggaggctgaagggacaaggggcagggtatagggaacatatgggtcaccttctggcctctgacctcctgcctgccctcacctgctgcatcccaactgttgaactcacaccaaggcgtccaaagtcctcagcaaacacccttgagacacagcacttcctaagatcttgagtttgaggctagcctgggctatatcctaaggacaaagcggggtggggagccacaagttggatgtcaagagcttcccttaggtatccctgctgggattcccagcaaggtggaggaaagctgtattcttacctaccctgaggccatccccccctttcctaacccttgacacccccctcccccatggagtccttcttcctcctctctaaccctccttagatttcatgtgaatgcaaatagggccgatctcagagactgagcctagcatctggtctcagtgcatcttataagctccacatactatttgaaaaccgaagcaaaattgaacaacatatagacccaatttctataaatatgctaatatgttcttccctgttcactctttgtcctgccatgcctttatcatgaattttattttctgtactaatatttgaaaatgaaccagctttctttaaatcggaagtggtaatgtccatgatatttttcgtgggtttttttgtttgtttgtttaagatttatttatttcatgaatgtgagtacactttcactgtcttcagacacaccataagagggcatcggatcccattacagatggttgtgagccaccatgtggttgctgggaatagaattcaggacctctggaagagcagtcagtgctcttaacctctgagccatctctctagctccaatgatattttttcaatcaaataccagcaaaggatatttaaaaagtatcaaaaacaaaaaaacaaaacaaaacaacaacaaaaaacccacaaaaaccaaaaaacaaacaaaaaacccccaaaccaaccaaccaaccaaccaaccaaacaaaagtcacaccttagtcaggtgttggtggtgcacgcctttaatcccagcacttggaaagttgaggcaggaggaactctgtgtttgaggccagtttgacctacatagtgagttccagagcacccaggactatgtggagagactaactctgtctcaaaaaaaaaaaaaaaaaaaaaaaaagctacatcctccagaatacctcagatggtctgtgtgctcaggtatattatctcttttcatctctaaaacgtaaagggtgagaggaccaagcgcttgcgtaatttgccagaggacaaacggctaagcagggacaggaagcttcctgcattccatagcacagggctctgcaccagaagtcacggaactggtctctagtcctgaagcaccttccaacatgggctgactactccccagcctcagcctgctgcagcctttacccagtccaggcaaagatgggaggctaggacagagccagccacaagacttacaagagttagagaatcggccgcggcgcccgggtgcctagcctgggaggatctgacggagcaagggcaggaaaccaggcaggctctgtggaggatgtggctgaagagccacagttctgagagataaaacactgtgcactgccaggcaaagcctttgtctggagaaccacatgccacgtgtcgtcatctcccacccccacccccaaccccacccaggccctgtgaggtgggaatgccagttctcccctgagaactccgggactggggagggtggagtctgccggagtgcccctagctgggtgatggaccagctacctctcctaggccactgcccctctcccacttgccccatctcaccccacttcctcccctagatgaggagaccacggaagagccgaggaatgtctgccgtcggcttcaggagggccacgagtatgacaccttcgacttgaatgacactgctcagtgtttcaccaagtgtgggcaatcggagcacagcccctgtgacgtggggaacctgcagaggtgagaggagaggaatctgggcaaatgggaggagtggcctgttgggaagccatactgtcataagttctcagcgccctagaatagcatgctgttcccctttcaccctttcatgttctccctaacctggccctgccttggtcatcagagttgctactgattaggacagtggttctcaacttgtgggtcttgatccttttgagggtcaaatgacccttttccaggggtcacctacgacagttgggaaacacaggggaaggactttggggtatacaggacagctttctggtgaatccacacagtggtggataatgtagctgcttaatttcatagtactgggaaagaactagagtgctttggactgtaagcatgcaaagaggtgcgggggacagaggtggcaatgtcgagatgagatgagggccggggggtggggtgggtgttcagactggaaacgcaagcaagaagtcaggggtgaaggaccaagttaactagacaattatgggaagcagagagatgatgtattcaaagttaagaagggtgtggtcaactcgagattgattgcttggacttcagggacatccaggggtggtgaccaacgtggaggtgtgacccattagggtggaattctgctggtactatgaagctgctcaggaaagatggctcaggcaggcttcatgggaccaagaagctggctagatggggcaagggagacaaagctccctggtgctgtccctgctggagtcacagttgacacactagctctgcctctctgctcttctctgggctctaggcagagggacccaaagctcacctgggataccacagaagtgcccagcttacagtcagaactcagaaaatggttgttgaagggaggaatgaaaaatctctgctcaagtctggctattaagacggtgtttatattgaggttcattctttctgtggcctggaaatgccctgagtcctgcctacagcttcttagacactgtgaatgaagcccagggtacctgtgtgctcatgtcctggataagcaccttggagagagcaggtgccttggttctgaagggtgtggtctgctccctctccatacttgggactgaagggtgtggtccggttccactccatcccttcagtttgcccttttctcttcataacaacactatcttcagctacttctcttgcagctgtaactgggtacatggcaggagcagcctaagggaggggagggcatggtgaatggagaggctccgtccccggcagcagaggcttacagcatgatgagctcatacacaccttgtcagggaggaacacagaagcagaagagaatgggaagcagctctggctatccttctacatatgccacctagacccagcttctcaaaggctccatgatctctgaaaacagtacaccagaggaggttgaaatattgaaacacatgaacctatgaggaccatgaaaaatgccctgaggtaggtcctgttatcaacccattctcagatgagcaaactgaggctctatgctgtgaataacttgcctgtggttacacagcaggtaggaggcaaaattgataggagctgatatagaagtctcagcggaggcacttgatgtgacaggctggacccagactgccagtgctcaggtggcttccagtatacctgtctgtaaaatgggatttacaggatgatggtggaggctaaataattctgcacttgagagccatggtaaccccgccatcctcactgtcagaacgccatgccctcaagtgcctgctcccaacctctcaggcttcctcatagtatcactgagggaggagttattagcagatagcaggagctcaagaaatgttagtgtgctttatttcaacggctgtcttgattataaaagtagcacatggtgggcatgatggtgcatggcattaaggcagagcaggtagatccctgagttcaaggcctgctctacagagtgagttccaggacagccagggctgcacagagagagcctgtctcagaaaacaaacgatgacaaacggtgatacatattcattgggaattcgctatagaaaggaagtgagaatttcccttaacccatcagccagagacggctgccatcttcatccggatgtgtatctttttagcatcttacaggacatataactgacaacttattttgtggtgtgggtggctcctgcttttggacgttcttggtcatgtattgttgtgaacttgtattcctaggcttggaattcgtgacttgggggggcggggtgggattaactctagcagaaacaggctagagtagtcagatcagatttcactcctgcaggcagaaggtgacattccagttgccccgtggccttgacaacccctggtcttgtctgcctttctcctttagccatccttaagggtttctagtgcacctcgaggtgactgtgatgaccgacgtcaagcgcctccagttatttctttcatatcttaacatctctatttctgtttattggtctataaagctgttggaattttccatagtgattttggggatcctttatttgttctgcatgcgtcttcgtgaatacacatagagaataatcttccttttcatgggcttcccgttcacttccgcagcactgtcttttgaccactgctaaaggttttaattttagttagtgtaatcgatcagatctttagatttactttaagtattggtgtgtgtgtgcgcgcgtgcgtgcatgcgtgtgtgtgtgtgtgtgtgtgtgtgtgtgtgtgtgtgtgtgcatgtgtgtgtgtgtgtatgcatgatgtgggggaactaacatgccacagcatgtgtgtgtgtgtgtgtgagtgtgtgtgtatgcatgatgtgggggaactaacatgccacagcatattctcgaagtcagttctctccttccacctttacatatgttctgagacttgtgacaaacacctgctccctgagccatctcaccagccctattgcctgttactctgttctgttctgctcttctctgtctgttttctattctaaactaggcaggcatggctgttgaaacatctttaatccccaaattcaggaggtggaagcagaggatcaaagagaccaagtccatcctcaggtacttggtgaatgaggccagcctaacctagataagactagactctcacagacaaaaagagaagagaacaaaa

SEQ ID NO: 330 - DNA, 2865 bp, Mus musculus
agacagcgtgatcccggcctcccacggggcagcttttactgtctagggaagaaatccccaaagtccatggagtctgaagactctgtcaagcctcgctaggaaacctaggagttttagagggcacttggcaccggaagctagccgggtaggcggagcctcacctggattgagttcacagctgcctagacaggctcagactaggtgctgggcacctggaaggaggaggagacattagcagcaaaggctgttaacagaagtgcctgcctaggcttggaggcaagacgctgctgttcacagtgcgagacggaggtaggagtataatggctgtccaggtgctgcggcagatggtctacttcctactgagtctgttttctctggtgcaaggtgcacacagtggcagcccccgagaagacttccgcttctgtggccagcggaaccagacccaacagagcaccctccactatgatcaatcttcagagcctcacatctttgtgtggaacacagaggagaccctcacaattcgtgcccccttcctggcagccccagatattccccgcttcttcccagagcctagagggctctatcacttctgcctctactggagtcgccacactgggagactccacttgcgctatggcaagcatgactacctgcttagtagccaagcctccagactcctctgcttccagaaacaggagcagagcctgaagcagggagccccgctgatcgccacctctgtcagctcctggcagattccccagaacaccagcctgcctggggctccgagcttcatcttctccttccacaatgccccacacaaggtctcccacaatgcatctgtggacatgtgtgatctcaagaaggaattgcagcagcttagcaggtacctgcagcaccctcaaaaggctgccaagcggcccaccgcagcgttcatcagccagcagttacagagcctggagtcaaagctgacctctgtgagcttcctgggagacacattatcctttgaggaggaccgggtcaatgctacagtgtggaagctgccacccacagccggtctagaggatctgcatatccactcccagaaggaggaggagcagagtgaggtccaggcatactcgctgttgcttccccgggccgtattccagcagaccagaggccgtcgccgggatgacgccaagaggctcctggtagtagacttcagcagccaagctttgttccaggacaagaattctagccaagtcctgggtgagaaggtcttgggtattgtcgtgcagaacaccaaagtcaccaacctctcagatccggtggtactcaccttccagcaccagcctcagccaaaaaatgtgactctgcagtgcgtgttctgggttgaagacccggcatcaagcagcacagggagctggagcagtgcaggctgcgagacagtgagcagagacacacagacatcctgcctgtgcaaccacctgacctactttgcagtgctgatggtgtcatccacagaggtagaagccactcacaaacactacctcacgctcctgtcctacgtgggctgtgtcatctctgctctggcttgtgtcttcactattgctgcctacctctgctccaggaggaagtcacgtgactacaccatcaaagtccacatgaacctgctgtccgctgtcttcctgctggacgtgagcttcctgctcagcgagcctgtggcactgacgggctccgaagcagcctgtcgcaccagtgccatgttcctgcacttctccctgcttgcctgcctctcctggatgggcctcgagggctacaatctctaccgactggtggtggaggtcttcggtacctatgtgcccggctatctgctcaagctgagcatcgtgggctggggttttcctgtcttcctggtcactctggtggcgttggtggatgtgaataactacggccccattatcctagctgtgcgccggactccggaacatgtcacctacccctctatgtgctggatccgggactccctggtgagctatgtcaccaacctgggcctcttcagtctggtgttcctgttcaacctggctatgctggccaccatggtggtgcagatcctgcggcttcgcccgcacagccagaactggccccacgtgctgaccctgctgggcctcagcctggtccttggcctcccctgggccttggtcttcttttcctttgcttccggcaccttccagcttgtcatcctctacctcttcagcatcataacttccttccaaggcccctccgggaggacacatgcatggcgtccgctcacgatgtctgtggcccagtgctgtgcccacccagcctttgttggttagtggcatactagagaaggccctggtccttgaaggcgtagggctgttgctctgagggacctccatctctcctgaagcctcctccctctggcaagtactgggatacagccaccctttcaacccagcactctgaagaccaagacagccccctctggtgacactggccaagcttgatctttttcctaagaagtggtcttcagatccctgcaggtcgctcagaagacactgggctgcctagtgtgaattctgtcctactaacgtacagtgagcagctcctcacccccacccccgcaaaagctctcaccaagtcctggagtgtcaggcagggggctggaaatccaggaggacttcctgcaaaaggcagcatttcatcttgacctcagccttcaggttggggagaatgttctttttaaataccagttcatttgtcttttgatattaaagctctttatagagagtctggaaactgtaggcgattgtcgagaagagaaataaaaatgagctgttatctaatgccatggcaaagcagcac

SEQ ID NO: 331 - protein, 686 aa, Mus musculus
QKCLPRLGGKTLLFTVRDGGRSIMAVQVLRQMVYFLLSLFSLVQGAHSGSPREDFRFCGQRNQTQQSTLHYDQSSEPHIFVWNTEETLTIRAPFLAAPDIPRFFPEPRGHFCLYWSRHTGRLHLRYGKHDYLLSSQASRLLCFQKQEQSLKQGAPLIATSVSSWQIPQNTSLPGAPSFIFSFHNAPHKVSHNASVDMCDLKKELQQLSRYLQHPQKAAKRPTAAFISQQLQSLESKLTSVSFLGDTLSFEEDRVNATVWKLPPTAGLEDLHIHSQKEEEQSEVQAYSLLLPRAVFQQTRGRRRDDAKRLLVVDFSSQALFQDKNSSQVLGEKVLGIVVQNTKVTNLSDPVVLTFQHQPQPKNVTLQCVFWVEDPASSSTGSWSSAGCETVSRDTQTSCLCNHLTYFAVLMVSSTEVEATHKHYLTLLSYVGCVISACVFTIAAYLCSRRKSRDYTIKVHMNLLSAVFLLDVSFLLSEPVTGSEAACRTSAMFLHFSLLACLSWMGLEGYNLYRLVVEVFGTYVPGYLLKLSIVGWGFPVFLVTLVVDVNNYGPIILAVRRTPEHVTYPSMCWIRDSLVSYVTNLGLFSLVFLFNLAMLATMVVQILRLRPHSQNWPHVLTLLGLSLVLGLPWALVFFSFASGTFQLVILYLFSIITSFQGPSGRTHAWRPLTMSVAQCCAHPAFVG

SEQ ID NO: 332 - DNA, 65387 bp, Homo sapiens
tctaaagctatgcctccgagtatggcgtgctttggggccagctgtgacagctggggagcagccctatgcacccccactacagtccaacatttggtttcagattctatttatatacattatgtacctagatacttgtgggtttgatttggttttgttttgattgcacaaataacattagaacagctataatggaaacaattctaaaatggaaaaaaaaaaaggcacgcacaatgctatcagttggctcggcttcctaaaagcactgcttaagtgctggcaataagccccgcactgtgctgtctatggttgatctcactaaagctgcacaaccacccagtgaggaagaaacctgtcacagatggagaaactgaggcaccaaggggcaggtcgcctcctcaaggtcacacagtgaggactggaatccacctccagggtcctgtgcttgccacctcctcagggctgcctcttcttgcctgtcatccctgccacctctcagcttgacctggaagcatcaatttgacatcactgttcactctgtgcagagcttttccaagtggcccctgggtagcagccctgtctttgagtggggaaacaggtccctgagacaggtggagacattgcctttgttttctgcttatttcactgaattttgtattacagtcatcccccaatacctgtgggggaccaaattgtaggatgctcatgtccctcagtcatgcccccaacgacttgtgcagagggccaactgtataagcgttttccttttgttgtgaccatatgaccatgagctggggggtgaccagctctctcagtttactggaactgagaggtttcccaggaggcagagctttcagtgctaagcagagacagtccccggcaaaatgagatggttggtgaccccagaggacaaacctgggttgtgctttctgagccatctcctggtgctgagcacttggaccgcttcagctctccacgggtcaggctggacagccctgtgaccacagcttgtcactggagtgtcttttcttcagggcccctcttgagtaggaggagaccaggctttgaaggttcctgagaggagatgtacgggacctgaatacagctttcctgacctgcccctcataggagcctgcagggaggtgagatggggacccaggacagggctgagggcaggcaagggccaggggtgtgttggagcttgctgttttggcttgcaagaactggtggttaaatttttaggcattttgtgagttggttgttaaacatagccactgttaagaattaaattacatacacaaaattaaattacagtcatgtgttgcataatgacgttttgggcaatgacagaccacatagatgacggtggtcccataagattatatgggtcatataaagaaagctacagatagcacttcatattggccttgcagatcaactagggggaaatgactgatattcagtaacggtgctgggacatttggttttccatgtaagaatatataaattttaaaatgcatcctctaggtttggataaatgcactctatgatgtttgcacaatggcaaaatcacctaatgacgcatttctcagaatgtgtccttgttcagtgactcatgactgtgtatttaaaaagataataaatactcagaatgaaacactttctgattattttaccaccatcattcgttgtaatggattgaatcctgttcctctttgccccaaattcttaagttaaagttctaaccctgagtacttcagaatgtgagcttatttggagataaagtctttacagaagtaagcaagttaattggcgtttattagcgtgggccttaatccgatatgacaggtgtgcttacaaaatgggggaatcagacagagacacacacacacagggagggcaccatgtgaagatgaaggcagagatcggagtgaaatttctacaagccaagcagtgccaaagatggccagccaaccaccagaaaccagggggagaggtgtgggacagattctctttcatagtcttcaaaggcaccaaccctgccaacaccttgatcttggacttctaacgtctagaactgtgagagaatacatttctgatcaagccaccctgtttgtggtactttgctgtgatagccatagcaaatgaatccatctgtgctcttgaagttgccatctgttgcactggtagagtaaaaagaatggtgagcttctgtgcaccttttccaaatgccgtgttcgatgtttgctatcttgcaattggccgtggcagaagtatttatttattaaaactttttttttttggtagagattggggtgggtctcaggaggttgcccaggctggtcttgaactcctggcctcaagcgatcctcccaccttggcctcccaaagtgttgagattacagacactgcacctagtcagagagtattaaaaccacggaaatctacaaatgttacaaatcaggacttgctttgttgttttgttgattgtctagatagagttgagaaagcagtgaaatgttattaaggcatattccatgcaatcaatgtgtcatgtctgtagctgttacatcacgaacagcacaaacaatttgaaaaccatgatccgattcagccaactattcaaaatctgtattcaaaatcagactcagcaaagattccagtatctgaagaccataatcccactcggcaaaaaattgctcacgtcattgatggacaaatgaaattccgacacgtatctttgttgtttccttttttttcttgttaatgtaaatgaaaatatcaatataggtatccaaacaacacttagagagcctgttgtcaatatttagcagcccaccactaatgtggggcggaggaggccagctctggcccgcccaggactgaggggcccaaggctgcagggcctgcacgggtgggtggaccgactgcctgcgtttcagctgctctgggtggaccagttccagtgtctcctccctgggagtggggtggggggctgccttcctaccctctaccctgggaggcttctgcagggtttctgcttggttcctagtgatctccggctatcaggaccctgtggtgttagcagctgaatttgtttttcttttctttcttttctttttttttttttttttttttgagaaggagtctctctctgtcacccaggctggagcgcagtggcgcaatctcggctcactgcaacctccacctcccgggttcaagcaattctcctgcttcagcctcccgagtagctgggattacaggcgcccaccaccacgactggctaattattttttgtatttttagtagagacagggtttcaccgtgttggccaggctggtctccaactcctgacgtcaagtgatccgcctgcctttgcctcccaaagtgctgggatttaggcatgagccactgcacccagccagcagttcaatttcttgatggggaagtaagagaagaaataaaaaatcaatgatgtaattaatcaagtaattcaataaatatgaaggcaaatacatgtaatgaaagggcaatgaaaaaagcaaactaaaaaaacaaaagagtggagataattatgcctggtctggcatgcaggagaggctgctaggcctagcattgatcgatagcctttatcttgtcagagcagggctgagtccttcagctaccctccttgaaatataaatcgatcccctcactcccttttgaatccacccatggcttcctgcttccctcggactaaaattatacttccgttcctgtcttcacagcccggctctttgccctcatctcctttgcctctgtgctccagtcacaattaccagatcctagtttctccaacatgctgaggatattcctcactccgagcctttgcacatgctgttccttctgtctggtatgctgagccccaggcccactctttccacggctggctcctccttatccattaggaccttgttacaaacatcacctcctccaaggagccttccctaattacctggctaaagtgcattccctatttcatttcatcttcactcttttgttgtttaggttgctttttaaattgccctcccattacatgtatttgtctttgtatttattgaattatttgattaattacttcattgattgtttaatttcttaccttacttcctcatcaagccatcagctccatgaaggcagggatggtttctgggctctgtcaggtatgcagagcccagcttgaggcctggcacttggtgggtacttaggaaatgttcgttgaatgaatgaataaaatacattcactgagaaactgtatgacctagagataaatcatggacctatggtccaacagagatatggattcaagtcctgccactggcacttattgctggtgtgctctgggacaggttcctaaatctctttaggcctcagtctccctgtctataatcccctatgtaattcccttcaaatgattgttatggggattaaataaatcaatccatgcagttttaggaatgggcttggcacagagaggtgcttgggagtgttggatgccagtattcttataagtaaagggatgtgggactttggggttcaggggttcaggggttcagagcctgactttccataaaagaggacgggataactccaagaggagttcttggaagaaggggcatttgaactgggccataaaggggggtggatggcgtttctctaggcagagatggcagtagggaaatcaggagccaggagggacatctggtcccagaaagagatctgcgggcaggccaggcctgctcctggctggtcccagaaagagacctgcgggcaggccagacctgctccagggctgggaggaaagccactgggtgccagggatacgctcagtatgagctgccttgttctaggccacggcctctgcccccagtcttgacatttggttttcacctgtttcctctgggtagttgacacacagcagctgctgactctgaggaggcatggggaggcccagctgaaaatgcccccggaggaggtgactcagtagctcctatctcgaccctggcagaactcaggtaactcaagacacggggcaaacctgaagaggcccccagagctgtaccaggaaagctctgcagtgtcatggaacacatggaagtggcctgatgctactgactcacagaggcttggtggattgctttgagttgttttcggtcaccctccatctccttgtctgtaaaacggggacaggcactcctcagaactgctgggacagtccggggagccttttggttggcacagtgtgtttcagagtggttctctgtccccccgccccaggcatcctcatgtgattcgcttgaaaacacggcaggacgggtcctgtcattatccccgtttcacagatgaggaacactgaggctcagaggagggccctgacctgctcagtaccacatagctggagagtgatagatccagggctggagtcagaccccagacagtgcacagatggatgatcacatattgacggaacttgggtgtgaccacaggatacagagagtggagaactgatctgatgaactgactgcaggaggcagggtaataccatggcctagctagccctcacctcttttctagaaagcatggtgaggatgggggtgctgatcctagggctggctgcggagcagtggcatggagaccaccttccagatgtggccagaatggaggaaagttttcctattgctctaatatgaggaggcaacactgcagaccagaatgagttaaaaggtcagtaatttatttttatttttattttttgagacagtgtctctctctgtcgcccaggccggagtacagtggcacaatctcagttcactgcaacctctgccccctgggttctagcgattctcctgcctcaggctcccaggtagctgggactactggtgtgtaacaccatgtccagctaattttttgtatttttagtagagacagcattttgccatgttggccaggctggtctcaaactcctggcctcaagtgatccacccacctcagcttcccaaagtgctgggattagaggcgtgagccatttcgcacagaccaaaggttagtaatttaaattctcctctggattttgatgtggcagatgtttactgagcacttagccacgtgccagccatgggtggtagcacttagcattgtctcatttagtccttacaactccatggatagatactgctatcacccccattctgcagatgagcaaaccaaggctaagggagataaaccaaccggtcagtggagccgggtaccgacccagacggtctgctctagagccccatggctaatcacgcctctgctgcctgctctgtgggctgttttctaagtaaatctaaggccctggtacccagtagttgctgtgcaaatatcgggttagcggatgaatacatgaattagtgaaaaatggcccaagtaaaataacctgtgagtaggaggtgattttagagaccatttagtcctccctgtagatgtggtaagtgtcttatctgcaacgccctagctgcacaactccttggcttccctctgagacaggtagctcacccccgaccttgtgggcagcaccagctctcagagggagcagagaggctgagcccgcggccctgctggagcacaagatgtcagagctggggacccttcctgcccctccacacctcctatgtgccccaagagggaaggagtctgcatttcctgaggccctccactgagtggggatgaggggtgggcaggctgagactgggcttacccagggctcaataaggggcctggagtcctggtgggagttctggagtcagactgcctgggtgggatctccgtcgcgttcctgaaccccctgtgccctatctgtaaaacccgcattataaagtggctccctgaggtcaggagttcgagaccagcctggccaacgtggtgaaaccccatctctactaaaaatacaaaaggtagccaattgtggtggcacatgcctgtaatcccagctacttgggaggatgaggcaggagaattgcttgaacccaggaggcggaggctgcagtcagccaaggtcacatcactgcactccagcctaggggacaaagcaagactccatctcaaaaaaaaaaaaaaaaagaaaaaaagttataaagtggcttccgcctctcggggtatggtgaggagtctgtgggctgattcctgtaatgggcctagcacagtgcctggttgccaggattacataatagctattattatcatctgcagccaccagacatagaactggacactctccggctccaccccttcatcccaggggtgctgggctaggtcccggattggtggtgagggaggagtcccagagccaaagccctgacctcacaaatgctccctaggtacctgatgaagcaatttcctgaccctgtctcttttcttccctttatttattttattttatttatttattttttttgagacagagtttcaccttgttgcctaggctgcagtgcaatggcacgatctcagctcactgcaacctccgcctcctgggttcaagcgattctcctgcctcagcccccagagtagctgagattacaggcatgtgccaccactcctgctacttttgtatttttagtagagacggagtttcaccatgtgggtcaggctggtcttgaactcccgacctcaggtgatccactcgcctcggcctcccaaagtgctgggattacaggcgtgagccaccacgcgcagcttcttcccttcacttttagaaggcaaacaaggcaaaggcatgtgccctcatttactagatgatctgaggcacagagaggttaagaaacctccccgagtgtacctagtgagtgaaggtcccagcccagggcctcaggcccagcccctgctgctccatcacaagccagggaccctgaggccagaggtcatgggggatggagcatgggtgtcaggagtggcggagttgccagcgggtagacaggaagtcactgggactcccttggtgtccttatcagggtgggtgacatctctggggctgtggggaaaccccggagcctagaggtcaggctgtcatcctgcagatccccctctctctgacactccttctcccttctggtaccccaaccctgtctgtactcaagcaggagactcgtagggcagagcaggcctgcaggcccatgggtgcggcaaaggtggcatcgactgttgggaatttgccatggggaagaggggcaagagggagctgggactgggaatgccagtggggtctgggctggtcttcaggaatggacctgggctgtggccagcagataacccttctttactgccttggggagtcagagagggctccagtccagacctggatccacctctgctcccatctgaccacctgtccacatccctgtttcacctcttgcatctcatctctacctcagctcctttgttcagccacagaatcaagctggcctcctcctccttgctccttaaacaccaatccctggtctcaggggatgtcccaaaggccgctttccccactatattcagtccgtgcacaggtgtcccttcccagagagcatctaagctgcccatcccacctccatcactctttcccctttcctggcttatttttgttccataattcttaccactggatttatttatttatttgagactgagtctcactctgtcacccaagctggaatgcagtgtcgaaatctcggctcactgccacctccgcctccggggctcaagcaattctcctgcctcagccacctgagtagctgggactacaggcatctgccaccatgtccggctaatttttgttatgtttagtagatacaaggtttcaccacgttggccaggctggtcttgaactcctgacctcaggtgatccacctgcctcggcctcccaaagcactgggattataggcgtcagccactgcactccgccgccactggatatttttaataattacttgcttattcatttcttgtctctcctacagttctgagggcagaggtttctatgttttcttggctgcaggatcccccatgcctggcacaggacctggtgcacagcaggccctcaatagacactcgctgaaggcgtggtgcatcccctgcctgtccacactttcatccatccaccgtctgtgctttcttcccacacttcctcacccatcaatcacccagaatttctcgatcccaggccctgtgctggttcttgggtttggtgcgctagcagggcacacggatcaggaaagaaagaattccgacacttagggattggtcccagccaagggggagcctgggggactatgggagaaacagtggggtgaggggaggtgagggaaggtttatagggtgcattgaggtgcatgcagcacctcgcaccaggcgtgacccacagtggcacctgatagagactttgtagaataaatcagccattgcccggatggcttctagaaggggtggcggggctcagacggtgttctcaatgttgaggatgtgatgcaggaatcagaaagcatctagaggaggggtacctgggtgtgagagcttgagaaacttcccctggagaattgccagactgagacaaggagtgaagggtgggacaggggccaggcaggcagggttaggggcgagtgggccaaggcctgcctggaggactctgctgggcaccctcccaggatgccttgagcggtggccgctgagctctttcctggaagaggcttccatccctgcccctttgtctacctcagttctccctctgtcaggtgtcctgcaggagcctggaaactcagagagaagaatgagcaggactccccatccccctcgcttcccgcctcctgaccccaccagctgctggctggggcctgtttttattacaggcaggtgagtctggcccaggattccaggcggggcctggactgagggaggaggcaggaagaaactcacaaagagttggcagatcacggatggagggcagcatctcccaacagcctgggcggccgctgagacccagagaacccaaggactcccctgggctcatccagcagcctctgcttcccaggagagaggtgctgaagtccacgaagaggtgaggggtggggggactcagcacctaagggtcaggttggcccctgcaaggacacctgggaacaagagagggtggcggctgcagtggctgtggggcagccggaaatggggcgagacagacaggcggagcctcacctggggctgcccgccagcccagacaagctcagactgggtgcctgtggccctgggaggaggtggaaggggaggagcaggccacacaggcacaggccggtgagggacctgcccagacctggaggtaagagacgggtgggggacaggggtgggaaagataagtagggtgccactgccagcctgtcccccttgaccttggccatccctcaggtctagttcaatgccctgagagtcccgatgtgtgtggcctggcccttggcctgttcagggtactgggcgtctctcagtggaggccctggctgttctggggttaccccttgcagtgcacagcatggccgggcatgctggcatggtggtcatcctagcaccgggaagctggcaggtgtgaggtgtgttcccggtgtccaacggacactgcaggacgcagggcaagggtgacgccgcggagcctgagcatggacgggaggcaggcggcaggacctgaagtctcctgcctgctttccgcagcgccctgagcagcttcctcctgggatcccacggaaaccggtttgggagcaggttggcccaggtcgtttgacttttgactggggaggagaaggcagcctcccttagcgagccaaatggaaggaacagggtgcaggcctgggggggcgtgcccagccagcggccagctgagggtcccctgctccccccagctgcctgcacccagcatcacagccctccctcccctggctgcaagaggcaggaggagaacttcaaacggtccctccctccaccggctgcttgtcttctctgggccaggcccctccatggtggctgaggactctttggaacagggaactgtcgtggaagaaagggcccggccctgccactgcctcctgtgggaccctgggccaggctcccctgctgtccaggcctgtttccctgtctgttccatgaaggagaggcaggggcagtggtctgtaaacccataagctgcagcagtaggcccctcccctggtctcatgggccacacacgccagccagccagaggtgggtgtctggagttgcgggtggggtgctggcgctgtgccctctctaccaacttggctccctggggcgtgtgggcagcaaatggcaccccccacattccctctgttaattaggcagcccctgctaatgagtggcttcatcattgctccattacgccttctgagccatctgtgccccaggacttagggggagaccctgggggctcctggctgctgggcacaggcacatgcagaaggcggcatttctgggatgtgttggggggctgggtgctccgtgggctttccacaaagtagtttcaactgcagctcttcattttaccaagagagaagtggtggcagtcctggtgtccaggtgaggaaacggaggcgccctctttatgattctcccagtgggaagtctcttgtagccaacactttaacacattctgtgctgggcactgatggggtgtgtatgggtgtagggagtgggggtggaggtggggtgcacggggagatcaaagctgacctccaggaacactgtggcatcgagtgagatgatacacagtcctttcgagttggagcaagtcctgccatctttgcacactgctgtgccaccttgtgggtagtcactaaacctctctgggcctcatttggctcccttggcacaggagcgacgatgcctcactgcctgaccagaggcacctgacaccaggcctggcatccgagcagctgccactcagacctcacaggccagggccaagggagctgctgatgcaagaggcacaattttaggggcaagagcagcaagtaggatggtcttgaggtaaggggatgctggtgaccccatgccaaggctgggacccctagttcaggaagggaggtttctacagaggagtcagaggcctcttctgctgccctctccactgggggaatttggattttaaaagagaacccaagctgggtgtggtggcctacctgtaatcccagctcctcgtgaggctcaggtgggaggatcatgtgagcccaggcgtttgaggctgcagggagctctgattgcatcactgcactccagcctgggtgacagagcaggatcccgtctctaaaaaaaaaaaaaaacaaaacaaaaaaccagagagagagtggggagtttatgctaaaccaaagatacagcagtggcagtgacagaggctctctaagataggcggatacctccattttacacaggaagatactgaggcacagaaagctctaatttggtgcaaaatctcatgattggctattcagagggcttcagggtgatgctgggtggcgtctaggtggagtgatgggcagttttgagccccccaaccgctggggctcctccagacaaggctgcttctagctgggcgccaggtagggatcatcccaggagccacactcggaggaggggctgtgcttctggctccaataccctgaggtgcagaggacaccgtgacatgcagggatgtgtagagtctcaccgaagaacccagacttctggacgcccagccgtgcacactgcaagaggggcccaggctggcaggcatgtgattgggtgagggaagggcttattagaggtggctcagccttgctctgggctcaggggcttctgaaggctgggggcaggggtatggccagaatgacctgttctggatggatccatccttcctgccaagtgctcttgggaggctaggcaaaaggtcagacattccgtcatgcttaggaagacggggcggccacactgtctaccttctatctcaggcagcggggcacccaggcatgccttccccgctggggaggtcagcaggcgggggtggaccttggaggcccagccagcctgaaccctaaggaactgcattctgcagtggccctttcccggcagggcagggacagggtgaccctgggggagggagaacgtctgtctgcatctggctcaaggccatttcttgttggcatgtggtcaagttgccattggaaccaagaagatggtatggaggggcaaagcaggacttaaataaggcagctctaatcctgtgtgacctgagtcagtccctttccctctctgagtctcagtcttctcctctcacaaatggggcaaatcctccttgacagggttgtgggggaaaatgcaagtcacctgcctagcacaggataagtgctaaacaggggttcacctgctccaagtctagaaccttccgggggtggggtggatagaggccagtgctgcagccaggtgtggacgcaggagcccgactggcatccggggagtgcctcctccctgaccacaagctccagcgcttttgaaaccagatgcaggttaaacatgggcagggcacctgccgaggctccactcaccaagggagccagttagatggagtctgtccttggagctccaaataaggtatcagaaaatgtcttggacctggtcatgctcgcccctcctgtgtgcccggcctttcattctatcatctgagctggcaccaaggcttgcatcctaaggctggtcctgaagcaccactagatttgtcccgttttagcgatgaggatgaccttgcttcccccgcatcttggctaggccaggctccctgctctttccctgactgggggatgggcagtgggtgggggaggcgggcctagggaaccagacacacagctccctttgtgaaggcggctgagtcacatgtgcaacgcaatccctgctgggcctgggccctgaggcgggtgtgatgggagatggcgttatcatgggactatgggtacccccacgcctgtgtccaggaggctttcccacaggagatagcagggaggtggctgggaacattggccgcaaaacacatggtctgagatcaggtcctgactctgttgccaacttgctgcaaagctttgggaagttcctctctctgagcctcagttttcatctctgttaaatgggaacaatcatcactgttttgtagaggaggtagtagatgtgaaagggttctgcaaactgcaaatggtggagttctgggcctttggcattcatgtggactttatcataataataatgatgttggccaagatttattgagcacctactgtgtgccttgcattgtgctcaatgatttatatggtcactcagcttgcaaggggagaagcctggatatgaactgctcttgtctaaaaaatacccacctctgaggctgggcgcagtggctcacacctgtaatcccagcgctttgggaggtcaaggtgggaggatcgcttgagctcaggagttcaagactagcgtgggcaacgtatcaagaccctgtctctccaaaaaaatacaaaagttagcctggtgtggtggggcatgcctatagtcctagctacttgagaagttgaggtgggaggatcgtttgagcccaggagattgaggctgtagagagctatgattgcatcactacattccagcaagggcaacagagcgaggccctgtctcgaaaacaaagaaaaaacccacttctgagcaggcagtggttgctcatggccatttgcacaggtggggacagctcttcactgtttgctaggctggttcccactaaatgctgctgctctggccagagggttagagatagaaaaaggggctgaagacctcctcctagccctcccagccccaccatgtcttcctactcccccaggcctcagtcacagcagacaataaggatgccctaaccccttatccctgtcctgaggctctcatgttcttgaagatctcctcctacctccccggcagcctcctctctacctcctttgcaggcccctctgaataacagtgccctggccaatgcattggggtgcccattgtctgccaggcctgggctgcaagatttacgcatgtggcctcatttaatcggcccaatagaaggtgctattttggtccccacttggcaggcgaggagataaatggatggagagatgcttgcccaagtcatccagctggccggctgggagtagaggccagctggcctgaacccagagtctgtgatcacagactccgggctcagagagggtgcagcagcattgccccctctcctctgtccctcaaaacgaagggtttcctgcaccttcagctttctgctttccccacaccatctctggactccgtcgccagccaatgatgccatgaccttctctgggcctggcgaccccagtccctcactgctgagccccaacgacgtgtttccagctgccttgggaagcaggggggacctgtggcttccccacatgacacagagctgcccccattccattgcacacagggcagtctcttctctgccttccggatctgcaccccatcctgtgccccgattcttcagggacgtttcagacatcttccccctctcctcggtccccaccttcacttgtcgggttgtggggggtggggtgtcccagcccttttcctggtctcttggaccaaagtctcctcccccgctcttcccccatctgcctccttcgaggccccatccggacccaacttcccctctactcctctgcccatccctccgcatcattgctggtacaagtccctggcgtctagaccagggcttctcacacctccaattctggaatcccctgggcatcttattaaaatacacattcagattcagcaggtctcaggctatctgtaggtctgaagaccacattttgagggctaatcaggcctctccctacccaaacatcttctctggctccccagtacctttgatttaagcccaaactctacactttcaaaatcttccagaatctgccccttgctgcccagttagatcccacttccttccaagcatggctccatgccctacctctccacctcagccaatgctgttccctctgcctggggtgcccttcctgctggtctctgtttatcgaagcccccttcttctccttcaggtcccagcaggggctctggggtctacacgcttagttcagatcctggctgttatagaaaggcgtgggtagccctccctgtacctcggttccccttctgtaaagtggggatagactgttgtgagaacagaaggagaagatgaagtgcctagcaggggccggatatctggtgtcccgtgtttggttacagcccacacacctggaggcccagccaggtccaagctgtgcgaccttggctaagttacttcatgtctctgaccatctctaacatacaagtggtacccaacccacagggttgtgtggataaaatgagaatgatctgtacaagcagagcatcttacaccataaaacctccagacatagcaggtgattattagtcctgttatcagcactcataacagatagtgttgtgtttaacaagtcattgaatttctccccctttactcccagagacccctggatgctgaataccaactccaggtatcgctactatgagaaccaggcttgtctctctagccagactcagagctgggggcctgcttcctcacctgcctgcccctagctcatagtaggtctctgcaaagtccgacggtgagagaggcaggcagagctgggcagccaactccgcccggccaggcagccccataagcctctcctatgtggccagagtggcagctggctccgcactctcttcagccatctgcagagagagtggtgccttcaactctccatctgtgcccttctggtcagcacgctctgtggggtgtgtgtgtggtggtggtggtggggggacagctgccctgtgggcctggtccctggggaacagctgaggctgcccgggttaccagttgatcaggccctgaaggactgaccttggggaaactgaggcagaggtggtggtatgtcagggacaacccatcctcccctagataactcacttgtcctcccttgttagtgggcccccagtgtaggctggcctctgctgctttggcaataagggagttcccactgcagccccgggagagagcagagggtatgacatgggcccagtccccactgtgcctccctgccccaggtattggcccacagcctggactggggactgtgaatgtgggaagcacagtgccgttttctggaagctctcaccttatggcctccctgcaccccacggggtggctttgtggcccttcctttctgcagcttgatttcaagcaggtaggtgaggagtgcagttcacctgcagcagccctggctcctaggctgcccgagacgttccattcattcttcctccacgtggcatggggaagcttttcctggcccccttgtttagaaggcagatctctaccggagagaaggaatctcaagttccccaagcatccacgtgtccaggccccaggctgaggcctggggtgctggattgctgagtggttaggagacccgctatggagccagacggcctgtgctcccgccatcccaactcgggcacctccctgctgtgtgatcttgggcaggttaattctcatctctgagctacatgtatctgccttaagctccctcttcttcatcaccacattcacagggagtatttattgagggcttggcaagtaccaggcactggtctgagtagcaggtttgacttctctccactgccaggggcgctctggagctggaatgcagacggtggtcagcgagtgtaattactgttattgtcaccactcacccttctggcattgtaaaagcctcccagcacatctgactgaggaatcatctatcctcattgctcggaggaggagggcagacaggagcctctgcagggagtgtgagttatccaaagcctcctgactcgagaagggcactgaaccccagcagcgggaggtgctgctgacagaggaatgaccagaagggggatggggcatggtccatttccacacttctctgtctgagcttttggggccactgggaatggctcttcacccaggcctcggtttcccctttggctcagcagatggattaaaggaggccgtttccagaagcccctggggtctcagaatccaaaatgacttgggatgttgaaactgtgggtgcttgaggagcactgagaggggagacgggtcaccccccggggggacgcaggtcagccggtcagtcgtgcgtggcctggctggcctcctgcccggctgcctgtcacccgctccctcccgactgccttccgctctgccggtcagcactggctcccgtcggctgccaaggaggctggactctccttcaggaaagggcagttgtcgccctgacctggggggtgggcggacagcatccaagggccctgttgccgtggcaaccccggcctctctgtgggaactttggggagactggccctgggaggcgacagatggaggctgaggaagcagagtgatccccggccccttcctgtccctgaacactgtctgcctggatgaggggtgaggctgaggtgcccccttgcccggcgctgagtcatgggcatcccccaggatcactgcctcagcgctctcagccctgccccctcctggtctccctctgagaaatccatgactcacatatatcgtccgtcatccccagtcaagctcagggaggagggaggagcccagctggggcaggagaggggtgtctccccaccaaacaaacccggtccctccctctccgcactagctgtctgccctgccctgccgtaggagatgggctgggagcctcccacgctctccagctcactcggcaggcagcggggaccagggctggcaggttaagcctctgggggtggatcctgaaaggtggtccagccgcctggccctgcgtgggaccctccacctggcagcaggtacccaaacaagggctggacagcaggtgggaaggggaatagtgtgagtgtgagagtgtgagtgtgtgagcgtgagtgtgtgagagtgtgagtgtgtgagtgtgagtgtgtgagagtgagtgtgagtgtgagtgtgagcgtgagagtgtgagagtgtgtgagtgtgagtgtgtgagagtgagtgagaatgtgagtgtgagtgtgagagtgtgactgagcgtttgagtgtgagagtgtgagtgagtgtgtgtgagtatgagtgtgagtgtgagtgtgggagtgtatgtgagtgtaagtgtggatgtgtgcatccgtgcacgggtggctgttggacagtgggtagggatggtggtgaaatggggaaatgggggggtcttggtatcttggtgggatctagtccaggtcagcatggctgtgggtgggtctctagagtgggggcggacccacaaggagatgcctgggaggggactggggcccaaggggagcgacacctcccggggctcccaggcattttgttgctggagaaactgaggctcagagtggtacagtcactgggcccagcaagctggggtctgctctttaggctgtgagatcagtgctcctactacacagatgggagaaccgaggctctgggagggcaggtggcttgcccaaggtcacctagcacatccaggtatagaaagccaggggccaggctcagggagggggtggcacttgagggaactcctgaggacagctttcctgcagctgtccctggggctgggtccggggtccccactgagcaagggacagccgtgctcttcatcaccaaggccagctttgggagaaggtggccccgcagggtctctgaacgtgggccacgtgggtgagagtcctggaaccggtgacaggcagacggggaagcgcaggctgcgggctgaacaccctgcccgttgccaccagacctcagggctccatctgcctggcactgataggacttcccaccctggtccccgcgggggctgggagtgtgtaggaaaccaatgattcctgtcctcccccgtccccaacccacctcccctgcgtggtagagttggggtctccctgtgccccactgggagaggtctgatgttcattttactgcgtagggaggaggggatgggtcaaggcaggggcctcccacccccaccaatgtggagcagttgtagcctggggtccacgggctgtgtaggaatagcctttgttgctccttcagtggaccaagaaagttatttatagaagcatttattgagcgcttactgtgcactctgtgctctgtcgggaacatggccgtgggtgaggcaaataaggtatctcagaactcgtgagtggcccagacccagagccaagccccctgcccctcccagaggatagccccgggcagcctgttggctccttggggtcagagactgtgtgagaaggagcatatctgggcattaataaccatgggctgccaagttggctccccagagcccaggcaggggtcctgttgggctctttcctgccaatgtccaggtgtggaatgagctcttagggccagacctgaccccttctttgctgcagggacccgagatatgcacccaccttggtcacagcatcactgtggcccccttgcccttcctctcctctcgcctcaggagctcagctgctaaatgggtgtgtaggggtgatcacagctgccctggctcccgtaggcctggggcttggctccgagagtgtcgggtgatggagaacgccgctccaggtgtgatctgtgacggacaggctgtgtcccggcctgggccactgggcaagggccagtcagcctggtgtgacacttccttttgtcagggatacaaacaaacaaacaacagttaggaggtgagatggaggcgtgagataagcttgctaacagagggcccagagaaggggaagaggaccagggagcctctgcggaaggcacttaggctgggcttgggagaaggtgggaggggaagggactgatgtctgtatgagcactgtagggggagtcctagtggaggaaactacttaggaaaacatttggggaacgatacaagctggggaccacggggagggtgataccggacccctggcatgggtcatttcatgggacttgatgagccaggccagcaggtctcaatctgctctgtgggggggaagagaggcaggaggactcgccaggcaggtgctgtgtggggctgggggcccaggctgcaaacccagcaggacggggagggccaggatgggtgttcagtgtgaggttggccaggcagtcccagtctctggctgctgggttaaggctcaagcttgggagcagcttcacgtgtgagggagacgagggggaggtggcgcccagtcgaggggaaggacaggagagaggtggcagagctgcagcagggttggtgtaggggttggcctcctggcaaggcccagcatgacaaaggcaggtaagaggagtgggcaggacagccatggagggaccactgcggaccgtcctccagccggactgggatgcgggttccgccatcctgtgcagaagctgtgtgcaggtggggtctggggggctgtgccatttcagggatgcaggatgggcttccatgtggcagggctcccagggaggccatggaggaggccgtggggaagtcgggtggaagtagggaggagaggggagtgtgacaacagagccccaaaccccagcaccacctcctcctcccagactggagcttgatcagggctcagcccccgtccccatgctgggggtggccctgtggaccccgccttctgactcacagcagatggggacatcatgtgagcaaacccagcagtcaggggtgaccagacacagcaactgggcagatggcaaatggggggcggggcgggctggcacaaaggggtctctcaaaccgggtggggcggggctgtggcacggcctcagcctcccaggcctcctttctcctgagccgtcacttggctgagaccctgcccctcctcctgtctctggtgccccatctggggctccttgaggcccccaggggagccctgtagattctggtcttaggtctggactgctgggtagaggggccaagggttggggagtaggaagggacacacattttctgaccactgcccagtgccagcctgccctggcaggaggtcagctaagccccaaactctccctggttccctgatggctcagcctggatgggagcaatcctggaccttccctgacctcagattctgccaggccctgggctcagtgccttgcacacgacacccacttttcagatgaggacattgaggcaggggaggcttacccagtgagcaaccccacatctttggggatccagaatttgggctcttgtcccttggtggagaggaggctcctcagccagccaggcacatgctcgtgtcttgaaccctgcccctgccactgccaaatccacgcacctgtagggtgacagggcccgtagagacagcaagggtggcttgcccagggagaatcttggctttgtttctctctggttgtgggaacatgggcctgtgcctcggtttcctcatctgtaaactgtggatcacaatcacatctgcttcagaggctattatgagcatgaagagagttgatagaggaaagcatatgggaaagtgcctttcccatacgtgggaatgttaagcctttttttaatacctctcccattggacagatggctgtattgaggcccagagataacctgaaataactgtgagcacttctccctgcccccgctactgctgggagagctgcggccacctggacaccagtggcgctcactcacccacctccagcctgactcgtgctttggtgaggaggccagtgtggtgggcgtcgggctcccgagctggcgcctgcgcaggctcaggcagtttgtggtatgcttggcagttccaggcagagataaaagctcagccccggaggagctggcatgcttccgggcaccggtggacaggcctctctgcattagtgggagatggcctggcggtggggagatggccttgctgtccaagagccagcccaaccctggtggcctgaaaagttctgcggtgaatggctctggcttggcttcccagactcggggccacttacaccaactgcaaaacaaggaacagtgagatagagagccgcctctgccacctcccaggccctttcccctcccgtccccaggtctctgtcctcctagtacccccagcctggatgctcaaggcccatgggggaaagctgacttttgagaggagctgtggagacttgcattccactgccaaagatgacagcttctctggacccgtttccctgcctgtaaatggagataacaatacatccctttgcagggttgctgtggaatttggggcaaaagtggctgcaaagtatgtacctagcacagtgcatgacttcaagaggttctccctaaacctcagctggaggtttaatcttccaggtcatgggctcattgacttaggctcaaatccttgaaaaatgacttagagcaagcggctgaatttctcacaacttcattacttgggctgtgaaagtctctgatacctaaatgcggctttgtggggatgaaccgagacagccacacgtcataggggctcatgagacgcagaccctgtccccagctgtcccagacctttgcttttccatccctcagccaggctgccccctaggagaggcagcacgaggtgggctgttaggggtgtgggctctggggctgcctgattctgtcccagctctactggctgtgtggcctgggacaggtatattaacctctctgtgcctcgtcttcctaattgtaaacatgaggctggtaatggcatcctgagaggattaagtgagcctctgtattttaagtgctgagtgcagggctgggcacacctcaagtgctattgtaattgccccttctgggccatgaccaagccttgttcttagagagcattggagactttatccggaacaatggtgccatcctcccaggatgttaccgggaaaaccaccaatcctgtgacagcttcccctttggacatgcccattcctggggtcttgatctgctgccccgaggcattgtccagcctgggactccttcatgttccccaagacctgagacctgacccaggttttggagtgagttaatgtgaccctgggctggggagctgagctggagccattacccacagaaccgccgacctttcaaaggaccagaggccatggccctagccctggagaggaggcctgggttccagtcgagctggtttcctgggacagaacagcactgtggtcacttctctgctgggtgagttcaccctaggcccctgggagctaggctgagcagctgaccccttctgggtccttggctgagtctgggcctcagggtgtggctctgtggctggcaccctgggtctcggaccctgtggcagggggtcagacaactgcccagacccacctgctttgatggtgacagatgctaggggtgagcccaaggggctggcaggggcccctgagtcatgctcagccctgtgccctctgcccactgctcctctgctgtgtcaccatctgggcacgggccaaacagttcaggggcgactcacagcccaaacttccgcccctggggcatacacttcactgcctacaaagaccctcattcaatcttgagtgctgctggccctctaagacttgaaactttatccacatttcacagatgaggaatcaggcccaagagctcggagcagtcagtggtagcagagcccgaacccagtctcctgcctcttagcctggacttttccccagagtaccacagatggccattcccatgataggtagtgagttccccacctttgtaggtgttcaagtgtggcaggggcgttgcagaagcaactttggcatcgcatggggctcctcttcatggctgcttccagccctgagctttcctagccttgggggagatgggcacccaattcccacattccccggagtcgctatgtccttaagcatcacatgggtctttctagccgcatcaggccatgcttgtgggcaggtggtgcctctatctagaaaccctcttcatagcctggctgtctggcaaggttcttccaaggaacctccaccatgaaagccatgaatgcatcttcagagacccctgtccatgtgtaaatagctcagtgggctggatgggagggagcagagggggagagggacccagctgaagaggactggagtgaacagggagaggctgagggaggtcaggagggcaggacacccacctcctgaatcttcaggaccccttgctctcccttatccaacaggcttgaacctgaataggggcattcctgaccccatggcacttcccctgccccccacctgcctagagccatgggcagtgggcaaagctggaagaaaccctcgtgcacagcttcctcaaagctgtacttatcctatgccatggctgtcctggccacaccttctgggggactctgccacctgtgtgcacacctaggggaccaggtgcacacggtctgtcctccagctcctctcctgcctgcctcctggcaccttaagtggaggtggtgggagctgggaccagtgcagcacccttgccagccatggtgggggaggacagccagtgtctcttcatggagatcctgcagcaggtggtggcatgccccagggtcccgtctctgtctacctacctgggtttgggaaactggagtcagaacctttagtgattgcgatctaggaaggacggtagtgtttgcaaaccacgtgagcacaggagtgagcaaggtccaaccccgcccctgttccctgggccgtgaggctttgggccctgtggctcagcccctctgagcctccctttccctctctatggagtagctgctgccgactctccatgtcgttgccagggcatgcaggacaacagaggcagcccagggaaaggagtgcaccatgctcctttggatccagttttacgagctctgtgtccctgggcaagctccgtgtccctgtgtccctgctataaaatgggaatgatagtacctcctcatagagtggccctggaagcatgggaggccaagtgcatatcctatggtttgcacttgtacgtggctccctgccctgccccagctctgcctcgtgagtctctgcagactagtcctcgggacacaccccacccccagcctgctagatcgcaggaccccatggccataggcacgtgccctttctcctccttgcttgaccttggagagcccatggggagcccaggtgggagcttggggtctgcagcaatgggaacgggacccacttttctttgcacatctgctacctgggctccccttaggcccgaaccacaggagtgggcctttgagggtcttgggggtggtaattttgctttaatgtagagagaaaatccaaggttcagtgctcacagattcagatggaatctcagacatcttctaatccagcagccattaaagctgtctgtggccccagtggcataggaaaggcatgcgctcccaggcttccatgctgtgggacttctcagagcctttatcgggaaaacaaaggggagtttgccttgtgtttcagatcctatcaggctatgcacagtcttgggaaccgttctctggccaagcagccggcagaggtgtgtgtgctcctgatcctgttagatgctggagagtggagatggctcagtgcttgaaccctctccatcccctatcccctacccctcacatagcctgagtggcacttttgggttggatcttctagatcttctatcaggaatggctatctagtatctatcaggaatggctccttttgggaagaggtgtggagcctgcctgccctgggttagagtcccagctccgtctcagtcttcatttactcatccagcagtcactggggatcttctatggaccaggcactgtgctaggtactggagatgcaggtggtgagcaagacaggtgagacagcaaagctgagcaagggataacaggtaagcaaatggcagagtcatgtcaatgttgggtgccaatacgggtaataaatcacatggaagcgagtgatggatacggaagataattttaattgggtggtcatggaaggcttctcagaggaagggacatttgagttgaggcctgagaaggaggcagtcagggaaagggtcctggaaaggatgtgctatgctgagggaaaagtgcacgcaaagaccctgaggtgtgtctgaggacagaagtctagagtggctggagttggcgactgcaaggaagggatggggtggcgtaaggctgggggacgggagtaggcttgtggtcactggcttgtgatttcagcagtcctgctgctccctgagcctcagttctctgacttacaaaatgagcttcatcatttcagtccccgccccgaccctggtcgggaatgttgtaggtgtgaagtaagacagtgctttggcttttggctctgggcagcaatgagctattgcagttatttttattattactatgagtgggatgtttagggactatgggtggggctggggaagctgtgcctctgtttctccgggttgctgttgtaagtgagtgccaagtgtatgtaaaaggcgtggtgtgcctcgtctgtacctccccccaggtcccctgaaccacagccccttgccagctccctttaagcacaggatcctttgatgcaacagaggccgccttctccggccagcaagccttgtgagcctttccgggagaaggtttcaccagagaacagcaagtcctttctttgctttcttttcctcttcctccgggggccaaaaatagggcctgaatgggacccagctctgggcctgcagtgagacaatagcagcctcctgactgaagctgcctcctggctctgctccacggaggggcgggggagaaggggagttgcagagacaccatcccctcagccccaagcccctgctgcctttcccatggcctctgccagaaatcatcccaaagccccttcctctgttggactcccctcagaatgtgattgccagtggggttccccacttgtgctctgagaaagtgcttgtagctggttgactgagaccccaggaccttttgcacccctgagcaaccccaccctatctgctggcctggaaccgaaaacctcggtgggggttctaacccctggttcttttctgtgccctgtctggggcgtaccacagtttttatgtccttttccctttgactcagtgggtatgaaaaacttagagatcaaaggaatgtgccctcttggaagagagcgagctccctgtcactggagatgttcaaataaagttggctgagcattgaacgtgggggagagttagggattagccaagtgccagatggacaactggtcttgatagcttcatgtcccagagaaaatctccatttaaattccatacccttcccttaccagctaggtggctcacagcaagtcacatcccccgagtctctgtttcccaatctgtaaggtgggtcccctagggctaaccttgcagagtggtagaaatggatctccaaaatgcccagtgtagttcctggcacacagtaggagtttcagaagctctgcctctattttcctccttccccagactggcaaaagagaatctgagctcccagccccgccccgggagctctagaaggaagccaggaggaacctccaggcctagggctaactcagaagggggattcttggtaggctgtggcaatctgaggaggcttcctggaggaggtggaccctaaggagttttcagagaaatatgatgcacacattgtgctcacaaaagccagtggtgggattagagggtgttcagcttgttttgagggcagggccacaggctggcagcttccagaagcaaatccagctactgttaggcataatttggttactgggtggcctgcactgggttctaaaaagatttggttttgggccaggcgcggtggctcacacctgtaatcccagcactttgggaggccgaggcgggcatatcatgaggtcaggagttcgagaccagcctggccagcatagtgaaaccccgtctctactaaaaatacaaaaattagccgggcatggtggtgggcacctgtagtcccagctactcgggaggctgaggcaggagaatcgcttgaaactggaaggctgaggttgcagtgagctgagatcacgccactgcactccagcctgggcgaaagagcgaaactctgtttgagaaaaaaaaaaaaaagatttggttttaaagtcaatgttgacaaacttgcagatttcatgtaaaaacctggggctctgcctctctcgagaaattggaagctctggctctttgtggtcccttcaagacaggcaggtgtccccggggctccccataaatcgctgtcctaacccctgccctccctcctgccagctccctgtctggcctgggcagcgtctgagttgaggacttgggaacaggacaagttacggagccacgttgctttgctgggtctgagccggggtgtgacgtagtccctgcagctgccaacggttgccagggcaacggttgccaggggctgctgtcacctgcgccccttctcccgcgctggcggctggggcttctcagcctctattccctggctgtcccctttgtttgaagctccagtgagggagcagtggctggggtggcccagcttcaaagtctctgtcctcttgaaaaaaggtggtcgggggacattgacccaccagccccgcaggctactgcctgcaaacaagaacccctcatctgccacgcacgttcttaatgtatctatagtctgcctgatgccacaaaggagtccaggtacgattctcccgcctcctctcccctcctccccgtccctttcactcctgctccctctccctgctccccgcttctcccctgtcttcctccttcactccccttcccctccagctcgcctccttcctccccatcccttcccctttatctttttcctctcccgtgcattccccttctccccagcattgatggtgtagccagtgggtgggggtgtggtggcactagggaccctgggggggtcagatggtactccaagggacttgggcagtttaagacagcagcctcaactacaaggaaatagttgggggtgagagctccacacccgtccctgcagcccagcccttgctgaagattcttttgggtccctgggctgcacccccggtgtcagaaacaagcctctgacaagtccagggcgtgaggggactggaagtgcaggaaagagccaccagtggggctgggatccaaggtcacctgggtgagttctgatgggctccctgatttgggcccttgggaggatggcgtccagctgaacccatggaaacacattgttggaagctttctttactgtgacttttcaagagatgtgctttctaagagtcaggtaagttcaggagggaaataggcttgcagatggacagcgtgtgtcctggagccagccctgggttcgcatccaatcttcattacttgctagctgtgtgacctcgggcaggtaacttgacctccctgggcctcgctggccttatttgttgagtgggtgtgatggtacttgtctcaagggttttgaggaagcttaaatgcgtgaacatgtgtaaaaagctcacaatcctgtcttgcattttcgaagagcttaatgaacatagttgtgtcactggaggtggtgagcaccccgcctgcggggtgtgcaacctctgatggtcagtgatgctgtgctgtgtgctcaggagtggggatggaactcagtgcttctacttcccttccctggacggggcccaggcacagtcaggctcgggcccccagccttggtaggggagaactttgttcttctcagcctacttagtaggggagggtgctctcggcccctcagccagtgatccaggacctcgaggagggggaggaaaaaagaaagggagggttggtggccagcctgggaatgctaagtgtcctgcgctccaaagatgggagtttgccagacctggggtagttgaactgctaagcaaggagggaggtgactgggctgaccttgcgggcctggccttgggcaacgtgggaacacagatagggaaggggaacctcagccagacaactgaggtccggctgtggtttgagagggaagacagtctagaggggtcaggggagacggttcagcatcctctttgtcccttgctaccagcttggaggtaagctctgttcttacctgtaggcatcctgaagcctgcgggagcctggagggccctggctgcagagaaggcagtcaggggacaaacatcagagttgcccacttgacagaggagaaaataaggcccagagaagggacaggctggcctcaagattccagttggctgcagagcttgtctgaaccttatgcccctaactcctgccacccctgctctaggcatgtacattccctgggcaggtactgactggtgtgtgccctggcgcccaggaggctggcctcagctgctccttggagatggccaggtggagacttggccatgaacctctacgtggctgcagaccaccccaggagcataagctgaacaggcctggcaccagagtcttcggactgctggctctttggctctttgaggtcccttcaagacaggctggtgtccccagtgccttcctaatccctgtttctcctttaggttctaagtctcttcaatcaattctaaaagtccttttttttttttttttttgagacagggtctcgctctgtcacacaggctggagtgcagtggtgtgatcttggctcatcgtaacctccacctcccgggttcaagtgattctcatgcctcagcctcccgagtagctgggattacaggtgtgtgccactatgcccagtaattttgtttgtttgtttagagatagggtttcactgtgttggccagactggtctcgaattcctggcctcaaatgatctgcccaccttggcttcccaaagtgctgggattacaggcgtgagtcgccgtgcctggcctccaaaattcttcttttcttttttttgttaatttgtatttagagacaaggtctcactctgtcacccaggcttgagtactgcggcatgatcatagctcactgcagcctcaaactcctgggctcaagcaattctcttgcctcagcctcccaagtagctggtactacaggcaagcactactacccctggcttcaattccaaaattctaagagactttgattctcatctcctaaaactcttgcatcttcatattctttctctctcttttccaacatcctgagtgtcttagctgcttgagatgaagtcacaggcccagctggccacggccaactttaatggaatggcacacctgggacaggcctggcagtgcccttttccccacgagctggtgctgccggccgaagggaggtgggataggcctgaatataccccaggctcaccagggacctctttcctggaagtgtcagggatgatgatgagtggccctggggaatgcctaagtgtctcctctagctcatctcatgctagctaatgacctttgggacagctcaaaggggaagggaggggagggggctggaggtgctggcaggcttctgtgtggcgtcaagatttctgagagcttttttccatgtggataacaggtgtccgtgcaaaaaaggctctaccttcacgttgggttgggaaactgcccaaccaagctttatgggtttctttcctgcaggacttatcagagcctttgatatgctaatatacaacagaaagtatggcccacaagcatttctctaatctggggactagtgctccctgaaagtgctttggcaagttacctcatggtaaagatggggagactgagtcccagagaagagaaagaactcagaagaccacaatggctaaaagtttgggcttggaggttaggcggacctgagtttgagtcccggcttttctgcttatttgctgtgtgatcttgggcattacttaacctctttgggcttcagtttcctaaagtggggacactgatagcatttgcttcaccaagttgctgcgaggattgcatgattcatgggctctgctcatagggttactgtgaggattgaacaattaattttttgccaagtgctttgcaggatgccagcggctaattgagcacttggtgagtggaagctgtgatcctccctctcctcttagaatctccctggattccagggcccttttcactgcaccagataagacccctgtttagtcccactcatcatctggtgtcctgccaggcatggggactgggaggatgtgggggcctgaggccaggacactgggactctcacagacgtgtcacaaggttgtcatcacagggaggaggaccagtgtgtgcaaaggcttggaggtgggagcatccaaggccaggcttcttcctggctggatgactatatgttggcttctctgaggcctcttaagcaaatgcccagttccgcatatgggaggcagcagggcagccggctttggacaactgactctctgggaggacttggagtcccttcctatgagtgggtccttccctctcaggctggcagggagtgccccaacttctcccctttgtcactcttcccacagggtgtgtctgggcaggcagagggtgttgtggctcaagcacttggttggaccagaagccacggggacagtgaggcctgagctggcggtatggggggtggggggtgtccagcaggtctggtgtaagagtgtgaggctcaccctgggcagtgagtgggccaggcctgggcacctgccagcctccgaggcaggcagcttgcttcattttattctcctttattgtaggaaaattcctgaaaactgaagtcactctgcttctgccagtgatcctggaatacccctcttggggagctctctgtggtcacctagcttggacttccgtcactcacttggggagtgggaatgggggaggggagtgggaataggggaggagagtgcttctgcctttgcaagctgttatcccaggacccatgggtgcggctgaggggtggggggactgggctgggggtggggcgtagccctgagtgccacctgggtctgacaggggtgtctactttgagctgttgggtacatgctatttccaagtaagatttacttttattaaaaaagtttggaaaccgttggagggagggtcctctcagacgccacgccacccaccatggaggaaacacctgcaagagccctgctctttgcactgtgccccgccctccctgtccccttcccagctttgaagtctgttcctctgaggagctccccgccttctcttgctttctcctcctggccccatgcatccctgtgtatgcacgggcacacgcactcatgcacacacactcatgcacacacatgcacagtcatgcacgggcacacacactcatcacacactcatgctcaggcacacactcatgcacacaaggacattcatgcatgggcacacacactgatcacacactcatgcacgggcacacagccatgtgcacacagacatatgcacactaatgcatgggcacacacactcgtcacacactcctcacacattcatgcacatgcacacactcatgcacgggcacacacacccatgcacacacatatgcacactcatgcatgggcacacacactcatcacacacatgcgcaggcacacacatgcacacacggacacttatgcacaagcacacacactgatcacacactcatgcaagggcacacacccatgcgcacacacatgcacactcatgcatgggcacgcacactcatcacacactcctcacacactcatgcacaagcacacacatgcacgggcacacactgatcacacgcactggcacacactgatcacacgtatgcacgggcacacacccatgcacacacacatatgcacactcatgcatgggcacacactcatcactcctcacacacatgcacacactgatcacactcatgcagggcacacacacccatgcacacacacatgtacactcatgcatgggcacacacactcatcacttcataactcatgcacacacacactcatgcacgggcacccactgatcacacactcatgcatgggcacacacccccatgcacacacacatgcacactcatgcatgggcgcacacactcatcacacactcatgcacatacacacactcatgcacacgcacacacacccacatgcctgtgtaactcgcaggagttcatcctcaccctgccgcccgaccccctgggccaaatccttgcttccaaaggctcagcagctcagtgtcgtgccccagcagcccacaggagagcagctgcggacgggaggggagctagggcagtggaagttgagctgggggggtcttcccctctgcctctcccagcgagggcccatttaaggggaaggcctccaggtgggcaagactaggctggaacctggagattgcctccggggctccctcgttcctccctccttggctcccttcccaccccaccaccccccaacctgatgcctgcccttctcctgatgtctttcaggaagccccttccagggccccgctaaatgctgggggagccacagaggagcctgatgggtctgcgtcacagggcagggaagagagtgctggaacgcaggctgccctggccccgagtccaggccctaccatctagcagctgagggatgcggggccagtccctcccctctctgaccatctctaaaccagggctgctggtgcctttccctggttcataagcccgtggttcccaagcctgcagtatgtccatcaacgggatgcttgttaaagccaagctcccaagcccaccccatcagaccctctttgggccgggactgtgaatctgcatttcagctcactcccagaggaaggtctgacccaccggcaggcttgggagcctctgatgtgagcgcctgtggcaatggggggcgtgttgtgttgagggtgggttgtgggccagcaggaacatgcgttaattttggcaaggaatggacgggtaggtgaggcttcatggggaggacttgtcttagctcgtctcaaagatgagcggaatgtcacggggctaagtgctatccaaggcaaagggacaccaaggggcaaaggtctgtgggtgggatgcctgtgctcgggggcgggcagtggtcactgtgtgtaaagggaagaaggaagcagtggatggccaggttcgtgggtcttcccggcaggagacagcagagaggcgcctgcccgggaagggttaatcccagagccgtccaggtcctgtccactcaacttccacctccatcctctgaggaaatgggttttccaggagcttggcctgggcagcggtgactcgtggctccacacggaagtgactcaggtcccccgggagaaagcgagccgtgggtccccactgcccaccgtgcagaggggcagggctgagccaggtctggagctggagccctgggggtggggcgggggatgggctggtggtggggtgggggtctcagctcagacaaaccctggccaccttccactctgctggatccttggggaaccccatgatgtggcccccattgtgtcagactggactggcctgttctgtcctgtgtgtgtttacggaaggtctgaggtcaagggcggctgctctggaagctgggggttgtgggggcttccttgggcctcagccccagcaccctctatcccaggctggattctctgctactctccattctcctctccttccctttgtggggattctaaagccggggagttgggaaggatgtgcatctctggggcctttatcaatgccagctctacaaggagggggagacttggcaccacgctcgtgtgatctcagaacacacagccttccccagcctcagtgtccgcatctgtaaaatggtagcagtgagacccgtatcacagggtggttctgagggtttggtgtgataacgtggatgtcaccactaacattatcattgcgggggtgttgctagaatgccccctgctcagccactccctctggctctgtgtgagcagaggcagggcccttgcctgtggggccgtggttggtactgagcgcctgatggctgaggccctgtagcgctggggatctgcggctccagaggcagagacaggtcaggtcccaggggtctgtgcggagactcatgctacatccctggcgcctgggtgggtgggtgggcaggtggcaggtgtgtgtgcgtggggcagacctggaggggtggcataggcagggatgaaggaggggcgctaagtggacaagcgtgacagtgtccccctgcccaatctgtgtggcaactttcttgtccccagcccagctctcctgtcccaacgggcttctggaggagggaagttttctgggtggggtttaaccttccattgcactctcccggaaaggaagcttcatgctctaagaatttcccctcaaggtgctctggtgggtgagctggttgctgggggccgtacgggaagagggggaaacagggaggaggggcctgtgacaggcccagggggctgagttaggggcaggcatgagctgtttagaaagtacagagatacttagctgagactgatggcacctgcctctaagccgtttacaggtatcaattcatttaattctcacaatgacctttgagtgaggttgacttctttattcttctttactagtgaggaaagcgaggcccagagaaggtgagtaactagcccaaggacacacagctagtgagggagtcaggatttgaacccaggcagtctggctctagagtctaccccatgggttaaaggaagccagccagcccctcccctcaagcctcaagcatgttaatggagccagggctgtccaccttggagtagttgttcaaacagctgaggtggagtggggatgactcaggaagtggcagggacagttggtcccttgtgtgtgtctggatttcttccgtggaaccccatgttgtcgcttcacttgtttccttccaatgatggggagctctctacctgtactcccctcctttactctcaagggccaatccaggagggctgaagtgacgcggtggttctgctttgtccttcagccatgcctactgacagtgaaggctcactttgaaggtcagtaagccagggagatgcatggattctggccagttccttccttgcttgctatgtgacctcaggaggtcactggccctctttgggccttggatccaaattctccaaatgatttgtcagcttcgagtttacaggtagggagtggtggtagcagtgaggggctgcttggaggaagtggcatttgaactgacaatcagagggggacagcaacagagactgacaggaaacagaaggaaagagggggtccggaagggacatgtccctgtccccggatgttgggtttccttccagtggtcagaggtggcaggaggcagtttcaaaaggaatcaaaatgcttacaaatcacaacctgggaaatggtgcccttccctaaaacactttcacatccttcttctcaaagggctctgtgatgccaccagggcaagatgatgtgcctatttgacctacgactgaactgacaaggcctgagaaattggggttccattccacatggtgggacgcagggaactggctctcagtcgaaggggccaggtttatttgagggaggactggcccaggaaggagacattgagctcctgcctgggacaccccttcttttaatgctgctctcaatgatttggttcaaaagccacctcttcctgaaagtcctccttggtttctcttaaactcagactccacgtgtgttctccggcttgtggccgatgactgcctctgtcactgtggccagctgccgcgccacgcaggatgaggttctgtctgtgtctgtgagcacccagctctgccacagggccggctggccatagggagggccaagccttctggcaagtctacaagtgccagggccacaggttccctgccaggcactatagtcctgaccaggcagggaaagcccctggcctcgggagcatttttgggcaagtcatttaactccatgggcctcaggttctccatctgtgcaatgggtcaacagcagtgcccacttcagagggttggagtgggaatcaatgcagatgcaggggtgggacgggtcaacacagaggctggcagatagtagccgctcagctaatagagagcttagggggtcagatttgctccatccttgccagggcggggcaataccgagtccttgtccccagcagaaaccgtggtccctttgctgttccagatgctctggaccctgggtactggctccccctggcggtcatgataggaagcgcccttcccctctggctcctgtagagggcgtcgcggatgcattgatcctttagttccttcactgtccatccccacagcctttatccagcaacctctgtacagccagggcctgcccacagagatggatcaggtgctccctggctgaccaaggaggagggaatgcacgtctcccactacctggaggaggctactgggggtggggaggggctttggccagtggtgtgaaccaaaggaggctgggactgactctggagggagttgaggagggcttcctggaggaggtgtcctctgagctaggtctcaggaatgatgatagggaggtagctggggagaactctgggagcccccttttttctgtgttccctccgggcctggaggggcaaggtggtgacggttccaggtagaaccctcatgccagattctagataagataatcccgtcactctgggttcaggagggaggtactacgattagcccgattttgagtgacttacacaaggtcctgcagcgggcaaaaggtggaactgagactggaactcagctggactctggacagccactcccccgcctttttttttttaaagcagggtctcactctgtcacccaggctggagtgcagtggcgcagttatagctcactgcagcctcgacctcctgggctcaagtgatccttccacctcagcctccctagtagctgggaccacaggcatacaccgccatgcctggctaattttgtttatttattgtagagatagggtctcactgtgttgcccaggctggtctgaattcctgtgctcaagcgatcctcctttctcagcctcccaaagcgctgggattacagacataagtcaccacgcctggcctcactgcctcttggggagcggcctctggccgctctggggaggtccatgggctttttccacacttgcttccccacctcacctcccacatccatgccacactggcctcctcttctgcagggccagcccaaccaccacacagtccacactcccagctaacactcctggtctcttccaggtggtgacttccaagagtgactccgtcggaggaaaatgactccccagtcgctgctgcagacgacactgttcctgctgagtctgctcttcctggtccaaggcaggtcttcccaggggtgccctgggctgttggaacttacgttaaaatgcccctgtgcctagggtggctgccagcacacatgctaactcctttaggcagttacagctcggctagtggagggtaccttggagaaaagcaaaagacactccttccttctggcaggtgcagccctgcagtgcacagcttagggtatggaatatggatggggtactggccccactcacctctgcagccagagcattcttgtgcagtgtaccacctgcacaaccgtctatgtcagccatggcctcattaaatacttcattgctgttaaaaatatgttttccccttgaaattactattcgttttcagtttcctctttttttttttttttttgagacggagtcttgctctgtcgcccaggctggagtgcagtggcgggatctcggctcactgcaagctccgcctcccgggttcacgccattctcctgcctcagcctcccaagtagctgggactacaggcgcccgccactatgcccggctaattttttgtatttttagtagagacggggtttcaccgttttagccgggatggtctcgatctcctgacctcgtgatccgcccgcctcagcctcccaaagtgctgggattacaggcgtgagccaccgcgcccggcctcagtttcctctttttatagtttgatgctgataagttttgagtgggaaagactaacacatttttgtagacccttggaatgtgtgtgaatctcaggctccaggttcacatgtactcagcctaggtcctgtccccttccatgcctctggtcagcccctgccacggggtcccatctgcagcctctgcctcctcaggtgcccacggcaggggccacagggaagactttcgcttctgcagccagcggaaccagacacacaggagcagcctccactacaaacccacaccagacctgcgcatctccatcgagaactccgaagaggccctcacagtccatgcccctttccctgcagcccaccctgcttcccgatccttccctgaccccaggggcctctaccacttctgcctctactggaaccgacatgctgggagattacatcttctctatggcaagcgtgacttcttgctgagtgacaaagcctctagcctcctctgcttccagcaccaggaggagagcctggctcagggccccccgctgttagccacttctgtcacctcctggtggagccctcagaacatcagcctgcccagtgccgccagcttcaccttctccttccacagtaaggcaacttccaggcggagggaacaactgggcagtggtctagaggcagggaaggcaaaatgcaaagtggactgggctcacaatatcagatcatgaagactgggctttgctcacaggcactggggagccagtgaaggtgtctgaggaggggaggagtgtaatccaagtgctaggattacaggcatgaaccactgcgctcggccccactgtcccttgatggttactttgtgggcaggcaggggtgaggatggaagggcaagggcccgtcctgaggctgcagagaaggtcttggtgaaggaggatgaggtctgaatagggtgagagagcagagactggaaagggactgaagatcaagagccccaggaagaattcttcctcagcatcagtgtagactgtttatttcctttcacagaggaggaaactggggcacagagaggatgcccaaagctgcacagctagccaatgggagagccaggatttgaacccagcagctgattggagtggggtaggggtgaggggcggagtatgagaggtcaaaggtcaggaaagcagtggggttgactctgaggtccagaagctgcatcttcccccttgagtgtgacaggtacatgtggccactgccattcagcaccattaaatgctgaatggtggccaggaagggaggagcatcagaaggagcttgaaggtttactggggggttttcatgtctttccagcacctcaagtttgaggcagggctttcaggggtggggggcacagcactttgattgtgtcagtgtaacaggctaatgattatgtccagtgcaacaggcaggcccaggcccgtcagtggtggggggttccccacaccccaggctgggattctgccccgcaacctgggaggatttagggcaaagttgatcctagttgcaaattggcattctgaagaccagactgaacttggtcttgtttggcctgtagagggtttttaaaaaacatggaccagggatttcaaatcacctaaaacccaggctttctcggttatgcattcaaaagatggagctacccagggcctgccttcctcagtggcacagaaagtataccctccaacccccactgtttgtcttcctcatctgagtcccagctaatccctggagacaccttagtcggccgccttagtaggccgcccacgctacctgggcagaggggcccgagcctggagtcagggaggctggtgggtgtggagtcccaggaaccaccaccaagccccgcacatccctcctaaggaggcctggctgggccctctctgctccgtgtgtgtagccgaaggtgtctgcggagggtgctgagcaaggcacatcccaccccatcccgctggggctggcattgctggcgggttctgtaagacacaacccccacgggttggcctcatctgagtggccttggcagagtccactctgcttcttgaagcctcagtttcccctttgtaaagtaaagatcgaggcattcagagtcatgtcagggtggtagggggcagaatgggagggtcctgggacctgaatcggcagcctcggcgggggcctgtccacccctcccccaggtcctccccacacggccgctcacaatgcctcggtggacatgtgcgagctcaaaagggacctccagctgctcagccagttcctgaagcatccccagaaggcctcaaggaggccctcggctgcccccgccagccagtaagtttggcacctggggctgtgaggggaggcaggaaggcatcagagatctggacctgggcagggtgggacctggagtaggggctactgcgaggccttccctgggactggaatgcttctttgatttctctttctgccttctgggagtcaacacatgccccccaggctgagccctctcctgtctgagtcagtaaccaacatcacatccaccatcccaagccctcctccccctcataaagaaaggatgggtggtccacagtacagcccagcagaccaaggctcagagacggcagagccgctccaaggccacagagtaggttggcacaggcggagctgggcccaaacccatggtgctgagtcccaggacagcccccaccacaccattgctctcctttcccttggctcccaggtcctggcctcctctgtctgaccctaccccagctcattctttctctcccacacgcagatgcctgcttttctcttttgtctgctctccactctctcttgcccaccccacccctctctctgcctctgcctctgcctctgcctcttccctgtgtctctgtctgagtctctcgtcctcctgcctcagtctccctggtggcccggccccctccccaccatcaccaccgctttctcctccctgccaggcagttgcagagcctggagtcgaaactgacctctgtgagattcatgggggacatggtgtccttcgaggaggaccggatcaacgccacggtgtggaagctccagcccacagccggcctccaggacctgcacatccactcccggcaggaggtcaggggcaggcctgggcaggaagcagatgcgggttgggccggggccagatggaggtgggggctgtgagcactccctgaagctcagtgccgtcgcagcctctccctggggcctcccgagaaggttccaggcccgaggatagccatcctaagtcagtagttcaaccgtgggattgaggaccctgtgtgggcacagtggcagggtctgcttcctataccagtctcctggggccacccgtgtgaacagaagaccagcccctaaacgcctgtccacgcaccaccccccccgtttttttttttttcgagacagggtcttgctttgtcacccagactggagtacagtggggtaatcatgtctcactgcagcctcaaactcctggtctcaagcgattctcccacttcagcctgtgagcagctgggactgcaggcttgctaccacacctggctttaaaaaattctttgcaaggctaggtgcagtggctcacatctgtaatcccagcattttgggaggccgaggcaggcagatcacttgaggtcaggagttcgagaccagcctggccaacatggtgaaaccctgtctctactaaaaatataaaaattagccgggcatggtagtacatgcctgtaattccagctactcgggaggttgaggcaggagaatcgcttgaacccgggaggcggaggttgcagtgagctgagattgtgccactacactccagcctgggcaacagagcgagactctgtctcaaaaaacatttttttatttttgtaaagacaaggtcttgctacgttgtccaggttggtcttgacctccggggttcaagcagtcctctcgccctggcctctcaaagtgctgggattacaggcgtgagccactgcacccagccacacaccccatcttgagactgccccctgagtggctctggttagctgggaaccacccacactgcccacatggccacccccaagttggctgctgtaggcagagctggcatctgaagccccagacaacagaacatcatgtggttctcccagggctatttgccctggagtcctggattctaaccacaagactccccagccagagctggtagcagggaagggagggatgaggagggctgtcatgagtcaggcttgacttcctgaagaaatgggcttagaagtggcagcgtccaggaacggatgggtgtgtgtgtgtgtgtgctagggtggggggcacggatctaggggtccgcatttggctgagccctaaagggacctctgcaggaggagcagagcgagatcatggagtactcggtgctgctgcctcgaacactcttccagaggacgaaaggccggagcggggaggctgagaagagactcctcctggtggacttcagcagccaagccctgttccaggtatggggtcctcaccctcatgcctcccaggagaaagcagtttttttctgacagaggtggaaagaaggcacgcagatgagctccttcctctgggagtcaaagcctttccttgtaaagttacaaattgcactgcaatgtgcaaatctccctgtgagagggctaagcaatgttcttcttactatagtgtaaatgactacatgggcaaaagtggttccagagggagacgcagcatctcaaggcaatgtgctgggagagggttatctagagagggtaaggggcttctgggcccttcttctcagtcctgaactccctccctactctcttcctccaaccccatgtatctaggacaagaattccagccaagtcctgggtgagaaggtcttggggattgtggtacagaacaccaaagtagccaacctcacggagcccgtggtgctcactttccagcaccagctacagccggtgagtgggggccagccatcaagagaacaagcgcccctcggccatgtcaccctttcctctccctccctccagactcatttgtctttataatgaaacgattgcctgatcgagcagtcaggtccaaatggggcgggtggtggcttgactgtgttctagacttcctctgcctggcctgtaaagttggaggggtggggggctgtcacagaaaccactctcctttcttgtccctacagaagaatgtgactctgcaatgtgtgttctgggttgaagaccccacatgtgagtatgcaggggtctctgggctggacaagtatctggaagagaaatagagtcctggggggtgggggaggtggggttaatcaccgagggcttcctggagaaaggaggactttgaagagagagcgatggcaggctatgagtaggccgggtggaagaatgacacagtcgtgcttttgggggtggacacagtggggtcctggaggactggacttgattggagccccgtgctgtcccctcctcagtgagcagcccggggcattggagcagtgctgggtgtgagaccgtcaggagagaaacccaaacatcctgcttctgcaaccacttgacctactttgcagtgctgatggtgagggtccctgctcccacctcgcagccacaccccaggccgtgtgcttgttctgtgcaagcacttttcatatattcagtcatttattcctcataacagctctccaaggtagcttctattgttgtcccattttatagatgaggaaatggaggctcagagaggttaagcaatttacccgtggccacacagctagtcagtgaaagagctggtttgtagagcccctgctctttattcccaaattttggtgtgtacgaaaatgcagattcctggccctcacctagggttctgatttggcagtgatggggccaagagtgtttctaatgaggcccctgaggtggcctccagtgcccccaagacctcagaattcatgctcccaggactgtaggattctgcctgtgggtatccacctggggcttgaacacccctgggtgtgggaatctcattccctcacaggaaacctattcccatgttaaatgttatagaagaataatcaatgccaggacagaataggggttctctcatgaagggttcttggcctctgtgggtcaggaagccgcttgagaatgtggtcaaatctaaagatgcccccactccagaaaaatgcacttatgggaccacattctgctcagttgggagagggggttcttaggcttccgaggcccaccagggaccccaggttagcccctcacgcagggcaagcctccaggttgtgtgggggacacagaggccagctctctcctgtctcctggggccaggtctcctcggtggaggtggacgccgtgcacaagcactacctgagcctcctctcctacgtgggctgtgtcgtctctgccctggcctgccttgtcaccattgccgcctacctctgctccaggtgaggcctgaaaggggtgggacaggggaggggaccctccattgcacacacctccaccagggcgccgcacacatctccggtcatggcccgcccgcatgacctggaactgtgtgtgtggttaggggagctgtttggggtaagctgacccttgggggccacgtctcctcctcagatcagtggtgtttggataacatagtatttacaaattttagctgtcgacattgtatttatttatttttatttttattttattattattatttttttgagacagagccttgcctctgtcgcccaggctggagtgtagtagcatgatctcggctcactgcaacctctgcctcccgggttcaagtgattcttgtgcctcagcctcctgagtagttgggactactggcgcctgccaccacacctggctaatctgtatatttttagtagagacggggtttcaccatgttgctcaggctggtctcgaactcctgacctcaagtgatccacccacctcagccccccgaagcgctgggattacaggcatgagtcactgtgccaggctaattgtcaacatttaaaattgagagagtccacctaagaatctgtttctttcctagagtaagacaggaaagcaaaataaaaaacttaaaaaaggaaagatttttcatttctgcctttgaataagcagatttgtgagagcactgggtggacacaataatatcacagcggtaatgatcatacttaacgtgtgtcaaacttcccgtgtgccatgcactgttctaagtgttttacatgtgtgaactcaattcatcctcacaacagccctatgaaggaacactcagagagggtaagtgacttgcttgaggtcacacagcaaggaagtggcagaggtcagattgtcagtgcttggcttggcctaaattggggtccacttgccctcagcgctgaacccatttgggtagaggagaggcaccctcggttctcactgtccccagccacgaggaaggagaggaaagtgaagctgtatttatgcgtgtgcacaagcacgtgtgtgcctatatgactgtcctgtgtgtgcacagctgtgtacctggggagctaagtaggtgatggtgatgaggaaggacagctgggtgatgagatgggctcggcggaaggctgggggtggaggcagaagtcctcaacacccagttgctcacaaacatgcccaaggacacagcacaggaacccttaggaactgagcaccttatctgtgtcagatgctttgtgtcagtgtaactctcaccccaaccctatgagggtaccatcctcccacttcacagataggcaaactgagagtctcaaggggaggggaccagctgaagatggtgccatgagttaggggcagggcagggtgggactccaggatggtgacactggggcctgcatgttctgctgcaccctctagggccatgtagaatcctggagtgggggtggggtggggtgtgcacacattgacttgcaaacctcagacagaccgatgcgggcagcccacactcagactcacaggtgcacagttgtgcagacagacgggaagacacagaatgtggatggcatggattctccaacatggtgaaaatgccaaagtgtttccgctctgactttgagagtatctggtttattactgtggttgtcttcctcgctctgcctggctgaggcttctgttaaacgtgcacgtggtgcctgagtctgtgggtgctgggcacacagtaggtgcacagggggatgtggggaacagtttggctgcagccacaggaataggataggggccatgtatgactgcatgtgtgtgtcggggtggggggcagtctgggaaggcttcctggaggagatgtgggcacactcccctctctaccttcccacactggcccaccagggtgcccctgccgtgcaggaggaaacctcgggactacaccatcaaggtgcacatgaacctgctgctggccgtcttcctgctggacacgagcttcctgctcagcgagccggtggccctgacaggctctgaggctggctgccgagccagtgccatcttcctgcacttctccctgctcacctgcctttcctggatgggcctcgaggggtacaacctctaccgactcgtggtggaggtctttggcacctatgtccctggctacctactcaagctgagcgccatgggctggggtaagtggttgggcggggggtgcctcagacctgcctctcccacttggctctggcaaaacccaggcacctggttctgcctctccacctatctctctgacttccctcctggcctccttcactcatcctcaggtgtccttcaccttggctgaatcaaggtcccctttaggaagaagcagtgagccctgtccccaagaaacacttccaaattctccacatcactcactccattgcaaaggggatttacgagcagggccaccgtgtgtgaatgtgcaggttgtgcactgctcaaaggcacccagttcagagatcagaggggctgaaatccagtcccgctccagtcatttaattcactcgggctggcagtggccctgcctcaggatccccctggaccttgggtaacagattccctgtggcttggcattttgttcttggccaatgactgttcaattcacctgtggccagccctcttatgtcagacctacagcccaggggctcatgatgccacaagtctgtttggacattgcacagacccctcaacctccgcatgcccctgactccagcttgctgctcttcgcgggtttgtcattgggccccttctttgtccattcccccatttgcatgaaattcctttggaggtgtctctgtgtcaggactttgtgtttggaggtgggcagccccctctagggagcttctaatctccaccgaacgggcgaggtcaaggcccagtgcagacgtcccctgatggcagaactcttgccgtccctcctaaactgtctgcccctcccatctcccctgtgacatccagccctgcagcagagacccacaggcctttctcccaggggcccccagggtgacgaagggcagggctaaggttggaggagatggcatccccttataggaaacccatactggaatggggagggggagggtccaaacttgggggaacttccccaccagatggggctgggtgggcttcaggagcccaaacttcagaggggcccttgccctccagactccctgaggccagcagggaatgggcaggcctcagagagcgggaagtagagcaacatgcattgccaccctcaggcttccccatctttctggtgacgctggtggccctggtggatgtggacaactatggccccatcatcttggctgtgcataggactccagagggcgtcatctacccttccatgtgagtggctgtgtgcaatgggggcaagaaggtgggtctctgggcacagaggccagagtgcagcccgggcccaggtcatgctggccaggggacacctgggttccagtctcctcgaggaattggcctggcagtggctgaagcactggtctaagagtcatggagggtgagaaaaggcctggatctaccactcactcaccaggtgaccttgcacaggccccggcccttctctgagcctcggtttcctcatgcatgaatgggggtatgggttggagcagatgagcctcaccacattcctcagcagcacctctctgtctccccatgcagatgggaagacagaggctcagggagggaagagatccgctcttggccacactgagggctggtgtgctgttcggaggcagaggatgagtggggttgaagtccagtccttctccactcacctgattcacccaggctggcagcggccctgcctgtggatcccctgaacccaaaccggaagccagggttcctgagctccagcctgggaaggaatccttcccattggctcagtggttttgaaattttcagctctttatgttgtgacccagtgatttctgcctcacttttgtactatctatattattacttacttaacattttcctttaaacaatctgacttgttaactcaaatgtatttttaaaattacatcaacactgtaaatagaaaacaagcgcacttgctgtaaacagtggataatcctgaaaacaaacatgacaaccacagcccaggaaatgctgcccgtgctggccacacgctgagccctcctgcctttgcccgcaggtgctggatccgggactccctggtcagctacatcaccaacctgggcctcttcagcctggtgtttctgttcaacatggccatgctagccaccatggtggtgcagatcctgcggctgcgcccccacacccaaaagtggtcacatgtgctgacactgctgggcctcagcctggtccttggcctgccctgggccttgatcttcttctcctttgcttctggcaccttccagcttgtcgtcctctaccttttcagcatcatcacctccttccaaggtaaggagaagacccgtcccttggcccaggcagggtgtctacacatggagcaagggcagggaagagatcacccagggaacctgaagacttcccttctctgggcctcagtcatcccattcataaaatggggacatccaggccacagtcaacaagtcttgattgagcacctactatgtgcaggccctgtgttaagccacagggcttatggctgagctggttgggtgtgggccttgttcttttggaactcagctctactggggaagactgcgcatgagcaggcaagcatatagccatcaaaggtggtcccagatagtagggacatcgtcgtgagcacgtgctgcacagggcctcggctggggtgggggacaccctaagaagggtggccagggaggcctctctggatatgagacgtgtgaagacaagagaaggatccccccatggagagatgggggggcctccctactccaggcgcggtccacagaccagcagcagcagcgttgttaggagctttttggaaacgcagcctctgggccacccgggccctgccacatcagaatctgcattttcacaaatgcccaaggggtcacgtgcacatgataggatcaggagccctggtctaggggaaggaagctccaggcagagggagaggcaagaacaaagatcctgaggttggaaccggttgtgtgtaggaaggacagtgagggagagcgtggccagatggcggcgggtcggggcggaggggtgggatcccagggcagggtcatgatggctctggcttgatgccaacagggtccctttctgtgcatgtacctgtgtgtgtacattgaggtgcacacacaggcatgcacacccctctgttcctggccgtgcagaatggaagggggttgtatggccaggcccaggggctctcatggggttcaaggccagcctcccatacagggtcaccctagaatgggagctgggagttggtggtggggagatgttaccacatttcggttatttaacattcaagccttcattcctgcctgtgagatgaggggactcaggattgtaagtgaggcccatacattcacacagacatttactaagctgtggatacatcatagtgctattaatttgaggggtgcaaaatctcacagtgcttaagtgggtggacttcagagcctgttcaccacagtttgagccctggctcagccacgtccctttacctgagcctcctgggcctcagtttccttgtttacaaaagagaatagtaatgaataggatgggcctaggaagtttgtgacagtgagaggccacacggggacgcagcacagtgcccggctcataggaggtgctcgctgggtctcatgggtgcctgacagcacgtgcttggcaaacactatggagaggtggggcagacccgagtcacaatggctggggagggaggaggagggatggggtggggctcccccacctgctgaccccgtgccctcactgcccgcaggcttcctcatcttcatctggtactggtccatgcggctgcaggcccggggtggcccctcccctctgaagagcaactcagacagcgccaggctccccatcagctcgggcagcacctcgtccagccgcatctaggcctccagcccacctgcccatgtgatgaagcagagatgcggcctcgtcgcacactgcctgtggcccccgagccaggcccagccccaggccagtcagccgcagactttggaaagcccaacgaccatggagagatgggccgttgccatggtggacggactcccgggctgggcttttgaattggccttggggactactcggctctcactcagctcccacgggactcagaagtgcgccgccatgctgcctagggtactgtccccacatctgtcccaacccagctggaggcctggtctctccttacaacccctgggcccagccctcattgctgggggccaggccttggatcttgagggtctggcacatccttaatcctgtgcccctgcctgggacagaaatgtggctccagttgctctgtctctcgtggtcaccctgagggcactctgcatcctctgtcattttaacctcaggtggcacccagggcgaatggggcccagggcagaccttcagggccagagccctggcggaggagaggccctttgccaggagcacagcagcagctcgcctacctctgagcccaggccccctccctccctcagccccccagtcctccctccatcttccctggggttctcctcctctcccagggcctccttgctccttcgttcacagctgggggtccccgattccaatgctgttttttggggagtggtttccaggagctgcctggtgtctgctgtaaatgtttgtctactgcacaagcctcggcctgcccctgagccaggctcggtaccgatgcgtgggctgggctaggtccctctgtccatctgggcctttgtatgagctgcattgcccttgctcaccctgaccaagcacacgcctcagaggggccctcagcctctcctgaagccctcttgtggcaagaactgtggaccatgccagtcccgtctggtttccatcccaccactccaaggactgagactgacctcctctggtgacactggcctagagcctgacactctcctaagaggttctctccaagcccccaaatagctccaggcgccctcggccgcccatcatggttaattctgtccaacaaacacacacgggtagattgctggcctgttgtaggtggtagggacacagatgaccgacctggtcactcctcctgccaacattcagtctggtatgtgaggcgtgcgtgaagcaagaactcctggagctacagggacagggagccatcattcctgcctgggaatcctggaagacttcctgcaggagtcagcgttcaatcttgaccttgaagatgggaaggatgttctttttacgtaccaattcttttgtcttttgatattaaaaagaagtacatgttcattgtagagaatttggaaactgtagaagagaatcaagaagaaaaataaaaatcagctgttgtaatcgcctagcaaactggcgtaagcattttgggtcatttccttctgagctttttcctgtgcttctattgaaagagtcactgatactgatacaaataccttggggccaatcaggaaacatgaaagagagaagagggctgtgtgtgaagaaaaaaaaaaaatcgactgctggaaacctcatcaaccagggcacaggggaagataaatggcaacttggtgtctgtgctggggaggcaatggggagtggtggggcctgtggcgaactggagactcccaaccccatgctgagagcgtggctgctcatcagctccagctggtcactaccttgcagggatgagggcccatgtagccagaccacctgccttttatgagaaatgggaaatccagactgtggtttgacatcccctgattttaaaattttggcgaatccaaaacattttctggccaaagagattacagtcaaaagctgcctggtcctgggatttatgcaaccagtttactgatcactctgcagcaggtgggctgcaagaattaaatcactggacttctctcccatccctgcctttaaccttgttccaccaaatcaatctctcctcccgctcctaaggcccaggtgaggcagatcacgcaggttcccatcttccctgtgatgagggcagtcacaacggatcattgctactgtgttcaggtaagaggtcccagtgcagccaaagtcctccccaaggcccacagtccactctctcccttctgcaggctcctccctcctcccctggccactctagggggatgcccagcaggggaagaggctcagagtcttggattggacaaggtgggtgtgaggcagctgggtctagactggcagtgccctctgaggggcgtgaatgtgggatcttgggacctgcagggaccaagaacccctgtgccctgctgctctcccagccctccctccaccccctccactccctccactgacctctgtccccacctttctgcaggtggggggctcctcttatgcccccagctccaaaggacagaggccaaaccttcccaagcctcccctaccccagtgtccggattgggcagccccgggggatcagagccagcttccctccttacaggcttctaggtctccgtgaggggggtctctcagagccccatggctgggctaggtcctgggatgggggttgaggcaactccccccatcttccagaatgggggggaaatgacccagccccgttcctccgcaattctcctgcttctcaaacattttgtttctgcatctgaggctggctcaggtagtggggaggggtcttgggttgggtctcaccttctcaggtaggccctgcacagggcaccaacagttccatgctgatccttttaccccgatggttattatcatgcactttcccaggctgtggggctttggacagtgggatcgccctttctgccagcatgtggccaggcgtgcatctggaaacatccctttagcttgggaaatggattggagcagctgagggctgaatgctggctgggtctcgctggagaacttgaggccctgcccactggagccattgggagaagctggggcaggaggcggcaggaagggacactactgttttgttggccctggggttggggggggtctcagggttctgtgagtggctccaggctagtccctggtccccagggggcgtttcagggaaggggccttaggaaaaggtggccctccttccagccctgcctgaccttcccctgcacctgccctctgcccacttcccaggtgggctggctgctcggaatctcagtctgctcacccccaggcgcttcttcacacactggtacctgcgagcctctctgagggcccaggtgccaggatggggcttcagcgatgggcccagcacatccaagtccactgccccacctcaccctcacctgcagctgggagggaggtctgcagatcttccaggagaaggctggccaggtgtggagcagtggcaggcccagccattcatctgccttcgcagccctccctgcagaggaagtttctggggctcaggaagccctgggctctgacctgctgctccatgctgaattcccacctgctcccacaccatgagtgaccctgacatcccctccctaccccttcccagacccagagggctcagcaggagacactgagtgggaggaggaggaaatggaggccagcaggggctgagcggctccccagttcaatcccaaggctgagtagggctagtgccagccccgtgggccagagggggatgccagcaaccacacaccttggtgggatgcccttcaccttccaattgccaagtggccatggcctcatgcacagtgcatccgtggggcctccagagttggcccgagtggctggcgccctaattcctttaggctgaagcccaggagtgtttgccacccccacctcccacctgatcagtgaccatttggggtgtaaagacaacaatttcacagctctgatgatcagaaatgatgtaatggccacaggcggctccgcctgcgtcatccatgatttcatcacacacctcgggaggctcagggtgacagacagtgcatgcaaggtcacccggccaggaagtggccaggatggatgttagctcaggcctgaccagcccccggggccgcactgctgtcttcccgctaccctgcctctgggtccgtcctgttatccaggctggtgggggaagctcaggctgcagggccagctcctgctctcctcccacaccctccagcctggttcaagccataggcaccatctgggtcttcgtcctcatgcccagagccaggctctgtgcccagcttgttgcaggtctcatcaaaccctgacacagccttaggaggcagccccattgccatcttcactttacagaggaggaaactgaggctcagagaggctcccagcttgtgagaggaggggtctgagtaggtgcgcctgactccaaagcctgtgctcaccacagttcccagggatccgctctgagccaggcccctgtggccacccagcccctagccccgtagatcccaccccagtggggccccgggggcacatacctgggtgggctcagcagctccctctgcaggtggacccagggtgcggtgagactgggagcactgcccagttccccacactcacctttcacaacccaaccaatggcgccatcgagcaggaagggtgagaaagaggacacaggaagccagagtggtggggctgcagggtgggggcaggccagctcagcagagcctggggccagagggccagacagccacagagctcctggcgtgggcaaggctggccaaggatggcgacgcccaggggcctgggggccctgctcctgctcctcctgctcccgacctcaggtgagtggctggcacctcatcccctcctgccacgctgggccgaccctgccctgccgagggagggatccagggacagacgcagggactggagaaggtgaggagttggggtgtctgggatgtgtcctccgataccccccgtggccgcctcagcacctcctctagccctgtccctttgggtcagtcctgtccttccactaaaccttgctcaggactggtctcaggttccctttgttgctccacagtgccctggagataggggaggtcggagggtgctccctgactccccaacctgggctgtgtctccctgacaggcctggctctgagacaggggttggccccgggcaggcaattctccagctggcttgtgagatcctggggacgggattcggacactctggaagctgaggccaggaaggtctgtcacctcgttcttctggacctctcctcccgcacatgtcaccccacaccggctccctctcccagtctcagccacaacctcttggtcctcagtggcctgagccaggatccacactcctccccgtcactctcccgtctcacacacaaacacatggtgcgtctccagaggccatggaagtgcccgggccttgcctttgctggcctctctcccaggaaagctgtccccctaccccttgcccacttagccagctccatttacccttcttggcctctgtggcgtcttagcaaccctctcggacagagggaggtgctcccccgttagtgctccctcctcagtgctcctgtctcagggccttgcgggccactctcgttttgctcctgactcggtgaggggcctgcatgtccatctccctgtgtgtccagcgtgtggtcgcgtgactttggccacatagatcaacttatttggtcttcaaataaccctcttcttttcaaacattggaagattcagtggagtgaatcagtccctggctcaaaaaagggtgggagatgacagcactgtcctcctagtggccccgggaggccctggtacagagcaggccaccaggcagcccttgatagatgaatgaacggagccaccgatggcagctgtgaccagggctcatgggcgtcctcaggtcccagctgtcatcgctggttgggccttcaagcctcctccaggtgatgctgtttcccccatggtgatgtgggtgctctggttggggcagagcagcagccatttgattgagcaaggagctctgagaggtctacacacaggaaggtctgcacacttcctgtgtggacagtgatgtgttagtctccattctccatttgcgcattcattcattcattcattcattcaggaagcatcgatggtgccctctgctcctgctggtaccacttggcccctgccctcaaaaggctcacagtctgcaggagtgacacagtgtggtgggggctcgcatgtgagacccagctgttagggctgagcaaggggtggatgcaatggagggcctggcatgaagggacacgtgacaaaggtgcgggcagggcacggggagcaaggagggtggtcactgggcaggctggcacctggggcagccttcagcaccgtgaggtctaaaggggccaggagggagtggccccctgggcttctacagccagactgtggctacaggagggaaatggcggtggtttgctcacggtgagccagcaggggctgaaggagccatgcggggtgggggcaaatgcccactctgccctcctcctgccctctgacctccagtccactttccacttgctgacccccaaatgaggcagtccatggaggccaggctctggagcatagagggtctggagaggaggggagtgctatcccacccacaggcctagcacagggtctccttgtctacatgaaatgcttgcagtgtcttcaaagaataaacacagaaaagatatttaatgatcctgtctgtgtagggtgcttgccaagagcttcacttacatgcctgcgctgaaattcatggcaatccgggagggaggcctgcacctggacccattcatgacagcagggccgggatggcagagaatggcacccgtcctcaagctgacaatgttatctcccctcctctcctgtcctcttccttcccctctcaacccctcctcccctctcctctcttccctctccctgtttctgtcttcttcctcctctccctcttctccccttttttaaaaagccaacatagatcatactatattcatgctcatctatcattttcatttcccattaaacaatgcatcataaatatctttataaactaacagaaatttacagttcctttataaactatctaaaacgaattatcacatatagagtccattattacaaaatcccctctaaaatgttatttttttaccctgctgttactctttattcagccattatttttatcatgtcttttttgtcttaatgattaaaaatgaacagttttttaaaaaatgtgacagtaatactggacatgatttttaaaaaatcaaataccagggagggaaataaaaaatggaaagcagatgagcccctgcccgcctcagcccccagcaccacccatcgcagagggagctctcctaacacttcctgggggtggcaatccgaaaagtgacaatgcagagccaagacccacttcccaccctcaaagggagaaggatacaacaaagcacttcagagtaaaagacataaaagtggccgcagatatacaggtagatgctcaaactccttaaatggaaataagattcaatgtcatccctcagactagcaaaaatccaaaagttcagtaagctatagaataataggcatgtggatagtcactcttatccactttgagtgagagtataaataggtacaccattttctggagggaaattcaataatacccggcagttttttaaagcacatacagaaagtcctagaataggagtttttttttttttttttttttttttcgagacagagtctctctttgtcttccaagctggagtgcagtggtgtgatcttggctcactgcaacctccgcctcccgggttgaagcaattctcctgcctcagccttctgagtagctgagattacaggcacccaccaccacgtccggctaatttttgtatgtttagtagggcttccccatgctggccaggctggtctcaaactcctgacctcaggtgatccacccatctcggcctcccaaagtgctgggattataggcgtgagtcaccgcactcagccttcctggcggtgttttaaagcacatacagttagatacagaaagtcctaagataggaatgttttctatgagttctcaacacaagctgaaaagatgcacactcaagaattcttatggcagattgtgaaaaacaatgtccaccaagaggggaccggttaaaaaagtgttgcaatgcccatggaatggaatagtttgcaactatataaagaatgaggtggaaaagttcttcaagatatattgctagtccaagcgtggtagctcatgcctataaatcgcagcactttggaaggccagggtgagcggatcgcttgagcccaggggtttgagatcagcctgggcaacacagcaaaaccctgtctctaaaaaaataaaaataaacaacataaaaaaaggaaaaactagccaggcatggtggcatgtgcctgtagtcccagctacttgggaggctgaggttggaggatcgattgagcctgggaggtctaggctgcagtgagctgtgatcatgctactgcactccagcctgggtgacagagcaagactctgtctcaaaagaaaaaaaaaagatatattgttaagtgatcttatttgtgtaaatttaaaaaacgatgtatcggcagggcttggtggctcacacctgtaatccagcaatttgggcagctgaggcaggaggatcgcttgaggacaggagttcgagaccagcctgggcaacatagtgagaaccccctcttcttaattaaaacattttttccttaaaaaaatgatgtacttataaatacttgcatatgcataccttctgcaaaatttccagaaggctgtgcaataaaccgttaaagatggtaaactctttgaacacctacaatgagctatgtatgtcctttatctctaatccttcccaaaacttgcaaggaatgtattattagctccattttgctggcaaaagattgagcctcaggttgtttaagtaacttgcctcaggacatacagttagtagatgacccaaagcttccattttgtgccctgtattaggtgaaagggaaccgaactaaaagtcacaaaagctggtctttagtcctggagcagcctccaactagctagtaacctttctcaagtcattttgctcgaggggccttggtttgctgtattttctacctgtcccaggaggtagctgtgatggttgtgtgtgcttcttagcacaggtgtgagccaccacgccctgccaatacatcattttttaaatttacacaaataagatagtgtgaatgtgggagaatgaggcaaaccaagacagaatacatccaagagtttaaccaggaggccacagttgcaagggctttggaaggtctgatgtggaataactgaaaagccaggcagactccctggaggaaggggtaaaggagtaatagcacaaacatatgaaaccttttatttacagagccatgtgccaagccttttgtacatgctttccccaaagcatcctaccagccctgggagatggggtatttgcttttaccttggaaacagccccagagagggtctgcatcctgctcaagtgcaccgttagtgtgatgcatggagctggaattctagcccaaccaccagactctggagccccagctcctttccctgctcctcatccttgctgcccatcttcgtccagcccattcacactctctgcattccttccttaggtcaggaaaagcccaccgaagggccaagaaacacctgcctggggagcaacaacatgtacgacatcttcaacttgaatgacaaggctttgtgcttcaccaagtgcaggcagtcgggcagcgactcctgcaatgtggaaaacttgcagaggtgagggggccccctgagctggagggggaatctgaagctgctgggaggaggactatcaggaagggatggggccatcttcccccatggccccagaaaatgttgctcccatctgactcttccaccttgtttgacaccacagtccccctgacccaacatccccattctagcagttggggtacctactgatctagggtattcagagatgaatccactcctatcctggcccttgggagttgtggaatgacagacacagacccaaataatgatgactccagagtgtatacagaatggcagacaaggtgccaggttagcccagaggagggaagttggccaaggcttcacagaggaggaaacctggaaagggctttgagggtgcacaggagttttccagctggatctaaacaatggtgaggatacaggcaacagaacttgaaagtaatgggggataactgcaatgctttgaactgtaacaatgtaaaccgcgtggggatggaagagacaatgggcagatgcgatgggtgggagataggactggaaatataagcagagactaaggtgtgaagggttgtgtaagttataccaatgggtgagggcggcagggcaatgacatattttaagcgcagggagagtatagtcaactctgcgttttggaatgattgctcaggcttcagggaccggtgatgcaggaagacatgacccagtaggatgcatcacaggggtctgggtgggagtgagggccaagtcagcaccactagcagcaattggcattgcgtgcttggaaaggagagatggattggggagatgatacgatgtagactccgtaagacaagagactggttagatgtgggggtgagggaaatgaaggggtttagaatacaacatctttaggagccatctccaaaaatatctctgcctctctttccttttcccactcctaatcaaagttgcccataactcttctgggatgcctagaaaagcacgtggcttacattagtacttaataaatatgtgttaaaggaatgagttaaagccctgcgctctcaggcttggtgttaggacagccatctcattggatcatgttatttcagtggcctgaaaaggcttccattcccacctgcaggtgatccaggagcttcttagcaccccagagctgttcagaggctcctctttgtgctgcccaggtatatgcccaaaagaatttaaaacaagtctccaaacaaaagcttatacatgggccaggcacggcggctcacacaagtaatcctagcactttgggaggccgaggtgggcagatcacttgaggtcgggagtttgagaccagcctggccaacatggtgaaaccctgtctctactgaaaatacaaaaaaaaaaaaaaaaaattgccaggcttggtgacaggcgcctgtaatcccagctactcgggaggctgaggtgggagaattgcttgaacccaggaggtaaaggttgcagtgacctgagatcactccactgcactccagcctgggcgacagagtgagactccatctcaaaaaaaaaaaaaaaaaagcagcagcagcagcagcagcagcatcttgtacgtgaatatttgtagcagcacttttcacagtagccaaaaaaaaaagaggaaaatacccaaatgtccctcaatggataacggcataattaaaatatgatctctccatatgatgaaat

SEQ ID NO: 333 - DNA, 3905 bp, Homo sapiens
gggcaggagaggggtgtctccccaccaaacaaacccggtccctccctctccgcactagctgtctgccctgccctgccgtaggagatgggctgggagcctcccacgctctccagctcactcggcaggcagcggggaccagggctggcaggttaagcctctgggggtggatcctgaaaggtggtccagccgcctggccctgcgtgggaccctccacctggcagcaggtggtgacttccaagagtgactccgtcggaggaaaatgactccccagtcgctgctgcagacgacactgttcctgctgagtctgctcttcctggtccaaggcaggtgcccacggcaggggccacagggaagactttcgcttctgcagccagcggaaccagacacacaggagcagcctccactacaaacccacaccagacctgcgcatctccatcgagaactccgaagaggccctcacagtccatgcccctttccctgcagcccaccctgcttcccgatccttccctgaccccaggggcctctaccacttctgcctctactggaaccgacatgctgggagattacatcttctctatggcaagcgtgacttcttgctgagtgacaaagcctctagcctcctctgcttccagcaccaggaggagagcctggctcagggccccccgctgttagccacttctgtcacctcctggtggagccctcagaacatcagcctgcccagtgccgccagcttcaccttctccttccacagtcctccccacacggccgctcacaatgcctcggtggacatgtgcgagctcaaaagggacctccagctgctcagccagttcctgaagcatccccagaaggcctcaaggaggccctcggctgcccccgccagccagcagttgcagagcctggagtcgaaactgacctctgtgagattcatgggggacatggtgtccttcgaggaggaccggatcaacgccacggtgtggaagctccagcccacagccggcctccaggacctgcacatccactcccggcaggaggaggagcagagcgagatcatggagtactcggtgctgctgcctcgaacactcttccagaggacgaaaggccggagcggggaggctgagaagagactcctcctggtggacttcagcagccaagccctgttccaggacaagaattccagccaagtcctgggtgagaaggtcttggggattgtggtacagaacaccaaagtagccaacctcacggagcccgtggtgctcactttccagcaccagctacagccgaagaatgtgactctgcaatgtgtgttctgggttgaagaccccacattgagcagcccggggcattggagcagtgctgggtgtgagaccgtcaggagagaaacccaaacatcctgcttctgcaaccacttgacctactttgcagtgctgatggtctcctcggtggaggtggacgccgtgcacaagcactacctgagcctcctctcctacgtgggctgtgtcgtctctgccctggcctgccttgtcaccattgccgcctacctctgctccaggaggaaacctcgggactacaccatcaaggtgcacatgaacctgctgctggccgtcttcctgctggacacgagcttcctgctcagcgagccggtggccctgacaggctctgaggctggctgccgagccagtgccatcttcctgcacttctccctgctcacctgcctttcctggatgggcctcgaggggtacaacctctaccgactcgtggtggaggtctttggcacctatgtccctggctacctactcaagctgagcgccatgggctggggcttccccatctttctggtgacgctggtggccctggtggatgtggacaactatggccccatcatcttggctgtgcataggactccagagggcgtcatctacccttccatgtgctggatccgggactccctggtcagctacatcaccaacctgggcctcttcagcctggtgtttctgttcaacatggccatgctagccaccatggtggtgcagatcctgcggctgcgcccccacacccaaaagtggtcacatgtgctgacactgctgggcctcagcctggtccttggcctgccctgggccttgatcttcttctcctttgcttctggcaccttccagcttgtcgtcctctaccttttcagcatcatcacctccttccaaggcttcctcatcttcatctggtactggtccatgcggctgcaggcccggggtggcccctcccctctgaagagcaactcagacagcgccaggctccccatcagctcgggcagcacctcgtccagccgcatctaggcctccagcccacctgcccatgtgatgaagcagagatgcggcctcgtcgcacactgcctgtggcccccgagccaggcccagccccaggccagtcagccgcagactttggaaagcccaacgaccatggagagatgggccgttgccatggtggacggactcccgggctgggcttttgaattggccttggggactactcggctctcactcagctcccacgggactcagaagtgcgccgccatgctgcctagggtactgtccccacatctgtcccaacccagctggaggcctggtctctccttacaacccctgggcccagccctcattgctgggggccaggccttggatcttgagggtctggcacatccttaatcctgtgcccctgcctgggacagaaatgtggctccagttgctctgtctctcgtggtcaccctgagggcactctgcatcctctgtcattttaacctcaggtggcacccagggcgaatggggcccagggcagaccttcagggccagagccctggcggaggagaggccctttgccaggagcacagcagcagctcgcctacctctgagcccaggccccctccctccctcagccccccagtcctccctccatcttccctggggttctcctcctctcccagggcctccttgctccttcgttcacagctgggggtccccgattccaatgctgttttttggggagtggtttccaggagctgcctggtgtctgctgtaaatgtttgtctactgcacaagcctcggcctgcccctgagccaggctcggtaccgatgcgtgggctgggctaggtccctctgtccatctgggcctttgtatgagctgcattgcccttgctcaccctgaccaagcacacgcctcagaggggccctcagcctctcctgaagccctcttgtggcaagaactgtggaccatgccagtcccgtctggtttccatcccaccactccaaggactgagactgacctcctctggtgacactggcctagagcctgacactctcctaagaggttctctccaagcccccaaatagctccaggcgccctcggccgcccatcatggttaattctgtccaacaaacacacacgggtagattgctggcctgttgtaggtggtagggacacagatgaccgacctggtcactcctcctgccaacattcagtctggtatgtgaggcgtgcgtgaagcaagaactcctggagctacagggacagggagccatcattcctgcctgggaatcctggaagacttcctgcaggagtcagcgttcaatcttgaccttgaagatgggaaggatgttctttttacgtaccaattcttttgtcttttgatattaaaaagaagtacatgttcattgtagagaatttggaaactgtagaagagaatcaagaagaaaaataaaaatcagctgttgtaatcgcctagcaaactggcgtaagcattttgggtcatttccttctgagctttttcctgtgcttctattgaaagagtcactgatactgatacaaataccttggggccaatcaggaaacatgaaagagagaagagggctgtgtgtgaa

SEQ ID NO: 334 - protein, 504 aa, Homo sapiens
MCELKRDLQLLSQFLKHPQKASRRPSAAPASQQLQSLESKLTSVRFMGDMVSFEEDRINATVWKLQPTAGLQDLHIHSRQEEEQSEIMEYSVLLPRTLFQRTKGRSGEAEKRLLLVDFSSQALFQDKNSSQVLGEKVLGIVVQNTKVANLTEPVVLTFQHQLQPKNVTLQCVFWVEDPTLSSPGHWSSAGCETVRRETQTSCFCNHLTYFAVLMVSSVEVDAVHKHYLSLLSYVGCVVSACLVTIAAYLCSRRKPRDYTIKVHMNLLLAVFLLDTSFLLSEPVTGSEAGCRASAIFLHFSLLTCLSWMGLEGYNLYRLVVEVFGTYVPGYLLKLSAMGWGFPIFLVTLVVDVDNYGPIILAVHRTPEGVIYPSMCWIRDSLVSYITNLGLFSLVFLFNMAMLATMVVQILRLRPHTQKWSHVLTLLGLSLVLGLPWALIFFSFASGTFQLVVLYLFSIITSFQGFLIFIWYWSMRLQRGPSPLKSNSDSARLPISSGSTSSSRI

SEQ ID NO: 335 - DNA, 3789 bp, Homo sapiens
ctcccaacagcctgggcggccgctgagacccagagaacccaaggactcccctgggctcatccagcagcctctgcttcccaggagagaggtgctgaagtccacgaagaggtggtgacttccaagagtgactccgtcggaggaaaatgactccccagtcgctgctgcagacgacactgttcctgctgagtctgctcttcctggtccaaggcaggtgcccacggcaggggccacagggaagactttcgcttctgcagccagcggaaccagacacacaggagcagcctccactacaaacccacaccagacctgcgcatctccatcgagaactccgaagaggccctcacagtccatgcccctttccctgcagcccaccctgcttcccgatccttccctgaccccaggggcctctaccacttctgcctctactggaaccgacatgctgggagattacatcttctctatggcaagcgtgacttcttgctgagtgacaaagcctctagcctcctctgcttccagcaccaggaggagagcctggctcagggccccccgctgttagccacttctgtcacctcctggtggagccctcagaacatcagcctgcccagtgccgccagcttcaccttctccttccacagtcctccccacacggccgctcacaatgcctcggtggacatgtgcgagctcaaaagggacctccagctgctcagccagttcctgaagcatccccagaaggcctcaaggaggccctcggctgcccccgccagccagcagttgcagagcctggagtcgaaactgacctctgtgagattcatgggggacatggtgtccttcgaggaggaccggatcaacgccacggtgtggaagctccagcccacagccggcctccaggacctgcacatccactcccggcaggaggaggagcagagcgagatcatggagtactcggtgctgctgcctcgaacactcttccagaggacgaaaggccggagcggggaggctgagaagagactcctcctggtggacttcagcagccaagccctgttccaggacaagaattccagccaagtcctgggtgagaaggtcttggggattgtggtacagaacaccaaagtagccaacctcacggagcccgtggtgctcactttccagcaccagctacagccgaagaatgtgactctgcaatgtgtgttctgggttgaagaccccacattgagcagcccggggcattggagcagtgctgggtgtgagaccgtcaggagagaaacccaaacatcctgcttctgcaaccacttgacctactttgcagtgctgatggtctcctcggtggaggtggacgccgtgcacaagcactacctgagcctcctctcctacgtgggctgtgtcgtctctgccctggcctgccttgtcaccattgccgcctacctctgctccaggaggaaacctcgggactacaccatcaaggtgcacatgaacctgctgctggccgtcttcctgctggacacgagcttcctgctcagcgagccggtggccctgacaggctctgaggctggctgccgagccagtgccatcttcctgcacttctccctgctcacctgcctttcctggatgggcctcgaggggtacaacctctaccgactcgtggtggaggtctttggcacctatgtccctggctacctactcaagctgagcgccatgggctggggcttccccatctttctggtgacgctggtggccctggtggatgtggacaactatggccccatcatcttggctgtgcataggactccagagggcgtcatctacccttccatgtgctggatccgggactccctggtcagctacatcaccaacctgggcctcttcagcctggtgtttctgttcaacatggccatgctagccaccatggtggtgcagatcctgcggctgcgcccccacacccaaaagtggtcacatgtgctgacactgctgggcctcagcctggtccttggcctgccctgggccttgatcttcttctcctttgcttctggcaccttccagcttgtcgtcctctaccttttcagcatcatcacctccttccaaggcttcctcatcttcatctggtactggtccatgcggctgcaggcccggggtggcccctcccctctgaagagcaactcagacagcgccaggctccccatcagctcgggcagcacctcgtccagccgcatctaggcctccagcccacctgcccatgtgatgaagcagagatgcggcctcgtcgcacactgcctgtggcccccgagccaggcccagccccaggccagtcagccgcagactttggaaagcccaacgaccatggagagatgggccgttgccatggtggacggactcccgggctgggcttttgaattggccttggggactactcggctctcactcagctcccacgggactcagaagtgcgccgccatgctgcctagggtactgtccccacatctgtcccaacccagctggaggcctggtctctccttacaacccctgggcccagccctcattgctgggggccaggccttggatcttgagggtctggcacatccttaatcctgtgcccctgcctgggacagaaatgtggctccagttgctctgtctctcgtggtcaccctgagggcactctgcatcctctgtcattttaacctcaggtggcacccagggcgaatggggcccagggcagaccttcagggccagagccctggcggaggagaggccctttgccaggagcacagcagcagctcgcctacctctgagcccaggccccctccctccctcagccccccagtcctccctccatcttccctggggttctcctcctctcccagggcctccttgctccttcgttcacagctgggggtccccgattccaatgctgttttttggggagtggtttccaggagctgcctggtgtctgctgtaaatgtttgtctactgcacaagcctcggcctgcccctgagccaggctcggtaccgatgcgtgggctgggctaggtccctctgtccatctgggcctttgtatgagctgcattgcccttgctcaccctgaccaagcacacgcctcagaggggccctcagcctctcctgaagccctcttgtggcaagaactgtggaccatgccagtcccgtctggtttccatcccaccactccaaggactgagactgacctcctctggtgacactggcctagagcctgacactctcctaagaggttctctccaagcccccaaatagctccaggcgccctcggccgcccatcatggttaattctgtccaacaaacacacacgggtagattgctggcctgttgtaggtggtagggacacagatgaccgacctggtcactcctcctgccaacattcagtctggtatgtgaggcgtgcgtgaagcaagaactcctggagctacagggacagggagccatcattcctgcctgggaatcctggaagacttcctgcaggagtcagcgttcaatcttgaccttgaagatgggaaggatgttctttttacgtaccaattcttttgtcttttgatattaaaaagaagtacatgttcattgtagagaatttggaaactgtagaagagaatcaagaagaaaaataaaaatcagctgttgtaatcgcctagcaaactggcgtaagcattttgggtcatttccttctgagctttttcctgtgcttctattgaaagagtcactgatactgatacaaataccttggggccaatcaggaaacatgaaagagagaagagggctgtgtgtgaa

SEQ ID NO: 336 - protein, 504 aa, Homo sapiens; identical to SEQ ID NO: 334

SEQ ID NO: 337 - DNA, 2824 bp, Homo sapiens
ttgagacagggtctcgctctgtcacacaggctggagtgcagtggtgtgatcttggctcatcgtaacctccacctcccgggttcaagtgattctcatgcctcagcctcccgagtagctgggattacaggtggtgacttccaagagtgactccgtcggaggaaaatgactccccagtcgctgctgcagacgacactgttcctgctgagtctgctcttcctggtccaaggcaggtgcccacggcaggggccacagggaagactttcgcttctgcagccagcggaaccagacacacaggagcagcctccactacaaacccacaccagacctgcgcatctccatcgagaactccgaagaggccctcacagtccatgcccctttccctgcagcccaccctgcttcccgatccttccctgaccccaggggcctctaccacttctgcctctactggaaccgacatgctgggagattacatcttctctatggcaagcgtgacttcttgctgagtgacaaagcctctagcctcctctgcttccagcaccaggaggagagcctggctcagggccccccgctgttagccacttctgtcacctcctggtggagccctcagaacatcagcctgcccagtgccgccagcttcaccttctccttccacagtcctccccacacggccgctcacaatgcctcggtggacatgtgcgagctcaaaagggacctccagctgctcagccagttcctgaagcatccccagaaggcctcaaggaggccctcggctgcccccgccagccagcagttgcagagcctggagtcgaaactgacctctgtgagattcatgggggacatggtgtccttcgaggaggaccggatcaacgccacggtgtggaagctccagcccacagccggcctccaggacctgcacatccactcccggcaggaggaggagcagagcgagatcatggagtactcggtgctgctgcctcgaacactcttccagaggacgaaaggccggagcggggaggctgagaagagactcctcctggtggacttcagcagccaagccctgttccaggacaagaattccagccaagtcctgggtgagaaggtcttggggattgtggtacagaacaccaaagtagccaacctcacggagcccgtggtgctcactttccagcaccagctacagccgaagaatgtgactctgcaatgtgtgttctgggttgaagaccccacattgagcagcccggggcattggagcagtgctgggtgtgagaccgtcaggagagaaacccaaacatcctgcttctgcaaccacttgacctactttgcagtgctgatggtctcctcggtggaggtggacgccgtgcacaagcactacctgagcctcctctcctacgtgggctgtgtcgtctctgccctggcctgccttgtcaccattgccgcctacctctgctccagggtgcccctgccgtgcaggaggaaacctcgggactacaccatcaaggtgcacatgaacctgctgctggccgtcttcctgctggacacgagcttcctgctcagcgagccggtggccctgacaggctctgaggctggctgccgagccagtgccatcttcctgcacttctccctgctcacctgcctttcctggatgggcctcgaggggtacaacctctaccgactcgtggtggaggtctttggcacctatgtccctggctacctactcaagctgagcgccatgggctggggcttccccatctttctggtgacgctggtggccctggtggatgtggacaactatggccccatcatcttggctgtgcataggactccagagggcgtcatctacccttccatgtgctggatccgggactccctggtcagctacatcaccaacctgggcctcttcagcctggtgtttctgttcaacatggccatgctagccaccatggtggtgcagatcctgcggctgcgcccccacacccaaaagtggtcacatgtgctgacactgctgggcctcagcctggtccttggcctgccctgggccttgatcttcttctcctttgcttctggcaccttccagcttgtcgtcctctaccttttcagcatcatcacctccttccaaggcttcctcatcttcatctggtactggtccatgcggctgcaggcccggggtggcccctcccctctgaagagcaactcagacagcgccaggctccccatcagctcgggcagcacctcgtccagccgcatctaggcctccagcccacctgcccatgtgatgaagcagagatgcggcctcgtcgcacactgcctgtggcccccgagccaggcccagccccaggccagtcagccgcagactttggaaagcccaacgaccatggagagatgggccgttgccatggtggacggactcccgggctgggcttttgaattggccttggggactactcggctctcactcagctcccacgggactcagaagtgcgccgccatgctgcctagggtactgtccccacatctgtcccaacccagctggaggcctggtctctccttacaacccctgggcccagccctcattgctgggggccaggccttggatcttgagggtctggcacatccttaatcctgtgcccctgcctgggacagaaatgtggctccagttgctctgtctctcgtggtcaccctgagggcactctgcatcctctgtcattttaacctcaggtggcacccagggcgaatggggcccagggcagaccttcagggccagagccctggcggaggagaggccctttgccaggagcacagcagcagctcgcctacctctgagccc

SEQ ID NO: 338 - protein, 510 aa, Homo sapiens
MCELKRDLQLLSQFLKHPQKASRRPSAAPASQQLQSLESKLTSVRFMGDMVSFEEDRINATVWKLQPTAGLQDLHIHSRQEEEQSEIMEYSVLLPRTLFQRTKGRSGEAEKRLLLVDFSSQALFQDKNSSQVLGEKVLGIVVQNTKVANLTEPVVLTFQHQLQPKNVTLQCVFWVEDPTLSSPGHWSSAGCETVRRETQTSCFCNHLTYFAVLMVSSVEVDAVHKHYLSLLSYVGCVVSACLVTIAAYLCSRVPLPCRRKPRDYTIKVHMNLLLAVFLLDTSFLLSEPVTGSEAGCRASAIFLHFSLLTCLSWMGLEGYNLYRLVVEVFGTYVPGYLLKLSAMGWGFPIFLVTLVVDVDNYGPIILAVHRTPEGVIYPSMCWIRDSLVSYITNLGLFSLVFLFNMAMLATMVVQILRLRPHTQKWSHVLTLLGLSLVLGLPWALIFFSFASGTFQLVVLYLFSIITSFQGFLIFIWYWSMRLQRGPSPLKSNSDSARLPISSGSTSSSRI

SEQ ID NO: 339 - DNA, 2824 bp, Homo sapiens
ttaaagcagggtctcactctgtcacccaggctggagtgcagtggcgcagttatagctcactgcagcctcgacctcctgggctcaagtgatccttccacctcagcctccctagtagctgggaccacaggtggtgacttccaagagtgactccgtcggaggaaaatgactccccagtcgctgctgcagacgacactgttcctgctgagtctgctcttcctggtccaaggcaggtgcccacggcaggggccacagggaagactttcgcttctgcagccagcggaaccagacacacaggagcagcctccactacaaacccacaccagacctgcgcatctccatcgagaactccgaagaggccctcacagtccatgcccctttccctgcagcccaccctgcttcccgatccttccctgaccccaggggcctctaccacttctgcctctactggaaccgacatgctgggagattacatcttctctatggcaagcgtgacttcttgctgagtgacaaagcctctagcctcctctgcttccagcaccaggaggagagcctggctcagggccccccgctgttagccacttctgtcacctcctggtggagccctcagaacatcagcctgcccagtgccgccagcttcaccttctccttccacagtcctccccacacggccgctcacaatgcctcggtggacatgtgcgagctcaaaagggacctccagctgctcagccagttcctgaagcatccccagaaggcctcaaggaggccctcggctgcccccgccagccagcagttgcagagcctggagtcgaaactgacctctgtgagattcatgggggacatggtgtccttcgaggaggaccggatcaacgccacggtgtggaagctccagcccacagccggcctccaggacctgcacatccactcccggcaggaggaggagcagagcgagatcatggagtactcggtgctgctgcctcgaacactcttccagaggacgaaaggccggagcggggaggctgagaagagactcctcctggtggacttcagcagccaagccctgttccaggacaagaattccagccaagtcctgggtgagaaggtcttggggattgtggtacagaacaccaaagtagccaacctcacggagcccgtggtgctcactttccagcaccagctacagccgaagaatgtgactctgcaatgtgtgttctgggttgaagaccccacattgagcagcccggggcattggagcagtgctgggtgtgagaccgtcaggagagaaacccaaacatcctgcttctgcaaccacttgacctactttgcagtgctgatggtctcctcggtggaggtggacgccgtgcacaagcactacctgagcctcctctcctacgtgggctgtgtcgtctctgccctggcctgccttgtcaccattgccgcctacctctgctccagggtgcccctgccgtgcaggaggaaacctcgggactacaccatcaaggtgcacatgaacctgctgctggccgtcttcctgctggacacgagcttcctgctcagcgagccggtggccctgacaggctctgaggctggctgccgagccagtgccatcttcctgcacttctccctgctcacctgcctttcctggatgggcctcgaggggtacaacctctaccgactcgtggtggaggtctttggcacctatgtccctggctacctactcaagctgagcgccatgggctggggcttccccatctttctggtgacgctggtggccctggtggatgtggacaactatggccccatcatcttggctgtgcataggactccagagggcgtcatctacccttccatgtgctggatccgggactccctggtcagctacatcaccaacctgggcctcttcagcctggtgtttctgttcaacatggccatgctagccaccatggtggtgcagatcctgcggctgcgcccccacacccaaaagtggtcacatgtgctgacactgctgggcctcagcctggtccttggcctgccctgggccttgatcttcttctcctttgcttctggcaccttccagcttgtcgtcctctaccttttcagcatcatcacctccttccaaggcttcctcatcttcatctggtactggtccatgcggctgcaggcccggggtggcccctcccctctgaagagcaactcagacagcgccaggctccccatcagctcgggcagcacctcgtccagccgcatctaggcctccagcccacctgcccatgtgatgaagcagagatgcggcctcgtcgcacactgcctgtggcccccgagccaggcccagccccaggccagtcagccgcagactttggaaagcccaacgaccatggagagatgggccgttgccatggtggacggactcccgggctgggcttttgaattggccttggggactactcggctctcactcagctcccacgggactcagaagtgcgccgccatgctgcctagggtactgtccccacatctgtcccaacccagctggaggcctggtctctccttacaacccctgggcccagccctcattgctgggggccaggccttggatcttgagggtctggcacatccttaatcctgtgcccctgcctgggacagaaatgtggctccagttgctctgtctctcgtggtcaccctgagggcactctgcatcctctgtcattttaacctcaggtggcacccagggcgaatggggcccagggcagaccttcagggccagagccctggcggaggagaggccctttgccaggagcacagcagcagctcgcctacctctgagccc

SEQ ID NO: 340 - protein, 510 aa, Homo sapiens; identical to SEQ ID NO: 338

SEQ ID NO: 341 - DNA, 91278 bp, Mus musculus
  misc_feature (1)...(91278): n = A,T,C or G
aagtatcttgatcctaataaatagagttcctggttaaggcagatgttactaagaattgactgagagaaagctggacatctgagtatgaaataaattcagatcatggagctgatctgcagttttcttgtcaaggtctgaaataaaatgatcaggtcaaagccattttgaaactgaaatttctcacgtcaactaatggtcactcattgccaggctcatggggtgatgtcagaggcattgtattgtgattggggaggtggggggcatgcacaaggaaaatcacaggcctcgggatcccagcttagacaagtggtcaggatggctccaagagacaaggagctggactgtgtctgttaaagacatcaaagttacaaatacagaatgacatgaaagaaccaggtttactctgcagcaaatgtttctctggtgggtaattcccatacagaagatcttttgatgttgttgtttacaagtcagagtaccatctcaacttcaagcaatgtcctcagcctattaaaccctctcatctctccctttgttggcttcttttgtgaaaaataaggaattcccctacttgaagttaagatccatttagaaattctgtctgcgaaagattattaaatgacattttgaaatctgaaaaaattttctactaaatacagttctcttcttaatagaagcctggtgctgtggatagtctggaaggagagtctactgtgagatagaaaaatttaatctcacccctaccttcaggcttttagattataaatagttgatgggactcaaagctacagaaattgtcattcacaacagcatggaccccatgataaggattcacttcagtagagccaattaaatttcattagacttaataaaagtgtgtttcaccctcttgtgagactattgttacttaactggatggttaaagtggaattcaagggctttatagatacttccacttcacccatttaaacatatcatgagtcttgtggaagtgacagttgtataagattatgatttcagattcccacaattcccattatgccttgttttgtctattgcaaggtggttcatggctctgtgacttggctatacctgctagccttaaagaattcttcaaagctcagaatccttaaagtacagccattactttattaattgtggagattttagtcagttttactagaacccattcacaattattgtcatcagtacatgttactatgtctcaagagtaagaaaaatatccatccttctgaaaaatattgaaatatgattttgttctgatacttatacttgaatttggatagatcagtgagcctagaaattattttaaataaaacctttaactctgaaaatatgacttacttggttctagaagggcattctatctgattttcttccttctgcctcatgtcttactgttatgcaattatggatatgataagtcctgagctaggaagagtggccatcaatatctactaaagatagggaaagactaaagagctagaatttccatagtttccttaatttatgagagaaaaatttaagtctgaagccagctaagtcagaagttaaagtagatttcctttatcaacctataaagacaatacatcaggggttatttcatgattatttagagcaaagtctttctctggtggcttcaggtcctgatacatggatagcatccatctaagcacacaggaaaaggacagtaaacaatgagtagaaagtggaaagaccaaccagccctggagtctcatttggtcagtttttaacagttcacctcttcaaacctctgcctctttaagactccacatgcagtagttgtgaaccacagacccttctgcccattcacagtgactgctcagggcaactccactctcctcctgccccagcgctttctgcctagctcctgggcttcagctttgcctctggtcttgtacttcaacttcgtagttgaatggattgatattggtttcatgaattgcaagaggttcttattcctgtttggcctcacttctgtattgagacctgaaacttgccactactttgatgtctatttctctggataggtcagtccagtccttttgagggatactgtgaggagcaggaatataccagcagtcagttaacatcatgtaagccattgtctcacctaaataatgtagataattgtatttacagttttctttctagcagttgaagttagtgttgctgtgtgagccactgagggtgctcctttatataaggacagcacttcttgctatccagacacatttttcagtgctgtattgtattgttttcatactctttatcttttttattattttatcattattttgtttgtttgttttacttttccatttttggtatgtttggggctttttttttttttgagagagagagacagagacagagacagagagatacacaaacatagagagacagagacagggacagaggaagaggaagagaaaacatgttgggtaggtgaggaggtagggaggacggaggaggagttgatgaaaaggaaagagtaggataaaatatattgtatgaaaaaactttaagaaaatataaattatacgaaaagcatcaactaagattgactaaattcacagagcaatagaagcctgcagtttacagttccgctattgagctccagctgcactgcagacttctggcatgaatttgtgatctctgcttcctggagaatcagtggtactctctgagccgcaggcagatgccagcgtgttgatacaaagccatcagtgcttctcacccttttgacctggctcctctgcttccgttctatgttctcatgttatctcacattatgtctgtctgtatgtatgtctgtctgtgtttgaacagggggagaacatgtgcatgtattcatgcacacttgtatgtgcatgtatatgacagccagagatcaaccaggcaagactcccttgattgttttcctttgcattctttgacacaaggtctctccctaaacttggagctccttgattcagcttggctgacagggagtttcctgtctctcaaccttagtcccactactggacttacagacacagccatgtttgacttttatgtgggttctgggaagccaaactcagggtcatatgctgacagccatctccacagccccaacatttccttttattaagagttcagtcaggcagtggtgatacacacctttaatccaagcacttggcaggcagaggcaaaaggatcactgagtttaaggcaagcctggtctatttctgagagagagagagagagagagagagagagagagagagagagagagagagagattatcaaatccacagacttctcagtctttctatgatgacttaacattcagtcatctctaggagaactttccatgttctctgattttaagctttatccaagtctgtaattctgtggctttaaaaatgttcttggttttattgttattgttgttttgtgagacttgccctaagatctatttgtgcaagttactagtctagattttatttttgcagtactcacttatgtatgagaagaacaaatttcaggttaagcctaaaatgaaaatcacatcagcactttcaaaacagcttcatgtagtcttggctggcacgttgtggtctgtattgttctctatgtcccatacagagccctgtgggatttcaagcttcgctactgtgcacttcatagttatttcggtgcagattaggaaaatgtgcctataaactataaactataaaattttttgtaataaccaatttacattttgatcattcacaagaggacatatacatgtgtgcacacagggaaatgaatcctgggagacgcaattgagaaacactgggtaaagtactgtccaacagccctgggagggcaggttaaccattttgattctgcatacatgtgagtcagtacagcagatagacagaagacagagatggatagagataacaaggggtatagacatagacgacgataggaaatagatacttttgtatttgtatatgaaaactttaaaactatatgtgccgttctatactgaagatttcccagatccccgtttaacccagaaagctgtagatttccatgtaaatcataaacagggtaaatatcattagtaatgttccctatattttactaatctaaaatataatgattttcccaaagtttttcctggatttgaagcatcttgggaaactagcattctgagttatttctcttgtttcccactactgtcccttgaaagctgaggcctctgtcccagtttacattcttgctatcttctgcttctgatactttggtccctggtgtgttcttatctctttcatcttgtcagcaagaactcatctgagtaagactccagtttggtctggcaaaaaggaagaaaatgaaagaggaaaggaagtttatttagggttaaactgaatgcttcctgacaacactactgtatcttatttgatgctaaccatgtatctgctgggttaggccctttgaaattactttctggtttcaaactcacatatcctgtttttctaagtactcgtgtgttaggctatgtccttgatatttgtgtgtgtgcaaagtctttaggatatatgtaaataaattcttgttgtatcgtatcattttatctgcaaacaattctcttatactttttctccactccctcttctaaaactcctataagctttgttttcagccaaggtcatatgtacagagtcctgagataaagacactattgcacaaaatacattttcatggtctctgccctctgatagcaaaagaggggaatactgtgagcagtgtcttgtgaactgttggcatcttacatgaaccagttgttaaatcattccagtgcataaatccaatcttccaggtcagattacttatgagataaaacgttgtcacataataaccatgtgctctgagacaggaatggccttacacaaggtcctttatacactgtaacaagagaagcaattgtttctgcatgtgaactcaagcatgaaacagacttggtttaagtagttatcaagtatcaagcagtttctagactttaaattttgaaaaaaaagtggttaaaaaatgaaattgatgaaaactacccatctactataaacaagttgctctgaacatattagctagaagaaatttctcctactattaaatgtattgtctgtaccttcttgcctggcatccagcagttccttgtttggggtcattacttgataagaggaaaaaatattggctatgtttgaactgtgcaaaaagttagtttgaatgagacctcccatggaagtcattaagacaagaacttaataggagtttgagttgattcatgggaggaacaactagaagtatcagaggtagaaagtataatgatgatgtaacaccagaaaaaatatatctttaaatatttatcagggtaccagaaagtgaaaaattgaaaaggggaaatatttattatttactcttggagtcctttattgaaattcacaagtgccctctgtcctttatcattccatcttgttatctctcactaacacatagctaatgctctagacatttgctgaactactgaataaataaacagaaaatatgcacagaaacagcacctaacactgctgttaagatagaagactggcacttcttgcttcttgttggcaactttactactgtggggaacaaagttccacattgtgattccacaagagtgctccttaaacccacacttggacacacaagtcattgtggggaaggagatatattccaaggatagattataggaaggcagagagatgataaaattttcccttatgcacatgttattattttatagtaattgaaaacatataataaaagacagcttaagacactacttgctagcagtgtcttgctaaatgtgccaacaataacttagacttgactgtaaaacatagccagcatcacccaaaaagacttcttgccctagcctgcaatgttctacttcctctctgcaagttgtttttgttttccattatctcagccacctagactaaaagtaacagtgccttccactttacccttctctgttacactacatcactgcagcaacacacacacgcacacactcacacatgcacacacacacacacatgcacacatgcacatacatgcacacgcacacgcacacacacatgcacacacgcatacacatgcacactcacacacgcacacactcacacacacacacaccaaatgtacttcatccactctttcattttccctatctcacatgtagggctcagaattgatttttaggtccaaattacttgtatgttgtcactacctatactcagcccatcttacatgacagtccctttggaccacattacactgttccccaaaacaaacacattatttttctgttataaagcgcttgaggctaggatttgcttttatacatttcaagtcccttccactatgaattagtgatgctcacgtaagagacaccagcagagatacccgttgggtgcctactacaggccagcagcagctgtgtggctggaacagcagtagcagctccagtttcttttcattctagcaaaggcacagggaaaatgaaatgtgagagtccaatagaaagtgaacagaacagggaggctttacattggatgggaagaaaaaaaaatctctttagcaagggagaaagagagaaaaccaggagggaagaagggaagaggaagggaaagaaaaaaaacatgcgaagtcagagaatggctgtgtgcccaggtagagtgtcaagacagtcaaagacccggaggatgatggaagggccttggggaacttcaggaattagggagcagagatggcctaagtgaatggggtccaaggaagagggacaggtttgggatagtctgggactacatcacaaggatgaaaacgagtcatcaagggagagtgccactgaggaaagagaacattaatttgggagtttataaagcagttccaaagccttaacgcttgaggcttgtatgtgactatcctctgaacctagcaactgccaccttgtggaggtcagcttgtccctcttgcaaactgattatcccaaatggacctgttgactgtttaaacaacacatggagaagtgaggagggtcggagaccctgagtatccagctgctccctaccacctggtgtatgaaagcctgtttgagttgctatcctttgaaggaggggctgaattaagtaatctccaaaagactgggagtgggtctccattgatgcctctacaaggaacccttcagtctgctggttttccaggtgtggtgtgttgggaaagagaacccacatattagtaagtaactctcacttatgcttcggaagaaacacaaccaacatatagattcctgtgctgggtatgtcaacttgactcaacctacagtcacctgagaggaagaaatctcaattgacaaattgcttccataagatgtgggctgtaggcaagcaagcaagccggtaggactttttaaatgttttttttttctttttcatgtaatgatagagtgtgggacagtccaacccactgtgggtggtaccacctccaccctgggctggtgttcttaggcaccataagaaagccagttaagtgagctaccagaagcaagacagtgggttctccatcagctcctgcctccaagttcctgcccagtttgagttcctgttttggtttccccttatgaagtatgattcaggatatctaaggcaaataaatcctttcctcccccaggttgcttttgatcatggtgctttgtcacagcaataggaaccctaactaagacagttccccagaggaaaggaatttcagagtcatgcctgggtttgccaatgggacgttagcacaaggggtagacattgtttctatctccccaatgggaggggatttttagcagcagggctgttttcaagtcctaagggaaggaaggagggttgtcttggcttgttgaataatacttctggaaaagtagcaaattgtaatctgaatgatagaaatgaggacctgcccattagccactgtacagctatcagtgccaaccagagtttcaccatcccttccctgcctgtggggctcaggaggcacgtgctattttatttttcagtccctcaaccaggctgaccggctcctccctcgtgcctcttctcagagtgtgtggagcccaactcagcgatccttgccttccagctctcttcaagtgttcccaaacaattaaactttatgnnnnnnnnnnnnnnnnnnnnnnnnnnnnnnnnnnnnnnnnnnnnnnnnnnnnnnnnnnnnnnnnnnnnnnnnnnnnnnnnnnnnnnnnnnnnnnnnnnnnnnnnnnnnnnnnnnnnnnnnnnnnttcccaaacaattaaactttatgggagtagggaacttttcttttctactatcaggccaaaaatgttgctgggtgctcctccaggcatcctgctgatttgttgtggtgtttcgaggactgggggctgcccactgcatgagatgatctgactcagtgaacagcgacagctgcgggcctgtgattctgttggtgtaactggcagacacggactttctttctttctttctttctttctttctttcttcctttcttccttcctttctctctctctctctctctctctctctctctctctctctctctctctctttcttcctttctttctttctctccctccctccctctctctttttctttctttctttctttctttctttctttctttctttctttctttctttctttctttctttcttgtcatttgtcttttttttgcaacaaaggtaagagggccagcatctcacctgctaacactcaccagcacttgcctcctgctccagcgtgaaaagcagggaatggaatatggagtgtaagacataaattaaaaataaaataaaattaaaaaaaaaaagaaaagcagcacacaaggagtatgttcagcagaggcccatctcctggcttaggtgtgctgtgactctgatctctggtggctttttagaagcctgttatgaccttgtcttaggctgtgtctacacatctggtggtaggtatgtcctggggtaactgagtgtgtacatggggactagttatgaagaagtgagcaaggggtggagtctgctaagtgaggcaagtcacagaatttccttagcttgcctgggttttctgtgttaggctattgcctggcttgctcatgcgtatagactctatttaagaggaagtgtatagagaggaaggaagcctgcataaaaggctgcaggcctgggagttttgaagagactagccatatacttttgtcaccaaatgctccaatagggctggggcgggagggggggggggcagcagttttggcttcttgcaaactgtgtaatttctgtatgctacacagcacataagtgacagaggaagttctggaaggttctccacagtcttagttcccaaattattggccactgggactggccctggaggccagtcacttggtgaagtcccgcaaggcatcaagccttagccaactttcaaaagggaatcccctgatctgttttgtgttcccccaagggttatttttgctgggccccagaagccagagccactgtgtgtgatgtctgccagggtgtgagtccatgcaacctaggtcccctagcgccccctacagctgctgcggggcggggatggggatcgggttggggagagggaggccaggctgtgagccactgcaccacacccaggaccccacccagatcctaggagcacccggcccctggctccggggccacagaaacggggcgtgggccagagcctgaagcatccctggccactacgatcgctccgcctgtggccaccaattcccctcctcttctggcgtccctctctccgcccctgtcgcctgccagcaccggacacgctgctgcacttcatctcttggggcgctcttctctttggccaaccgtcgcatcctgtgcaactctggtcagtggccgttttgtgttgaatgttctccaccaagagcgcatggctgcggaagcgaggtgcagaccgaggtcccgagggatcgccctccgggaagcggtgatgctgttgttgtacttcggggtgccaaccgggcactcctacaacctggacccggagaatgcactgctgtaccagggcccctccggcacgctgtttggctactcggtggtgctgcacagccacgggtcgaagcgctggtgagtgcgccctccccaagaggcatgtcacagcgcctccgcctctgggattccttgtatgaatcaaactttccgccctcctgggaggtcagagaaagacctggcttcagccagctgcctcactggagagccttggaactaacttatcttgggatggcagcccccagggtgctcctgagtcctgggtctccagtcatgggaagaggaggtgggtgccacttcccttgctgaccactgcacagctgtcacaagccaacacggggcagagtgggtgggcagactggttcacgtctgagcgaacttgcatggttcttgctttaggctcatcgtgggggctcccactgccagctggctctctaatgcctcagtggtcaatcctggggcgatttacagatgcgggatcagaaagaatccaaaccagacctgcgaacagctccagctgggtgagttgggtccccaaaacaagacataatgaactttctccccttcgtgggtccactgttgggcaagtcctggaagacactatgatgctggtctcttctggattaaagtacaagcttttcaattttaaccccatgccagcttgctcctgagagtattttcctctcctttgcttgcaactgtatgtgatctcagtatcttccaaacctctttcaggggaagtctcatagggtggcttctggcaagctaccttctaccagtcctagaactcttccatgtgtaaaatctgtttcaaagccttaaaacccctctctggctgaggacccaacttctcaactttgttctagcgtgagctgcacatcaggaatagaaactttgattgagcctatatcccaccatgtagcctatatcccaccatgtagcttatatcccaccatgtagcttatatcccaccatgtagcctatatctcaccatttagcctatatcccaccatgtagcccagggatttttcttccccttcctttaaaaatgacactacctaccataaaagaatgggaagaaaaaaacagcatgccttttgttaaaatcataaatataggaggtctgacatataattactaattttcctcccctcaaattctcctgtaaagcaggtctgtctttcagccctcgtttctgtctttatttaggttttcagcaacttgagaaatgtgcgctgacggcagaggagacaagtttcatgtttcaaagtcaaaagcaaagttgctgcgcacagacacatggggaaagaaaggggaactaatattaatttaggtctatcttgctctcagtactgttaagcatggctgtgtatattgctcaatgttttcccctcacagcagctctagtgtatgcttgtactgcttctgcttcctcagggctcccacacagagagctgcaggttccttcttcaaaagtacttacctagactcagggttatcacttcaggtatacatcttcagtgaggataaaaactaaatgaagggttttggtgtactgtctggagatatgatccattatcgatgatgatgagctaagggtgagaattgctactttttatatttatctgtaagtggaaggtctacttgagaatacctgactttgtcataaaccttttctattcgttgtcattgtttgtttgcttggtttttgtttgtttgttttttttttttctgtttcttttctttgcacttttaccccagcacccataagaatgaaggagttatgtgtacactggattaagctacagctgacactaaagtacaaaggattctgggagtaggaaagcacagggagaggcgaaggaggagaaggaggaagagggggaggggagggaagacaaaggggaaggggagagaacaacaaaacaaattttacttagaaaaaaaaaccctactatgaaacttgattctttataaaagagggatgggcctctgagcatcattaggcatcccctcttccaaggggcagacctgggctcatagaagactcacagacttgtgcattcagaatggttacttaaaaaaaaaaaaaggtattttcattacctgagagagttgtgtaatgagtgaagccttgatctgacagcagttcctcaaagggtctcaggaaagagcagcttcttcttctatgggcctggcattctttctgtgacattagaaactctggtggctacatcctgcctggaggatacgccatctatttctggatgtttgtatttaactgaaaggggatcatgtcctgacatattatataaacttttagatgtcagcaactgtcaattaaaggaaaacctaagttcactgggggtgcggagcacagaattcactacagaggcatttgagtacagtggttacttaagagatatgaagttctgggatggctgaataaggggaaagcacaagttttatcgtcatcaacttgtttgctgggtcaaaattcagccatggtaagccaaagcaacatttttttaccttcaagatttgagtcaacaacaaaaatactgagatgaaagagatcacaaatgagtctgaggtcccagtcagttgaatggctactgtctcagctatgggaacactcagaagagttttgtaaggagcatgcctgaacttacttctcagagaagactctgaacaatacattctcagtttctacggagaaaatggttcctttattaagaacaaattcaaaagtaatttaaatctagaaggtaaaatactgacgctaatgtccagaaagaaagctaaaagatcaccagttgattagcagaaacatattaagattgcaaagtttgtagactaagcatcactacttataaacatattttgtgtatgtgtgtttgtgaagaaagaaatgagggagaaagttatctatatatacacgaagtcttctgtatgttctgagtgatattatttatataattaattataatgatatattgtcttatctataatgtggttgattatattctaaagttcaaacgttcttagcctatccaggaatggtgccacatatctttaaccctagcactcaggaggcagaggcaggtagaactctctgagttcagttccagatcggtctggtccatatagcaagttccaagaaagccagacctaagttataccctgtctcaacccctgccccactcgcaccccaaatacttagctcagtatcaaatacgtaccagctattcaaaaattagctgttctttatttatctttttaagactatatgtgacgtctgcagtaaaatgttatcaaaataagtaattagggtcaattcataaactaagtaaaaaatgttaattatataaacaaaaatataacaaatttaaatgaaacaaaataagaatgaagtcattggtccatgaaaatggttatactaaggtagagctattggcagtaagtaacctcttgcctctggaagaactttactttttatcatggtttataaagtgcccagtcatttaaactgtccattggctcttcagttccaaatagtcatcttcggttgtttccaagtctctctagtaggtcagataaagggctggatccaatagattcctgtgctctcccaccctagtgtaacctatggctaatgctaacacatactatgctgtattcactataaccataatcagagttgagcaggagacaggagtactcatttatctagcatgctcaggggagatattggcagtaccctttcagtagaacgaattggtggctgaggtgaccaaggggttgtttaagcaaccctgagggtgttttcttcctgtgttctcagcctccctctggcaccctgcctgcctctgttgtttttcggtttcttgctacttccttccatgaacaaaaaagtagtctcccctcaggagcatgtaagtctacgcctacttgtggagatagtgtctaaggggctccaggtgatttgcagtttaccctcttctctgtcggctactctgtaccttcactaggagttgtttaatgagtttatttggtcactgatagttttagagtcaggatgataaaaatgccaactccatgagtacatttttaagcatgatctctgcttgaaatgccagtattcaacaaagcagaacacaacaccacatcaatgatacaaaatgtatgtggttatcaagacactctagactaaaaaaaaaaaaaagacatttattttctgtgagtacactatccctctcttcagactcttgagaagagggcatcagatcccattacagatagttgtgagtcaccaaggggttgctgggaattaaactcagtacctctggaagacagtcagtgctcttaaccactgagccatctctccagcctgacactctgggtgtttaatagtttatagttaccaaaatagaatagctctctgctctcttctctctccattttctcactctccttgccctcactctcccttcccttccccctccctctttccttctcctcccttagtctctctctctctctgggtgtgtgtgtgtgtgtgtgtgtgtgtgtgtgtgtttgtgtgtgtgtgtagacaaagagaaagagaggtactacagctcttaatgactgtctttatgggcaatagaatttaaagttgcccagttatatagttcaatagattagtcactggccacgtgtggcttctgagacaaggaatgcccatagtaagaagctctatctaagacagttcaaaactaagctatgattacctcataaaaaatatcttaaactagtattaataacctacatacttttttgaattgattgaacatttctttttgcttttgtcatatgacaacccttcagttaaaaatgagtgttgaatgcactttacatttctactgaacagcactaactccctacaacttcattttggtgggggctctcctgtatctgtgcctgagtgagtatgaccctcacttcttttacagatgcagagctctggccactctattaagcttcctgcctggacttctttttctcttcctggaaagaccaatggtccatagcaactaggtcaccattaatggttttgaatgtatttctggaaacattgccttaggaaaatctcctgtttttatatttcatactctatttgggaaggggtcgagtttctaagtattgcatcatttctgcctgattggcaagagtttgtaatactaaaatacaaacacttaactgttaaagtttcaaatatatttttgtaatattcatttgtttgcaattagcttaaaattgtagcttatgaaaccgaggttaataaagatggtcaatttgaaaaaccatcctcaaatacaggctaccctgaacacagaaaatcatgatagaggacgccattaatcaactcccaggttaaatggcagaagctgggtttgggcaagtgacttagtcgttaaagatatgaatcaccctggtagaggactcaagttcaatttcagcatccacaccaagcagcttacaactacctgtgaagccagctcatatgtgtgtgtgtgtgtgtgtgtgtgtgtgtgtattatatatatatatatatatatatatatattaaaataaaaatgagtattttaaaaggagagaagttctccaatctccctaattagagagatgaagctttcttaatacatttctttttaatataagatcagatgctcactggttaatatttctaatgactaagacacttttcttttgtgaaaggtttggggccaggtattagtagtcaattgtgcataaggctttatgtattcatctagtcattagctaagggatgtctaaggaccagacctaaatgcacaaaatcctttgtacagcagttttcccaatcatgtgttcattattgtacaaaactgtgttggaaagatcaaatgacaagaacaaagtattgaggaactgagagccatgtggggacagagtaagtctcaggtagagaaagagattgtaaaaataatacaccattgagggtgtgaccacagtgaggttcccatgctccaatggattggctccatagccttgcacttattggcagcctactggacttggtggattattagagaagagtaggggcagaaggtggaggaaataatgaaatgaggagaaggaggtattgggggaaatggagctacatctggtgatagttcatcacatacatgtacaaaattctcaaagaataaagaaagaaaaaacatgccagacagatcaaacatttgccatggaaagctaaggacattgagagcacagtacattggaagaactgaaaactgtgtaggattgtgctgcagggagctgtgaatgggggattacagagattatctctggaactcattgtggctatgaacagatcctatgatgtgaatcatagggaagttatgtcttcagattatatatttaacacatagtaatggtatgatgagtacttcggaatcaatgagtcaagattaagaatagtataacaaatatagacaaattctgctactggagataagttcctaactaggacagtagcaggttgtgcagaagtttagaggatagattcagaaacagtactttttgaataagtaacagggtcaagaagaaatgatcaaagatatagttaatggtggtgtgtacaccaaaggggtagaacagcaggtattctgggaaagccttgtatttcattggtatgaaatctacttctacagaaaaatagacatctatgagttagatgtctacttgtaatgacagagagaagtccgttccagtaagtcagagtcaagattgattgccatagagggcacagtcaaagccatatggatgaatgagcttaatctgcaagctgtagggaagagaatcagaagaccaaggatagaaacgaggctttctacaattagaaaagggcctagaatagggttactcaattccatttcaaacttaaaccatgagtgtttaagaataccagttccagtggccctgtattgaattaagtctctagaagtctgtccaagaaaggaaggagtttccagaggtccaaggatgatttcaaggtttatatgtggttggggaccactggggaagataggaagggactcataaagagagagccaagaaggcagaaagaaaatcatgtgcacctggcatcggggaagtcagaggataagagggtttagaaaaagggcaagtgactggaggtgtgaaaagaccctagacatcccaaagataagaactcaggtagtttcgctgagttagagaaaaatctgctcatcaataaccttgggaagaccttaaatgtaatcttaaatgtaatcttaactggtggacactgtaaagtctagaatgagagcaagcgataataatccttcctacttgctcttccttaaaccctttggcctgctgtgtctaataaataaagttaaaataataatatattatatataaaataataataaaataagactgaaaacctcagtgaactcagtctagatgataagagacgcaggataagtgattcattaatgattttagatatacattggcagggacaaatgtcaggtacatctgataggctttctggaatggggggaactgaggagtaagctggttttctttggtttgatgatcacacaggaagaactcaatatgaaccaaatgaatggagttagtgggattttacaggctttgttgccaatctcagctttcccccaatgagactgcattagcagtaggttggaagcgattgccttaaaaagcacaaagtttcataaatagctcctttgtggggaatcagaacattgagctgagtttataagtgacaggaccgggctcagtaatatccatgtttcttttgatgtccttagtttatatctacctttttcaattatgagcattctttttcaattttcaaacactgtaattcataatgaatatgttcagaaagaatacagcatacctatattcagacacctttatttgggagggtggctacttccatgaagtgaattagctatattcttttcaaattacaccttggactagagagaggtctcagtccttgatggctaggctccaatcacagctgatatatagaaaacacgtcagcttacaacatctgtgaaactttggtagcaggactttactcttggctcaggcactattttcctatgaatgttttctactggacgttgtatctgataacttctgtgtgccagtcatcgtttctgcaatgctttagtctacctagcctctcaccttcctgcagagaaatgcctcctgatatctttaattcctcaccctggtgtgtgccttcactggcagggacaatgtggcaagccctcactgagttcccttaaaccttcctatcttcctgaccatctatagtttctttttttctctatttattttacctgtgaactgtaaaataggagcataacattttcaacattggttactctagttttaaatgcaagcatgtttcttcagattaattttctatttagaattttgaattatcttgcttgtgtgagtaaaggcacttgttgtgttgactaacaggaggtagagacaggataaccagctgaaggctcctgggacagcatttgcatttgtagacacacacacacacacacacacacacacacacacacacacacacgcacgcacacatgcacacatgcacagatacaggcacatacaaataaatacataaaaaatttaattattcaactttccataagttttccaaatgaatctttaaatctaagaaactacctgaaaactatgaaagtagattttttttcctttattattttctaatgttggagacaaatgtcactaaattttatcactaaattattttaaaagtagatttagtacagaattggattgttaggaatgccaacatttgaatagctgacctggagagctggttgcttgtgttgaccatttctttccagctccatgcacccactaggagttagttgtatgtcctttaacaagtggtcggtctccctttgttaaaggcacttcatatttgatgttgacttttatgataatgcctacttcaagaatacttagaaaaaaataattaatacatgtgtttacagctattaaatctatgctggtacaaaaaaagatgtagtaaacaagaaagttatttttaccaaatatacctattggagtacattttctcttatagctcttacaaggagttgtatgagttttctagaggattttgaagaaacttgcgactaaaagacctgtagagacccagatcatagaatgaggtctccacaagtcaccttgttttctacagttctgaagctttagaataattcaggatcaagtcacatctatgaagtttcacgcctacatcatggtgctagtaattgtgatgtgaaacatttagaatagaatagtatagaattagaagagaacaaaattagaatagggatgggatggcatggcatggcatggcatagcatagaatagagtagtgaagaattagaggacttcaatatctggctttatacttttttgtggattataattttttttcatacatattgatcatgcttgctagccaatatcagattttgctagccatcctaagatcacatttaaagacctcttcttaactgaaggaaaacatttgatagtgttttatcattttgacatttaattttatcttttcattcttgcttggctctagatttgcaggaggttggacatttggtgcttttcctgtcctgtgccaccttcaaaatgccagagctatggtttccatttctcttcatcatttgtcaatataaattgctattgagttcccacatcactgctatcttttagaaagatcaccaccatgtttaattagatgtgtgagaaaaccgcatgttttaatcatagaatgtatgatataatgaatggattaacagtacttatggtctagtagaacaaactaaatgtaagggccatttgggttagagctgaagactgttgctgaatctcatggcactgtgggcgccccctggtgtctaaattgaaaccagcagaatgcacgttccgtgagtggaagcatttgtcatttattgaacacctactaagcactaggaagccttgtacacacaggcataagttcccataatctccaactttatgtactggtgcattttataagctgttaatttatctgtcactttagttccaggtgatttcttttcttttttttttttttttgaactcagcaagcagaatatatatatgtatgtagtgtgtgtgtgtgtgtgtgtgtgtgtgtgtgtgtgtatgtgtgtgggtgggtatatatgtgtgtgtatatataatgtttaaatattaaatatgcttggatatatgttagataatggaatttttattattttcactcagcagttattacttcctttaaaaagttaccttaaattagtggctctgtagaacataggacaaagcaggagttgttcatcttctatgattaattaagaaagtagaatgggagccaggcatggtggcgcatgcctttaatcccagcactcagaaggcagaggcaggcagatttctgagttcgaggccagcctggtctacaaagtgagttccaggacagccagggctacacggagaaaccctgtctcgaaaaaaaaaaaaaaaaagtagaatgggcaagttttaaatgtatgtttatcttgcaatagaatagaacttcaaatttaaaaggcaaaagtaacatataaaggaagggcttttgttatttttctgaaaccggaaagcatgccaggagtgcttgaaggagcagatgaacttttttacagtccagaaagtcagcctgagtgcccctaccacatgtctgctagggaatccacagaagagtgacgcaggtgagcaaaccacacacaccatttcaccaaaaagtcccagccttccccagtgcaaagcacatcactcaagtcctcaaaggtctagaaagaggactgacctttccgttgggtccttatttcttcagtggaaatgccccaatactgaagaaggtgcctaacagggagggaagggccagggcaggacaggggttaagaaatggagaatcttcatgaacaatacaaagttgacttttcatgagttgtgtgatgaatttcaggccagcttgagttacagtgagaccctaacgtttaaaaaagctgattttacaatctgggcagatttgttatattttacacactctcagatggaaaaacagacttaggatgtaaaattgaattcagttaattcacatagctgaatatttgtagagttctatggtagatgttttagaattgtgggaagcaacttaaatatcaatttttaaaaattgtaatcttttgatttattggcttcatagatttgggcaggttcttgacttagtttaagactcagtgactcagttttggaggctggtaagatgtcagatgacaaagtgttttctgtgcaagcatgaggctctgagaccaacccccagcatcatgtgaaagccagacatggtaacaaacctctgatctcagcactggggaggtggcgacagggtccccggatatcactggccagccagtccagctaaatagatgaactctgggttttgtgagggattctacctcaaaaaccacagcagagagcaactgaaacacctcctgtgttgacctctaaatacacataagcattaaccaacgtgcacacacctgtaaacacaatttttcacattcacatgaatcaattttcctatgactaaaaggattaataatgcattcttctggctttactgtgacaataaaacagtgttcacgttgaggcttcccataaagtgatggctacatatacaagaggattctgctatgatctacatgcatcttagtgtttaaccaaatccttaagatatattgacaataccatcatctaatgttcacatatgtcctatatcctgttcttgcccaaatacatcacacttgtcttgttctgtatgggaacaacacagatcctaactgacttaaccattttaagtcatgctcctcccagacacacatggaaaaatctgcaatttcaatctgctatttcctccattctatttgttactacgtcttaaagctcagggaaatagtattgtgaaagaaaatcagggggcacagaaacagagtgactctttcttccatcccagtctggtgaaaacattatggtcttttgtcatatctaatgaggaatttttatggtggcataatgtatttcaaaatccctcttcacaactgtgtatcaagtaccttcctgctatctgagcagcagtgttctacgctgcctgagtgctactgtcaaaacacaaccagtctctcctccttgaggagatgtagaagattgtatatctagcactccattgtccagctagagtgtgcagtgaacagcaaaacaaaaggggaagaggtgtgtttaagaagagtacccagttagctttgtactagcaacttatttttgaccattaagaattttaagtttcacttacatatgctggtagaaatcattagtttgagatttaaaactaacacgcacacacacatatcctattttcttcttcaatttgaaaaaaataagactgggcttaattcttggactaagaaggatggtttttaatatttttttccttaatttgtactggggaaatgcagtcaactgtgccacaaattagccattctagtgcaaaagagtggaaaaacatcagatgctaatttctgctgacctcttttgttttcaaccatgtaaaatactttttcaatcatggaactgagatttgatttgctaaaagtttagcttggtaatgtataagctgacttgaaaatgggaatataaatcactgcagcatgacattgggtaaaataaaatatggatttctttttttatggtcttgtcaaggacattcaggaaaattagctttcttgtgacagtctttgcaaatgtcacctctgtcaaaatgaatatcaaatttcttcatgaagaaaatatgtttagtatttaattgcctactctcattacctagctgaaacccaacaggacagatcttttattactattttgaaagcaatctaagtttcccagtaattagacaggaaagggcctgcccatctacattgttgaaacagttgttcttaaacccagcttcacccccaaatacagtcatctgggagatatttttgaatgctgatggcctggtctccccacaacccatcagccttgggtttgagtactcgtggtgggggaggggcacgggaggtagttggtatttgtttaaaattctcctgggtgatctcaagaccattcaactccttcacacggaacagtagatttacaagcacagaggctgagggaaggaactctcaacggtctaagaaaagcataagatggggccatcttgactcttctgctgagatttttctggcattcccaaagagaagagaaagtgttccagaaatcaaggaagttccagaactggagtggtgacttgcagactattcctggaactaattttgcctagtaacacatactgaaagcctctctgtattgtggttgaagttgaggattgtctcagtgggaagcaatgtcaagaagcaaaaagaagaaataatcacaatgtgtagatgtgtgggtgtgagtgtgtatgaagggaggatgtgtgtatacataagtgtatgcctgttaaaataattcctcacaattttattattttatgaattttctttatggcttcatagtcgtacttttgacccattttgaatcaagacatgtaacacaaatagaagactgattattgttttccatttatgaagttcaatttttagcacatatttctgggttttgggttgggatgggatgatggctaataagatttgggtttggccacaatgaagatgaataaggtctgtgctgaaccatagaagcagagcagaacggctgcaaacaaatgtatgcagctaatcccagtcaaaacaaagtcctccttcctactggttactattcatcatcgtttcttcccagcgatcacagcctataccattaagagctcttgacttctaaggttgagtcttttctgtaaagtagataagtgatatacattatatcgtttaatatatacacacactatgtaaatatatatatatatttaaattaccacaaatcagaggcctataaattagacagtatctgttgttgataccacataataacacatgtgaaagactgtgtctagtctgacttaaccccagcctccacatgccccattcaagagcaacttagcctcaccacttgaatcctgagaaagtctgagcatttttcatgtcaaaataaacacctcttcttgtggcttctggagggctcgttgttctgtttctaagaatcattgctttaaccagagaactaagagtagggacttgggcaacacaggaaataaagcctagagccttacaggctctcagagaagtcattctaaacaagccaggtcgttcagaagtccttctgaaggactcagaaaaaaaccagaaatggagagatatgtgctgaaatgataagaaaggggcacagagaacaggaaggctaggcagtaacagcagtaactgtcttctgcagggctaactctactgtgcaggaagcagcttggataaaacagataacagcttaacttggcaaaggtgtctctaatgttcatttaaaaacgtagggaacagctcagctaagaaacacataattgcatgcaggatgctattcttgcacatatgaacttctgggccattttcagctagcaaatttgcacgctatcatttgcatggttccaaagcatcgtgtttgttgttttttaacgtctggtgactaactagagaagagaacatttgtttgcaaatatcaaacctgatcttgaagaaaacacccatttttcatccccatgcaaacagggaaggtggcgttcggaggaccacgcactcttgtctttaacaatgacaactgcaggtggattggctggtgttgactataattttaaaaatagttttgtattttcgattatatggcatttattgttatagtaacagagcttcaactgcacatagcctggctgcctttggtggtgcgtttttgacattaattttaaaatattggtggttttaaagacaattccaactgaaaactgcatcccaatgaaaattaaatcctttggcctccccttcttacttctcctgtattggtttggaatcatgtagccctagtagctccctgtgttaggctaacactgttggttgaatgcttctcagcaattagagtgaagtttattggaactggaagatggtagctgagagctcacaaaatggagtgtataatggaacattataaaacaggttctgttttcctggacttccttcctttcctcttctttctccagcctttccttctctcatcattctcacataggaagctctgtgtacatcaagactactctctatcagggtttggaccacagcgaactgttcttcctgttgcttagcagtgttctttctctgggtctgtttgccttcatttctcagtcaatctcccagactatccattagtagtagaagacatcattggtttccaggaaaccaagccaacaaagcattatcaatgttctatgctaaccatgcttctgacctgatctgaagcaacccttggaatggacagggatggctggatcccctgactaggactccaggaaagagtttgggcagctcccgtaagctcggttgtgttaaagcattaggtatttctgtgaatgatggtttgaaatccacacatatattcataaatatcttcctacacttcttacacagaatctttatgactcaggaaagtcaatacaaatgatctccttttaaatatattatctttctgtatggaggcgttgtgagtgttcctaggaaactctacctaggattcagataagagaggaaaacaggtagttaatgatacaaagatgcgtgtgagacattttgttataacactataaaaacttgtgaccagtgttcaaaataaagaattccagcttccggtacacttacctcatcgaatcaatgctgtggcttttttcccccccgctgtcagaactaagcacagaatattcaagtgttaactaaggagaacagaatgtaatgctagagaaaaaaaaaccctatgatccccatcttatctcagtcttcctccagttaatgatgtgaaatcactcaaacacagaatctcactggggctcccactcaaaagctaaaggtgtgtgctggcaaataaaacatcattgccataaagacgactgctctacatttcagcagggctgggttgcacctgagtagttctgttatgttgggctgtttctgcaatttatgcatttgccaaagtgtgcccattgacttttttcccccaacaccgtattgttttcatagaactttcatcattgttgaaaacaccagtcattccactaagcctaaaccacagggcatgttgtttcaaaggctatgcattattggtacgctagttatatactctactgtctactcgctcagtcattttcacgagtgcttggctgatgttaataaatgggtaagaaaggcaaaacacaaattcttttccaatcatcagcctctgttttgtatcaaatggaccttgctcatcctgttcaggataattagctacctcctataccactgaggccacttcttcatggcctctacaacatcgctctgaggtcatttcagcaaagaagattcagcttgtgtggagaacaactgtgtttgcagagagcaactcagttttactcctaaattgaactgaatacaagatgagacaaagatggggcaagagaaaccctgggaatcagggtctagctttaactactctatgcctttagaaaaattttcaacaaaactgatgagattttcccaaatactgcaggtagccccagtggagagccttgtgggaagacatgcctggaggagagggataaccagtggctgggggtcaccctttccagacagcctggagaaaatggctctatcgtggtaggtactgaagtgggtccaccaactgagaccagtcctggaatcagactttcgaggtgtgactttcatatttttgtttgactttttgttttatccagacttgtgggcacaggtggaaaaatattttttacatgaagagcgataacaaactccccactggcatttgctacgtcatgccttctgatttgcggacagaactgagtaaaaggatggccccgtgttacaaaggtaagtgggacttgaccgaactagaggaagagaagcaaaggaaggagtccactcgtttgcatttgcagttttgcctgctcaaagacgaagaatatccttcataagggcattgttaactaacagtatccttcctttgtttactttgtgcagtatcgatactttatacaaacatgccatggttttgaaaagcaattcttcattttcatttgaataattgtggaagctagttggcaactatccaactttgtactaaatttatattttcaaatcagtctaagcatgtctaatgtcagggaaaccataggatcctcaaagtcatgaaattacatacaaaattcttattagaaaaaaaatgaccataattcttgttttcctagaaacttgtaggggtcttcaaaaggattcaaggcactagtcagagcaaagccttcccacttcctgttccccaagatattccttgaagatgtaaggaattactgtttatagcaacacttggttctcagcctgtgtatcacatctcctttggggctcagataacaatttgcctggggtcacctaagaccatcagaaagcacagatatttacattacaatgtataacattagcaaagtttcacttgtgaaccctcagcaaaactaattttacaatgggggggggtcgtcacaacatgaggacctttatgaaaaggttatagcattaggaaggttgaaaccactggtctaaatttgggtaactctgtctcaatggaaacctgtattttatgtacagaattaagatatatatttagattttgggacaaatgtcagtagctgtcaagataatatttataacaatcagtaactctaaaactgtctttagaacaccaaaaatatgatgaacaccaattcattttaatgataaaaaatactattattatctcccttatcctccaaagataaccttgattacctgttagaactttgaactcatacttaaatttaggcactggttctgatcattttaggatctttcatatctggattctgatgtcctggagaagtccatttaataactgtttatattttaccttaaatgcaagaagataaaatatgcatattaaattttcaattgcaataaaactcagtctggagttctgtatatttcttattctcttttgccttatagttttattttatgtatttaaacattttcctgcaggattatttttctaaaatatacctatctatattcttttagaagttaatatgagcatagccttattaacatagcacacacttgaaaggggtgagaagtcatggcagggagtgcagagacatccatggagtaatttgtcaaaaggaagaagtgggcctcagtttttttcatagaagtttatgaaggaaagagcatcaggagaaaaagcagggctgtgtcacttaataaactccaaaagctttgcagtaagagaccttacacatctgtccacgtgggtcttgattctttctgttaggcaaagcaggaaggaagggataatagcagcaaagtagcatgagacaattgaacagccacctgcaaaaagagtgaaattggatttttttttattggatattttatgtattctcatttcaaatgttatcccctttcccagtttcccctccagaaaccccctctctcatccctcctcccgtgtttctatgagggtgccccctcccaccttctcattcccacctcactgctctggcattcccctacaatgaggaatcaagccttcacaggaccaaggacttctatccatgccagacaatgccatcttctgctacatatgttgctagagccatgggtccctccatgtgcactctttggttggtggtttagtccctgggagctctgggggatctggttggttgatattgttgctcttcctatggggttgcaaaccttttcagctccttcagtcctttctctaactcctccatcggggtccccatgctaagtccaatagtcagctgcaagcatctgcctctgtatttgtcaggatctggcagagcctctcaggagacagctataacaaactcctgttagcaagcacttcttggcattcacagtagtttctgcgtttggtgtctgtatatgggatgaatctccgggtggggcagcctttccttcagtctctgctccacactttgtctctgtacttcctttagacagaagcccttctgagttaagaatttggagaggagtggggagccttgcctaacctctggatatggtctccacaggttctcgcacccctttgttgggcatttcagataatctcatccctgttgggtcctgggaacctcttgctttcctggcatctgggagctgctggtggctaccccctgtttcctgtcccccattgctacacacctctgttcaaattcctgaccttctgtatattatatcagtctcctctcatacctgatcctagctccccattttccctctccctcctttcttcctcccaagtccttcccaccctctgcctcctgtgaggattttgttcccccttctaagaatgactgaagaagcattcacattttggtcttctttattcttgagcttcatatggtctgtgaattgtatcttggatattctgagctttggggcacttatcagtgagtgcataccatgtgcgttttttttgtgactggtttaccacactcagggtgatattttctagttccatcatttgcttaagaattttagtaagtcattgtttttaatagctgactagtactccgttgtgtaaatgtaccacattttctgtatccattcctctgttgagggacatctgggttcttcccagcttctggctattataaataaggctgctatgatcatagtggaacatgtgtcattgttatatgttggagcatcttttgggtatatacccagtagtggtatatatagttggatcctcggttagtactatgtccaattttctgaggaactgccagactgatttccagagtggttgtaccagcttgcaatcccaccagcaatggaggagtgttcctctttcttcacatccctgtcagcatctgctgtcacctgagtttttgatcttagccattctgactggtgtaaggtggaatctcagggttgctttgattatcttataccatacacacaagtaaacttaaaatgcaatcaaaccttgactgtgaagcccccaggcctggaacctctggagagtaacagagagagtaatgatttcctggaggtcacaacaaaagatcaagctacaaaagggaagggacaagtggcagtagggcaagcatcagagtttttgcatagctcaggaaggcatcaagtgagcagcgagagaagctggagtcaggcatgtgcaaacattctcagatgtggtgatcattacacaaatatatatggaaactcatcaaagagataccacaaaaccagtaacctgattgcaagtcagttaaaccaagatcttttctcttcaatgaaagcagagatatggctgatggttttatgaagggtggttggtgttactaaccatcacagactgtaaatcaaacctggagatcacctcttatcttttgaaatggctatttgccaaaaagatgagagataaatattagccaaggtggcatgaatgactctacagagcatcatgagagactctacagaaggttctcaagataaagaaaatagaaactccacacacaattctatggtcctttcgggagtgtgagagcaaaggactcatgggtggtgcatgtatgtgcgcttacatacaatggactatcctctagctttagtaagcgctgccatttgggatcccatgcatgagtatggagaacactgtaaaccaagcacagaaaacaacaagcaattacatttatatgtaaaatctgaaaatactaaacacagggaataagagtggccgagtggttgggggtgtgggatgtggagcaggatgaggaggttcagtcacaggaccctgagtttcagttttgtcagagaaatgaatctagcaaggggtttatatgcaacatgacagcttagtgtgggattttgccaagaaggtagattcccattgttgtgaccacatgtagacaaaaagtcaccatggaaagggagtgcgttgctgggtgaatgaatagccattctacttgtgtgtcccacagaattatcgctgtgcacctccaatatatgtagtaactcagggaactgtaaacctaaagactaaaattctagctcttggcctttcactcagtgattcattttaacttttagttatgtgttgccaatacttcccataaagtggaaacagagggagaaatacctttaattgtgattcatgatgataatttgaaggttaatacaggagaactgaatgatcttaaatcatgaaaattactattattttcaaaagtagaacataagacacagatcttaagactcatgtttgtgaaaacctctgagaaaaataaaactatggtgaatggtcattatgataaaaattcaacctgaaccatgagaagactgaatcagaaggattttgagttaaaggccagcctgggctctacagccaaactctgtctcaaaatatatattccaacttgtctaaaccaatattgaatttctgttttagattatacgagaaaatttggagaaaattttgcatcatgtcaagctggaatatctagtttttacacacaggtaacagcttaatactacctccagtgattgtatatgtatagaagcttaattctggggtttctctagacttagtgagtaacatttaagtgatcttaagctgtagactattattaccatgttcacaccaccatctgttttacatgtaattttagaaaattataattgtagttttataaattgtaaaattgtaaaaggctaatactacataggatcaagaatttagtggaagtctaaagtagctagttatttatgttgctaacttcaaagatgaacatatctatccaaacatattgttttaattactagttgaaagtgaaggagataaatgagtcccttttacattaaaattatgatagtagtgaggcttaaacttacaatacccttgaaaatcagagataatcctgacctctttccgatacccgaaactcaattatatcttatcctcagtttaaatggtagtaataataacaataataaatgttgcaggttttctcagaaacccattataattccataaatggtctctaactccatggagataagacattatcactttggcttcattgcctttatccatgttaacatgttagaacaattcctcttttagtttgtattgaactgactgcactgaaagctgagggttacatagagcatatactatatgttaattagctttgttgctctgggttgttatgcaacagaggcaagagcctggcccactcttccttccttccttccttccttccttccttccttccttccttccttccttccttccttcctagttaggctaaaatatgccctaaatttcactagcctttttattatctgagctgagattgttagggacactattcagtgatttttgcaaattgaaataaattaagtctcctttactctctggtaacacatgattatcctggtaatgaactctaatgaattacacacagatgattgtctttcattgacccacattgcctttgtccccaaagcttattctagtgtctaatggccctgcctttgatatttgaaacccactggtaaatgggcaaaaagttccagagtttcttctctaaaattctattcttagcttttctggctatttaacatatggttttaaattaataaaatgttcccctttttaagcttcaatacaaaatgcctttcctgactatttgcctagaatgttgtatatttgcaagaggtttggtgtggtatgatttaactttcaaatcctgagttttctcttgcaggatttaattgtgatgggggccccgggatcatcgtactggactggcaccgtctttgtctacaatataactacaaaccaatacaaagcatttgtagacagacagaaccaagtaaaatttggaagctacttaggtactgtaaaaatctgaccaacttgaattatctgtgccttagaaatgatatatgcaccctactggccagtaacaattaggtatatcagaaactgtctcaattaagcataaagccagctgcatttctttaactgtgtatcttatactgacacaggtagcattgtcattgctgcatccctatgtaggaagtggtgaatgcttacttcatcttaggaagccccctccccaattccttttttcttcctttattttttctttccttcttttcttccttcttttccttcctttcattgttcttttctgttttctaagactaggtctcatgacgtagccctagttgacctctgacacatgagtgctagaattaaaggtgtgtgtcaccactcctggctccctaggaagtttttatgctaactctgtattaatgcattcatttaaatacatggctttgaatatatatgcattaattcttagactagcaaatgaaaaccaatggatcttaaaatgacctcctagctgaagaagagcattgtgaagtatattctaaaacttatgattttgacttcttccttatagaagttttgtttttaagattatcttggactgtttctcaaagtttaaccattttcattatccttttctccttcctcctcattgttatttcacaagtcgagaatatcatatttgtcccctatatctctacaacatacatattttgtgacatcatttctctttacagtaaagtacatatgttctgtagatttttttgtttttgaacaaagcacaggcttgtttgacccatacgtgctttaagtgtgagcattttgtgttcagaaagggcagtgataaaacaagtaggatattactatcattccaacagaattcctcagacattaccttatgtgattgaactatggcttgaagtattacaggaaatgtaacccattttctgtctcttatcacacaaagttatatatttatgtaaagtccctgcaatagaaagattgcatgaaacctgtaaagattgtcctttgagagcttcagagttttgtgtactctcagatgttgcatctgtaatcctggatgaccatttgataatcatatcacacagacaataacagatcaagtgtcaaggtcatattttcaatatagagagcttggaaattcaaacctgtatcattgtttttataatatatatctttaaattgcttaaatgcccattttaaggtaatataaatgttttttgaggttctctgtaagctagtcactttgagtagttttggttacctcaatgcaaagagttagaaaagcatatatctgcggggaatgatgtgcctcatgcgtttctctccccttatgcaggctactcagttggagctggacattttcgaagtccacatactaccgaagtcgtgggaggagcccctcaacacgaacagataggaaaagtaagacttgcattttctctctctctctctatttcttcacaacatcttgaatagattatatgacagagtaaagtgttaaagagacactgcaaaatataagattcaaatgatgagcagtatattgcatcagttgaatctgttcaagatttatttatagctctcaaagaaatttagctggaaaattctaaagggaactatataacttaaatgaggctttgttatgagtaaattgataatatataaataacaaattatagataatatagtgtgataataaataaataaaatataattatctatagatgcccagaaaataaatttactggttattatttaataagagggagttgagacaggccatgctgcatgataagactagaaaaaatagaatagaatagaatagaatagaatagaatagaatagaatagaatagaatagaatagaatagaacagaacagaacagaatagaatagaatagaatagaataattctagctctaggtttttctacttttccacatgaatattgggacctcaaaaagtttttctttggtaaacccttttctgttttgttttggtttttttttttccctacgggatccaaaagttagttttggggatgatagggtttcaagtcaagcatatcaatgtaaatattaatattacatatcatttttaaaatttgtagtggtaacaattttattaaacacttgatattttatgtttgtccatttacgtgttgtagagattgatatttttattaaacaaataagttggattatttttaagagaaaatttgataagaaagtaaatgtctttggattctttcccccaattgcaggcatatatatttagcattgatgaaaacgaactgaacatcgtatatgaaatgaaaggtaaaaaggtaaatacatttctgcttttggtgttgctgggggcttctatgaatagtgccgtgtattctcattgcatatattctttgctttggaacagcttggctcatactttggagcttctgtctgcgctgtggacctcaatgcagatggcttctcagatctccttgttggagctcccatgcagagcaccatcagggaggaaggaagagtattcgtgtacatcaactctggcatggtatgtctgattgtccccaaactggaagtcatacgtgaattataattcagactgaatctgctcttactttagagttatgagattacaggttctttttgaaattagtgtgttcatgtacacaagtgcaagacgcatgttcatgcatgcttctccgtgccatggtacatacgtggaggccagagcaaagcaggcctctcattctactgcatattcctgagatccaacttggatcatgagactcatacaagaagcacttttatccactgagcacctttgtcaggccatagatggatagtcttaagcttatttgatggaccaaagtaaaatttctactgttgtattgacgctccgaaaatgaaaccaagcatgccaatgagtaactattccagaaacctgagacagaacacaaaggaatctatgggcacagcctgtgcgagttcactctagtaattaaaacctcctttagtttaattttcacacaaatataatttggaagaatggtttttgcagatacttcaaagcagatgtttgtataactcaataattatcattcttatataacttagtaagttattaggaatagatgaagcattcaatattttcaacttcttcatttgcaaacagaaataaagtctgttgataaaaaactattgcacacttcagttggattagattctaaaataatatgagattggcatcacttattctgaagtggctacattattaagttagatatttactgaatattattcattttaagtcatgagcaatatttggtcctttggtttgaaaataagactgggcttgtaagaaagcaggttcactttctaggacacagcatcttttagtcacgatttagtaaagtgcacttgtaaccttgctcactcaaagtttttcagaaaatttaataagttttcacttccaatgttatgctaaactctacacaatgcaaaagaaaaggcttctagggttccagggtggacgtcttaaagttctgaaaatagactagagggttacagatgcagaggttcccgaactttctttaaactaaaatatattgttctctgtataggattgtctcagatatcattaatggcagcatgaaaacaattgtacttcacatttcatagatgtgaagttgtccccactcacagatgcccttccttgtattcacttacccttagtcagcaagtatctctcatttttcccttgtggcaaatatctggtatattttaaacaaggaaatgttttaaaagtagtttaacagtaaaaatcattgctaaaataaaagaacattttttcctccacagaaatcttagaccatccacatatgaaaacagataaagggaatgctcagagagcaaaggaccagtcactaggctgcccttccctctgactgacccagacgcactgctgtggaacacagatcggcttagtaactggatgccatttttagatcccacagtgtggatttctattcttctctttgcacttacctatttctaaactctctgaaatggcactagccgctaagaaacacaacagtttctttcccccatttgtcattgcctgtgctcaggataggactcatctgttttgtttacccttgttgttttgtggcccatacaagtcctagatcagcagacactccagaattattgtcaatgaactgaaagaaagaaggttatttgaaggacttgggttttgacctaatctattaaatagctctcaggggtcctcagtgagcacttagttgctattcttgatgactgtaggctacttgaacaggagcaattaccacatattctcctggaactcttctaagtcggcattgtcttgagggtatacatcacatgtcttcacagaaaccccgcctctcttccctttagtcatttcctaaggcgccagcccattgtatccttcagtccttggatttaatcccattccatgtcaatgatagtgattacatctgtagagatagattcaaattttaaattcatttagaacaaaaatgagccttagtgaaaatctggaatgggaaatactatcaaaaaaagctgagaataatcccagttgtgactcagagctcattctcacagcatacttggacagttcatcctatatacaataacagctcaccttcagcttcaaagatgatgataagtgcactgctgcttagataaggttccaaagggcagcttaggtcacatcatctgttatctcagagacctccatggcttgctatcctttgcttcagaaagagtaaatttcccttttaatccatttgctatatactgtaagacagcaatgtgtcttttgctgtcatgttcattatatatgtttattaattaataaacatatgtagctgttttctgtagatcacagtcacactttccttgcagtagccaccttacatgtccctttgtgaagtctctctcaggtcgtctttccattctgctccttattggaattccttccttgcttcagttagaactattctcccttcttctcattagtgcaaaagtaatttgtacgtgtaagtcatgtgcatgcttgtataaagcccgtcttgtatccatggttcctggaggaagcagggtgttgcttacatatactcctccatggcccctttcactggttcactctgcccagtgagtgcattgtctttagcaagagctcaataaatgtttgttaaattgaattattaaaatgatttattggattttcaaagctggggatcttgggttcgacaatttcccatgtcctctgagctctaatcacactattctatgtgttgacttaataaatatttattgaattgaactgggatgtgtgtactgaagctctctctgtggtttgatgcattagaaaaatccatatccaattatagcagtaaagcacgtgacaagttgccaggcggctttataatgacacctctctttccatcctcatctagggagctgtgatggttgaaatggaaagggtccttgtcggaagtgacaaatatgctgcaagatttggggagtctatagcgaatcttggcgacattgacaatgacggctttgaaggtaattaaaaatctctagtttggtacttaatttctacatttaaaatagctcaaggaagcaaatgtgattgtagttttgtgcttgttcacctttttgttgaaagaggaaccagaatgatatgccacctagattttgaaaatgttatgtcagttattaatctttatcacagttaattagagggggttattcaaagcatttttattggttctaaaggtaccattgattataagtagcatcattctttactcatctctaaaatgatgcttatcaactcttgatatccatcattttactatttaaaaatgatcctgatattagaaagaaattatgaggtgtctatatcattggagcatgatatttaactaccagtacagcccagaaactgagcaaacccaactgagtctggaggtgaaagtggagcatgttctggtgccccctgctatgcctggagtactgtctggagctgctttgctctaggatctggcaaggacccagcaaaagtcatagcattggtgaggggcagagtagtggctatccaccaattgaccttgaagcatttacatgattaataaatggcactgtcttaaccatgcatcctgccctagacatcaggcttgcagtagaaatgccttcctctgcacctgtctgctctcagcctactactgggagttaactgggcccatgaaactgcacacataggataaatatgtgttagaggagagtgtatggtttcccagagtgcaataacttcctacaatttagaaagtaagtttttaatgtttattttcatgccttggaattgaatcttcttgatattgccactgataattaaaatatggtttgtcttaaatagcagtcaaaattaccactgtagttgtgaaaaaattgagacaataagtaatatcatgaaaataaactttctgttcttcagatatcagttaaaataattaaaacactgcatattattaagtgcattaatatgcctccatagcatcatgtggtataacaatgacatgttcttgcagctatggaatgttaattttcttcttcgtgttacatgtatttacatcacttaagcaatgagatgagtcagcatgtttgttactcttgagttgtttttttccatgttttaatcccagtgtcataaattcaacattaatcacaataaattcattctgtcattattttacaaacaagacattttctgaaattctatttgtatgtgtgtgtatctctaattaccactactggaagaagaatggattcagaaaccattttactataatagaaaagtctagagattcaaaactaaggttcctgtggtcatacagtctcccattataacacgccagatgctgttatatgcatttgatgtgttacatcctctcataccaagcacatttgtctttgtgtgctctcattccatgagtgggaagcaagacacatagaataaacactggggacatacagagcagcagggcacagcgacagagctgaggtgtcaagaggtatgtttgcagcccccgtacgcttatccgttatgacagagtgtgctgcaaaaccacccactctggtattttccatacgcaaaatattatgcataatcttgaagctcatgtagttagttttttgttttttgttttcctggcatagtggttgtatttccttataagagggagttttgaagtggatgctcacagtcagctattggatggatcacagggcccccagtggaggagctagagaaagcacccaaggagctaaaggggtctgcaaccctataggtggaacaacaatatgaactaaccagtacctctggagcttgtgtctctagctgcatatgtatcagaagatggcctagtcggccatcattgggaagagaggccccgtggtcttgcaaactttatatgcctcagtacaggggaatgccagggccaagaagtggaagtgggtgggtaggggaatggggtggggaggagggtctggggaacttttgggatagcatttgaaatgtaaatgaagaaaatatctaatttaaaacatagagggagtcttcatattatgacacatgcattcagaatcatgaaggctagctttccaagttcatcctttgcatcaagagttttaatattttcatgatttaaatccgacagatattgctattggtgcaccacaagaagacgacttgagaggtgctgtctacatttacaatggccgagtcgatggaatctcctccacctactcacaggtaagatgctcttcagacttgcacaggaacatcagagactaaagtaccctcagtatttgtctggtaacgtggacttgttgtctctctcaaatatgtaacatttttatttcaccacataatattggtatgtgatcttattttaactctcaatacaattttctttaaaccctttattgccactagtgttccattccattttttttcttgtccttatgtgtgacagcacatctgtgtttttgaggcaatggccattatttcccaactttgcccacttggataccaagcgcaggtaaagctttatgctttacagagctagcacagggagtgaaatgcattcatgagaccatgtttctttctaagtataatagttaaactaataatatcttaatacaaatttatgacaaaactctcatttcaattctatatcttgacacctccagatatttcagtgtagaaaaagacctacattctaagaaagatttttttcagagatttgctagctaacattattttggtgtgaccaaaaataggcaagtgaccctctaaatttaatttaaaagttaggtatatgtcaagtcaaagactgatttttttcttcctgtgaatagtacccatgtatttctaattcagtgtttggacatgaaattaaatagatggagcagactgaggtgtggagtgttcttgaacggaaaggagcaatctgtcgaaaccagtaggttttcatcagacatctgaatagtaatatatgataaagagtaatagatatcttatttttcaaaatctctgtttatttattaatgttgattatggaagtaaaagcagaacttgaaaaaattcaaagacaagaaataagtaattgttttggaaacactaaaaattatcctataaaatattgcctttttcacaacataaagtttttgtaacaaaatagatttcaggtgtttttaaaggtgggaaattttacatctcttaaagtgtaagaatgtgttttcttggtcagtgtgctaagacaagcctgagaagatccattatttaactaagtaaaatcttggaaatattagatattcccaacaagattacacaacacagcccctttatttttcctagagaattgaaggacagcaaatcagcaaatcattaaggatgtttggacaatctatctcaggacaaattgatgcagacaacaatggatatgttggtgagtagatatgtccattttcaggtctgggaaggaaaaaaatttttttgtgggatgctgctttagtgtgaacatagaaagccaatgtgaaggacttcagattactcataattgtgttcttgagaaagaaaagaagtacgtaagaaaccaatcaaacgtgatgaaaagcaaggagatatctgttttgaaagacgtgaaaggcgccttctggaggaatgcttccggcttaaagctttatattttgtttggcagccctgttgcaagcatctagcatcccgtttcatttctttcttataaaacgattgctgctgctacttctgggtgcgtagattcagacatatcatgaaatggatctgaggatgcgagcttgccgttcccaattatgtttctgtaaatgctattttgatacagttgaaatgtgatgattagtatttgctgctgcaaggttattctctttaactaatagtgattggtaatctaccctgttgatttattatttttttattattattactattctgcagatgtagccgttggtgcatttcaatctgattctgcagtgttgctaaggtgaggttgatgtgtgtcactccttaatgacagttgggcctaattgtagagtgtgggcggcaggttttaaaagcaacggccttgatgatgctccttttggtatcctggagtcctatcattaaactttgggatattttttctcaccttgtttagacataattaaacagaccatcagataaagctaatggttttatagatttaagtgaaaagttctcttaatctgtacacaaaatataatcatgcatgtatgtacataccactaagtaagcattttaatgacgttgcttgtttgttgggaacaaatgtaattactgtctttacagtaagattattctataactaatattaataattttattgccttcttaggacaaggcctgtagtgattgttgaagcatctttaagccatcctgagtctgtaaataggacaaagtttgactgtactgaaaatggacttccatctgtgtgcatgcatcttacactgtgtttctcatataaaggcaaagaggtcccaggctacatcggtaagcacagcccacagaactaataccatacactcattctgtaatccaggagtcaattgtgtgccctcatcatccattatcatgagcatttgacatttctttagagcagaatggaacaatcttttgatatgcacctcttgtctgtcttgtttttgttgttgttgttctcaatttgttctagccagcatatgaggcacaaaggaggtttagtgcataactcaagaggaggagctaaggccaccccttgctgcgttaatttaaggtgaaccctctgtgtgtaacctgtgaaatcttcagaatcaaacgagggcaccacagctcccctgcttgacagggctcctcttgaaatgtttttattgttactactgccttttccacagaaatggagaaagaacatagagccttggggatgctgtgtaggtgtcacatcactgaattacaccctcaacgctactgagcttgtaaaacctggagcatagcataggtatgaaggagtaagaggcacagggtcttcatctaaagtgtatgctgttatatttgaataattaaagatgcttctctggaggctggacctggatttagtatatgtaatatgctgccaccctcagctctgagaactgtgccccttttccatttatagggaactcttcaattgactgccatagagaatatagcattaatatggatcattcaagagggtagttaatgctaactttcacacatacacacacacacacacacagagagagagagagagagagagagagagagagagagagagagagagagagagcagcctttagaatagttactaatgaaaatggcccccagtaagtcatacttctacctggggttatcatcgtttggatattagtcacttgtgaaattgattgagcaacaactgaataggctgctgttatataaagatcacagaggctgccaattgcttatggagccaaacttttgatgtgtaatagaggttccagtctgagcaattttgttatgtaatgggcagcatgaacccagcatctgtactttatgagactcattttttaataatgctcttgaaaagccctggccaaagctgaagtaataaaaagatgggcaaagcttcatctggttattggcacctggggagtgtgaccccagagtgaattacacattagcatagacaagcggatggattatctgaaagatacacagagtggatgcggctgtctccttgttcttccaactcctttgcactagatctgtttcttaatgtctgaaaatgaatatatgaaacacaaataatcacagtgttcttatgaaagcggctctggtaagaataacccacatggtagcttggtgaggtcattatgttctgcctcttgaggggaatacatttgtagtccctcctttacctttgctctggactcaggtgataaatttgaaaatggttacttcagttgcaactctctcttgctttctaggtaattatattacagttattgtaattttgaattcaattgatttagactttattttctaaattaaatgatggttgaaaggtttatttgaaaatgaatgtaagactaacaagtttgatgcatacattgtgggcaaaataccttcagaaaagtatgtttcttttcagatgtaaatgaatgttgcagaaattatatatatatatatatatatatatttttttttttaaatttacttagatatcattactcctgtgcagtgagggcaactcagtggaggactgctctcaagtcactttgtaaagaacccttttagagtcaggaaatgaggcttacttcctagctataatctgctttgatgattttatggcttttaaaatccccctcttcttttttgatccaaggatcttgtttttcagctaaatattaactatgtcggattttaaccacccctaaaccactagaatatttgagagaaagattatatacttctcattttcattttagattaactttagagggtcaaaccatgagcagtaaagtcacaaagaatgaataattggtgattggactgaaaggaaggtatttttttagtaagccattttataaatttttgggttttgacctggttgttcattttatataggaaaattaaataaaatatcaaactttcaaataagaaacacaaaattaagggacccatactatattagacattaggcatgcaccacacaagtcagctattgtacaagacagattcatcctgagagatgctggagctcacggctctagacacacttctgtcattggctgatgcatagacaaacagactcgttcggttagccaagatttttgtgtggttttctcattcttatatgtgaaaagattaagcaaataactaaaggtgttaataaagataactggaaaataagttaataattttttattttattaaatataattttaaagaatattttatttctttcttttttcatacttcagtttatctgcttcacactgatccaaggaaagaactcagggaacttcctggttgacttgtaactgctaatacctcagtgccttaggaatggatgctaatcacgatgctttctctgtttttgcagttttgttttacaatgtgagcttggatgtgcacaggaaggcagagtctccgtcaagattttatttcttctctaatgggacttctgacgtgattacaggaagcatacgagtttcaagcagtggagagaaatgtaggacacaccaggcattcatgcgggtaagggaaactacttaacgatgaaatacagacatcccaattgtccatgcggcagcaagttactgtgtgtttatgggctgttagcttcctgtcccggttaaaacattaggcagcatcaacctggaggatgcaaagtctatttctggatgtatctttatcttcatctatcacatttgtctgtgtccttgcatccagagactttctcttcctctgattgctattccctgtgctcctttacccagttgtttggaaatgtacctgtattgttctgcagagcctcagatggtttctatggtgtgtttggggatgttagtttgcttttcatgacctcagctaggcagaagccagcacgaatgcattggggctattagtcctcgctgcagctttgttggggtgtcaatgggagcttgtgcaattgaggctcggtaaggctcatttgtgggccaggatgacagctctcatgatggttcgggggtggataatcctgccaaagcacagcaaatttcatgtttcttttatgaaaacactcattcccgagccaagcaccatgctcctcacgttggttaaattttagcatctgctgctgtgccaggttcccccccacccccactggggaatcatgtattccatcagaaaatctattgtcacaaggaagcccaactattcctaggagccctttctgggatttggaatagtagcctcagcttagaatataatattccctaagatacttactccaggaaaggcaaacaagcatcaagactggttcactgtgtcttctgagagcactaacaggccatttccccatctcccttcacagggtttattatgctagagtaaagctgtaagatgggtcagagccaaacacatagaacagtatttatgtagccatcggttaggtggcatggatacgagaggctcttttattttcttccttcacagatgcgttttgacttatattagtcaattacagagagaagggctgaggccattttcagggcaacatgaggaccacctttagatgttctcaaggaaacaggttgtgtttaagttgcaaaaatagcagcaatttgagtttgatttattttgtcctgttccctggcgttgttcctagtaataaaggactggatcatccaaattgtacattttcttcagagcacatttggagtagaattagagcttagcagaagtttccacgatctgtgtcatgtgtccactcagaattgccatggcttttgtgataatgaggggcactgttgatgttgggccctatcatgaatgtattattattattattattattactattagtattgctattgtaaggctggagagcaataacagtgggctaggcagactctccagcatttaattgcatcccaagtcctcctattctatggcaaacatttaattatagtatctagtgatgcgatggggcatgcactatgtggagcttaaaaaaagtcattgttttctccgtttttttctttcctaagttacataagcaacttcaaccttcatttacaacaaacccagagaagacgtaggaaccacagaagcaacagtttcagctttgagttccggcaaggagctgtagctattgtacaagtgtcagtgcagtctcctacccctgcctgtctggtggcccacaccattaggagacattagcattcttattgttcacagtttaaagcacaggatagcaaccccacatcttattctctctctctctctctctctctctctctctctctctctctctccctttttcctgatgaaacaaagaagatgggcagtggtcagattggctggctagttcttgtgttccgtaaaagatatctggtatcagaatgtatgcatttgacctagagcccctcaagattaaatgtgcgaacatatcttgatatagtattcaggggcattggggaggtagctcaacttgttaatcttgttgttcttccaaaggaccagaggttagttcccaacacataactcacgacctcccataagtctagttccagacgatatgaccttgtatggccttccatgactcccacacacacagatgcatgtacacacacacacacacttgtgtcacacatgaataacaaatacaaataaaattaaatctttagagtagtctttagagtcttgatttcaggctcaggacactcagcattcaggactccctgctagtggataccaattaaagctcaattttctctttcactaagttctctgggtgccactgggtgtttattaaatagattgtgtcagcttctgtttgagactcttatacattatcagtgactaaaaaatagcaagatcacacccttcatgcagtttctatgctggtggtaagaaacaaaagcatgctgggaaagaaagctccagtattctacaagattatacagacaagggaaaacaagtgaaggaggaggagccgaggacaggagagagtgagatgctggttgggaggtggacataagtaggaacaatatacataagagtagggctcatttagaaggtgatatctaaggaaagattgaaggattgaggatttttcccccatgcaaaaaaagcaaggctgtggcccctaacttcagtgtatagcagcaatatgtataagacttctcaaacaatatggtggactgtaggtagagctattgactgcacagacctgcagaagctatggagatctgctgtttgatcaagtccctgcatggtacatgtgagaatctcagacaaaggagcagaaggttctgggacccagttttcaaatgcttcaggacaagaagatagcaggttggtttgggggacaatagagaggtgaggttgactaacaaaagtgaagagtggggatgaagggagaacacttgcagacagacctgagggtatctgtgagtttttctctagtgagctggagatttatggtagaaatttgagctgagtatatgtgacttcagtatgaaaagcactttggctgctgtggagagaggattgatggatcataggttgcaagcattgacacagaaaagactactgatatcaccaaggtcagagtaatgtttccatcagaggtggttgaagacagattctatgccatttactaacagacactatatcagtcacctgaaggagagtcatcaagacgagtacagagtggttggcccctagcaaccaaatacataatttctataagttcagaaaaacaaatactgcaaaaaaaaaaaaaaaacaacttttacttggaacactctattgttcagttgttaccttgctgagatgaagacatatttaacttctcaaataaattatcagttaatcatgggcatatactaatctatacttggagaagggtaacaggaaggcctgtcaccatcaacattctgaaatccagtaattcagtaccttacaattagacttgtgtgatagctgaggggtgaaagagaaaaaaatcatatggaaataattgagaaaagatagggttatttttttttagggcctggtgaaaattagcgtgtgtttgtgtatgtatgtatgtgtttgcgtgtttgtgtgtgtgtggcagtggttgtatctctcagcatatattaaacatcaaagtttttatgctttaacgagatgatttgtatgacatgtaaatggtatgtcaataaaggcattattcttaaaagcacctccataggcttctccagtgctagtgacatggccctcctccctctgtacttgcccatgaatgtgggaaaatgattatcctcacacatctatgtggattcatgcttgatagaccgggacagaagtgctaaaatagccttgtatctattgactcttcctgtgcagaatggatgtattagtaaatatcttcaaatgtttatggctgactaacttcctattttgaccagatctatttaaaatatttttttctagtacttaagtaaaatgagaagatgtgaacctgcagtttagttgtcaacttggtcagacctacagagttctctgaaagaaaaagaatacagactttggctaattttaggcacacactgccttagtcagagtttctattcctgcacagacatcatgaccaagaagcaagttggggaggaaagggtttattcagcttacacttccacgttgttgttcatcaccaaaggaagtcaggactggaactcaagcaggtcaggaatcaggagctgttgcagaggccctggagggatgttacttactggcttgcttcccctggcttgctcagtttgctctcttatagaacccaagactaccagcccagagatggtcccacccacaaggggctctccccctcttgatcagtaattgagaaaatgccttacagctggatctcatggaggcatttcctcacctgaagctcctttctctttaataacttcagcctgtgtcaagttgacactcaaaactagccagtacacaagctaatctggattcttgtggatactattttatgaaaattcagataaaaacatggcatagaattttcattatgtttaacaaatagcatatgccatttcataaatacacttctaagcaaattcatgttattcctctcaaatacttactcagtaactctaaggtatttgtaatgttttagtttctgtctttaggtagagctgattgaattaaacaagttatgtgtgtgtgtgtgtgtgtgtgtgtgtgtgtgtgtgtgtgtgtttacaaaagcacatgtacattccttatattatgagaaaagcataattaataggtaattgggataatagaagtaatgtacaccagatgtagagaagacctcgtggaaaattagtatgaattagatgccatgtgatttggtcaatgcaagcttgttgagaagaattaaaatagtggacatgtggagggatattcagtggctgtctagttcctgtgcccggggaataatttaatcaagtttgctattgtaatactcagagcttcaagctgtttcattttcacaagttgataacttgggatttgggttttgatttgcagcattcctatatggtcaaggtttcctgttgagatgatcatttaccaagtaatgtttaaaagaacatctgtagataaaggaataaaaaacgtattctggaatcttgaacactgtagctaaggctccagctttatcagatgccgttgatcactataagtgtaatagtcactacaacaccattttctacttaatgttctctgagtgacaaaaagtcccacttttctaggcctccatgtttctccacatttattaaagtcaatctcagtgtttgattggctatctaatatagctacatatatatatatatatatatatatatatatatatatatatatatatatacatatatatgtatgtgtatatatgtgtatatatatacatggttataacatctgggcgttttacacacaccatgtgatctgaccatccctacagtatgtatacatcatcactatcattgccactgtcattttcagataatgtaaaaaaacataaataacctggccaatgttatacagatagaaatgggcctgcaatgaggtctctagctctagtcttcttcaagcaaataattcagttgagaaagaggtagtttaactagaagtttatttaacaaagcaaatcaaagtatttactccaaagagagatctgaggaagtttcccccaaacagtttttaagggtaaaatgagtaactcttttcccatcacacatcatggtggaccagaaattccactcatgatcttctacattttcccatgatcttctaaaaggcacgattcaaaatcgaaaccatgacataaatgacattataatgaagctaaggccctttcaagataagaactctttattagtgcccatgtccaggaaaatgcccaggaatcatacttctatataataacaacctatctctatcataaagtgaattttaatgtcaggaggcatagctatgataatttagccatcatatcacacatctaaatcttgttttagatagctggaggatcccatgattgtttgttcaagtttttttttttttaaattgaggtcttatcatgaaagctggggccatggtttcgcacactttttttccagtcctacagacagttctacttctcagattctacctaacagactcaagatttaaaatccaattttccacctttgtacaagatatttttaagcacgacatagcaatatccattatgtgagtagaagaagcagttgtattctttctatttgtagttttgaaaatgatgttgaataaatacaactatttagtatttgccacccttataaatttattagattgattttcatatctgagtaacacagcaatgatctgcaatagaggcttctggcttatagagattaccaaggcaagctaacaccttgctatacataatgaatacaccaacattctcagttattgagtaggtggcattactccacctgaatgtccacagcccacctaaccccagcttttctgtatgtgtgtctctgcatctattccttctttccatcactggatcagttatgtctatccttagagccattcaagggtgtggcaggttaaaatttttgactgtcttgggtgcaaataactgagtttctttgatagcccagaagaaacttgttgaatgaatttattaaaatggaccttgtaaattgaagaacataggaaggttgagtcaacctgagcttgatagttaaatggtgcagatgacaggacaccaaacatctgtgcctgtttcttcagattacctctagatagagtaacaattctaacatgaaggaaaatgaagactgtagattttctaaactggtccttgtgtttgtggacttcatttgtggagcataacctgccctctcaaattctgaggttattttcatttacgcttttgttgtgcttagcaacatgattgcatgtattggtctttaacatattttatttcatgaagtgctcagttgacttctgttataaaagctcacatgttgctttgttagtaaagatcccattacctccccagacgaggaataaagggaaatctgtctttctagtgagtcttgagcaagcaataccatgctgtgtaccttagcccctcacatgcatgtgttttcaatttgagaataacttttggatatactgtagtgctgatttaattgaatcctgaatgctttcaggttatttccacttgattaaattgtttccgtttttaccatatgttagaaaataagttttgaagatggaatgacatgattttaatgaagagattagtaaataataaaatgcagatataatttttaaacattctaagtttgtgggaaatattcctagaggaaataaaacaaatgcatgcttgcagaaattaagattaaaatgtaagaactgataatgtattggagtaagcacacctttgtcattggaaatgtagtaaaatgaatgttaaaaccctaatcatccaacagtgtatttttgaccaagtagctataagagtaggcacaggaaatgctatgtagagatcaggaagccactacatataaaagaactgttttcaaagcaaaatattttgtaatggctaccactgctgtgtcattggtaaataaacctataaacactttgtgtgtgtgtaaatcataatagcatagcaaacgagaaaactgtcacaataaggaaattcaataaacttagaaatgcaatgctaacattattcctgtattgctagtcatggtgttatataatataaagggaaaacgtcattatgataaatgaattaaaaaaccagaaaatttcataataaatatgaagttgaatgaatcaaactgagtacaaagtgttccaagatatttacagaaatcttattgagtgacattattttcctataagcatatatggggctattaagtgaaatagaagtgttaaggaaaactttgaaattatttattgagtatgtaaatgaaaatgtgcatattataataccaatatacaagaattatacaaaatatcatggaaggggaagtgctgagattccaccctctgcaaataccatcagatatatggtaatagttttccatttcataatctctatcctgtcacaagccacagggatgtttctgtagtgcacaaagaacatacgcttcaatttttgtaaaagtaattctgctaaaatgtggattttgagctgtgacgaaaggatggaccatctagtgactgccatatgcagggatccatcccataatcagcttccaaatgctgacaccattgcatacactagcaagatttcgctgaaaggacccagttatagctctctcttgtgagactatgccggggcctagcaaacacagaagtggatgatcacagtcagctattggatgggtcacacggcccctaatggaggagctagagaaattacccaaggagctataggaaactgcaaccctataggtggaacaacaatataaactaaccagtacccgggagctcttgtctttagctgcatatgtatcaaaagatggcctagtcggccatcactgcaaagagaggcccattggacttgcaaactttatatgccccagtacaggggaatgccagggccaaaaagggggagtgggtgggtaggggattgggggggtgggtatgggggacctttgggatagcgttgaaaatgtaaatgaggaaaatacctaattaaaaaaaaactgaaaaaaaatgtggattgtgtgtgtgtgtgcctttttttccccctttagaaggaaaggattttgtgaaactttttctattcatgcttcctgcttttatttgtacacactattttcaattcccttagaaagacgtgcgagacatccttacccccattcatgtagaggccacataccaccttgggcatcatgtgatcaccaaacgaaacactgaggaatttccaccactccagccgatccttcagcagaagaaagaaaaagacgttattagaaaaatggttgagtattttcttgtatttaaaacataattgaagaatttttaaaataggacaaaattaattgaaatgtacctgaattgttcagaaatttttataagcattaatgaaaatagatttaagatttctctctctctctctctctctctctctctctctctctctctgtgtgtgtgtgtgtgtgtgtgtgtgtgtgtgtgtgtgtttaataattcctttgggatgttcagttgaatatgtttatattgcatttagtcacatgagtaccttcctatatataaatgtttatgtagagtatatgtaagtttttctccccttgaagaaattaatttctcaagagaaaccacagtaggcattggttgtgctaagagtcagttattcaatgccattccatgttctcttccctgttccatgcacccactggtcaactctgttccatgtacccactggtctgttccatgcacccactggtctgttccatgcacccactggtctgttccatgcacccactggtcttcccctttccatgcacccactctctcccctgttccatgaatccactggtcttccctgttctgtacacccgctggtcttccccattcttgcatgctctggccttcctttatttatctcttactttttttttcttgtgtgtctctccctcgccatagatccactctgaatttttagttctcctgctgaatttctgtcacatataaacacatttcctgtgtgacaaaatttctcttttaaaaattcttttatatgtttatagcctcatctcagtaacaactgcctattaagatgatccctgccttctggccagtgaactgttattcatttcctaaattgttctgttctagagtatttcagtttccttgacaatgtatttgcgcatgcagtcctagcgttgagaccttaactgtctaccaacgtagtcctagttaacagtttgcactggggcacagtcaaaaggccctcactaaagcaagcacgaatggcagacagaatgtaaaacgtgaaagggaccatccaagatctagttcacatcctgtccaagcaaaactgctttacatcatgtaagcagacctaagctcttaatcactgctacctactttaagacacttgatcaaatgaacataataacttaagagcaaatttctcgattcttacgtgaaattatgggagtgagttgggctttttaaagatttttctattgaactgcagctttcattatcaattactttccaatgccttcaataattttaaataccaatactgtaaacacacaggaaaaattattagcaatttataatcaatattttggtttttagacccatgtgctctccaattaggaataatagaatgaaaatcatactgacttaatcctttggtggaatatgtatgtatacttcaacttccccatgtgggtggactaagctctattatgtcacatgactattcacttcccacttcctgtgtcttgtttttctcttcactctctagatcccccttcttaaaaaaaatatttcctcttgccacctattcctattgtgctgagctattttaatgtttttatttatttgcttttacatagtgtatacttcacatcttcctgagacatacatgcaaactccatagtatacatggatccttttcaatgattagagcttaataaattgaacaaacttcacaacagtctaccgtttaattttgttcaatgtttccacaaagttttgcctctcagtttctacatatagatgtaataagtcgctgcccaccccatgccaaagtaaaatagatgttttatttttgcataatgaatttgattagagcgtagcatgagaaagttgtggaaaggaagattaggaatatatttgcagctaatattataaatatctgtatagtgtctttaatataatttctcaaagcttatttgacttaacaaatttaggcctggaatccaccagaagaattgagtttctatagctctgaaactatgtatttgaacctcctgtctaattctcagattgaaccttggggatgcataagttgtaatttaatgtgtgacttttatttttgtcaagcacaggtgccgcattctttaaatacataggaattaaaataaacgttgtcatgttttatttccagataaactttgcaaggttttgtgcctatgaaaattgctctgctgatctccaagtttctgcaaaagttggatttttgaagtaagtatagtttactctgtttttcatcaaaagagcaaaaagggtaaatgcatgtgggttctagcaacaggggatctcaccctcgaacgtcagcatcatttaaaaatttgctaaataataatgttttgctgtgagggactgagtgatgcttatatcactcattttacatgtaaaatgaatgatcaaatatatatatatatatatatatatatatatatatatatatgcactatcatcttttaaagtatgagagcatatgagcatccctattattttatgaagtctgctttaagtcttttgttgtaacttagaaggtatttcaggatttaactgtgccttgagatatcattatcacagtcataactatattttaacattttaaaggcctggtaacaagagtttagttggaaaaaataaactttactacacaatggttagtatactttatggctagaaaatgggttatgcaattcaaactgatatgcaaaatactatattttgacaaacttgaaaaagagtaaactaatttgttctaaattcatagagtaagaagaaaatacaatgtgcttagaatagcatctgtcatagaggaagaactaggtaaataggaatgtctactgttactttttaatggaaaaaaactgcaattatgtatcatgtagaggtttcctacattcaatttgctttgcacatctatagacaatgggaaatgaaaaaaggttaaggatacagagtgaccaggagcaggaatgagaaactagattagaaggtgggacataagcaaaccatgcaactatgtagttttatgtcaatttaactcaagaagagcattggggaaaaggaagtgccaatagacaatggctccacaagattggcctacaggcaagcttgtgacgaatttcttcattgactgattgatttgggaaggcttagccagtgtggacaagtgccgtccctgggctggctggtggtcctggattctacaagaaaacaggctgcacaaagtctctttttcatagcctctgcatcagctcctgcctcaaggttcttgtctggagttccctggatgatggactacaagctataagagaaaatgaatcctttcttccccaagttgattttggtcatgatgttttatcacagcaataggaatcttacctaagaaaatggagctctggtacatggctccttacttgaaaatcactctcaatatcacatttagaattccctctacacattagagatggcatagggatgagaaatgtaaattttacaggatgaacaaacattgagagtcattttattcaaggatcttaaaaacagtagaattcttctcagtcaggcaatgttagcatagccatgggtatctatagttcagaggcaaggagccctcccttgactggtaaaggaacttagtgcttacaagtgattcagttggctcactcaggtaattgagtacctgctttgtgtatcagagcatggtgtgactttgtgggtctattagtttgggaatatataattttccatttgagtattttttctaagatatgtaggtttttggtttatcaagagactttgataaaaagtcgttgtgcaggtgcatgtgcaaagagggagatttgcgaagccatagatgaagtgattccctgtgcttgcatttgggttctctgtatcttcctgctcctccttcattgctaatcttcatgagaaatgagatttcaaagtttacgagaaaatgtcactaagaacgatttcaacttattcaaataatagatagaatcattaattcattttttcttgtttcttgcaaagtaattgtctacttagcatttttaatcagaagtgtttttccaattaaatatcaagcctatgattttaaatagcatctggccaaacataaggtggtgtttcttaggatgtggtcctgagtcatgtccaggaaaatatccacaatgtctattggaaatgtgtatcctcagggcctagcaaacacagaagtggatgatcacagtcagctattggatgggtcacacggcccctaatggaggagctagagaaattacccaaggagctataggaaactgcaaccctataggtggaacaacaatataaactaaccagtacccgggagctcttgtctttagctgcatatgtatcaaaagatggcctagtcggccatcactgcaaagagaggcccattgaacttgcaaactttatatgccccagtacaggggaacgccagggccaaaaagggggagtgggtgggtaggggattgggggggtgggtatgggggacctttgggatagcattgaaaatgtaaatgaggaaaatacctaataaaaaaaaaactccacttccaggagctacagagaaggctcagtggttacgagcgcatgtacagttcttgcaggggacccaagttcacttcccaacatccacagtgggccactaagactgatactcatatatctgagtccatgtgggtatttgtgtttctaacacatatatgcaaacaaacccaaaaataaactcctcaaaaactaaaaaaaaaaaaaaaaggaaatgtgtatcctaaggcccagaaactgctcattcatagtcatcggatttaagaaagaaaccttcactatgaacagagctataagttgacttttaaagattgattgataattcatacatgcatatgtgtttcgattaaatatagccttgctgctcctccaactcctgcttcacctactgctatcctgtccaaatttcttctaaatttcaagtgtctcttctctactgttttttaattcatgtagttcactttgtgtacacagtgtgtgcttaggtgtaatctcatctactggaatgtgggtatctcctcaggggccacattattgaataaggcttattcctagcagccattgatttttccaagagctcctcaccttaggggcaggtcctggtgtgcctactttccccacccattcagggacttttgtctggcttgctctgtcttgtgcatgcagtcatagctgcagtcagatctcatgtgcaattgctttgttgtgtccagaaaacactgttctgtagtagttctccactgcctctggttcttaaagtgtttctgtgctccctcttcctggaagaagataatgtgatataggtgtctcatttgggactgagcaaactgccaggtattattctctgtaggttgaccagttgtgagtttctgtgttcaccacaatctactacaaaagaagcacctgggactaaggtcaagagatgtcctgatctatgggcataaagactcatgggtttttgtttttttgtttttgttttttgagaatttgttaaatactttgtccatttagcagaataatagcactggattctttgctaggtcttatgagacatcagcgtcttgggttgttggcctcagttgccaggcttaggttccatagtatgaagtggcccttatagcaaatcagaagatggttggttactcccatacacctgtgccactgttggcatctttgggcatggcttctcaaggtggtcacactcaagcctacttctgctattggtgctttatttctcctctctctctctctctctctctctctctctctctctctctatctctcgataacttctacaatcataagtttccatttggcctttcaatggttttttttagtgctagccctcctgtaccatttggcctttcaatgtttttttttagtgctagccctcctgtaccctttcctcttatccctgcctcatttcacccttcttactccattattttctacaagactttattactctgaaaccaggcaagcaatgcagtggtgactttcacgtgggaggtcaagctgatcagattcaacttggctcaactcttacttctactgctttacccaaaaggtcgccttaagagaagcctatgaacctcctctttccttgctataaaatagtagaaattatgtcttctctattggattttaaattttttaaaatgcacttattacaagtgattagctcaaaacctgatacctttgaaggttcaatgaaaggtgctactgtttttagaatcgtatacattccagtgcaaagcagtaggcaccagtacctttgcatcattttgaaaagttacaaactatttctatgaggctaatgataacttatttgggggatgtgcaaatgagagctcatctaattaagttttcagagccacggtgaaagcttttgactgtgttttgagtaagttattctgtgtcagacaaaaatacaacatctctgcatgtaggtgtcttctctcctttctcagtaaccgtctgcaaattggggccatatgttgtatgccttcttctggctgtaactctgctggcactaatggtattatgtgtcccagatctagaagcctgttttatgtaaatgcatctactccgtaaggaacatgaatttctgaagcctgcaataataaaccactcgggtttgacaagcagtgctgattcccactcactcctggttccattaggctgaggcctccttctatgtgtccaacctcctgggacagtgaaccaaccagaattcccacagaaacataacagtgagcaaacacgttatcataatcacaagaataataggtattaggcaacaagaaggaatctgcaatcagacctttcatatggatcaggaaataaatgaccttactcttcaatgcttcatgtttctagaattagtgataaaaatctcctctgactgctttcataacatttaggactacttttaacttcatgtaacaagaattttactaatcctgacttacagaaatatatatgtggcataatatttgcatggaaatggtagttgcgggtctgttatacagccagaaatcctgcatatatggttgtcttttatgttcttttggtttttttatttttgattataatattttagtgctaacattcccataaaggaagtggatgcaagaacaagagtgtgtttgtttgctttgtgtgtgtgtgtgtgtgtgtgtgtgtgtgtgtgtgtnnnnnnnnnnnnnnnnnnnntttcttttgaaagcttttcagaaaaaaattttttttctcatgcttactctaacttgacattcccccgagtctgtcactgcgcagggagaatggagtctttgtggtcatgttagccatcaggcttcattccccaaagctgaactcaatgctcatcttctgcaacatcaaagaaatgctgcccactgcctgagtaatctggggttctggtagcatcaagtggggaactctgagtagacagtaagttgtgaatggtacctggcaccatgcatttaactcttcaacaggctaatctaatacaactgtcctttgtaaaatcaaagcctgactgacctcccgaagcaggcgaagaatgaagttcatgcttcgatactaacgtccactcacttccgggccagcttcctaatccaagttccttttcatttctctccttgaacttttattcaacaaagtcagatgatagtaaagaaaaagaaaagaagatgaaattcaactttggactggaggccagttgctgaaggcttctcttttgtcagataattctgctgtgtgtctttgagcattaagctgtgctaaccattcacattttattttgctgcgttgtcttttccccccttgtttatttctttccttatttctttccttccttccttcctgcctgccttctttccttccttttttgtccctaccattctgatcaaaactaagtaatcttcagagaccaaatttattgcaccaagaaagaatatattgacaatactaaggttttgtgaatgtcttgtaaaatccagtcatgttcactgagagaaaatgtagaacctggtgtaacagctttctcgtttcctcattcacttattaagttatggttccatgtgtgcacagtacttgggcttgtgtcagttatgtggactctaagcagctttgtaaatttcaagcctgcattatgcatgttttcatgaagaatgaactgtaagtcccagggaagccgctggttcagtcatgccacccgtccagatgtgcagctggctctccttcatggtatgtaggacgctggctggtgtcttttcaatggcttcttgttaaagaagatgtatagaaaggtgtacttttaagaatcatggagttgggattgtggtaattgtgcaaaatagcttaaaatggaaactaaaccgggagtcttgctgacaacaggagcctggtgccgctctgatcggctgctgtctcagaagctggctgcggatgccacgctgccaccttctgttgcctgtcaaagtgccaacttctttcccaaaggtgttcagtgactaatgctttggttccaagccagaatattttataaatgtctatttctaagcagctcttgtacaagtcttaattaaactttaatgtcaagctgaagtttacttttagagtaccttgaaagtcccttcggtcgtaactggatgatagaacggtagggaaaaggcagcgtggctctcttctcaccatttaacaatcgctgccaaggagaagcctgctgactaagtccaaaggctcacaacatgagcaaaccacaccacctccttcgtgctggggtagctcatgaccactccgtcaagtacctccaggatgagatggtagccagggtctagaatgagtactttgttatttattattcatttgttgcacagcttctcaaatccaaggctcagaaaagagaattggttcacatagggtatcctttatttctctctcttcttttctacagggtgctacaggggaggttaaaggcttggggctggattactttttctacttctacttggattctaagggaaaagcctgtagcctctgccagctgagattaaggaccctctgttgatgtcagaatggatccaggcatgtcgatgcatacctgtaattacagcacgccagagcatgggatggaattacaagtacaaggcctgcctggcctacatatagcatgactctagtccacaaaaaccagacaacacaaaacaaaaaccaacagcaaagataatggattttagttgtctagtaataccacatgttgcttgttaatttgaaagttttcatcagtcatgtgggctgtatagcaggagccaccccaatggtttttataacgtgacagtttcaatttcttggaaaaaatgcactcagtctcagttgctcatctgtaccagtagtgcaaaagcgagaatggctagactcaataaaactttatttataaaaacaaaggaatgatttacgttcagacaggagtttccagatgcctactctgttggcctgcctgcgtttcctgtggcatccacttagtacagcattttttttctaggttaaaacacaccctcttatagtataatttgttatttactttgcataatgtataatcttgtatttaaaaaatgtttttacaagataaatagaaatacagggagaaaagataggaggaatgcaaagggatatatacacagaacaagtatatgtgtgtattcaatgtgagactattatagttctacatgggaaatgactgaaatcctacttaccactgactgggcaaagaagaagacaagtggctaactagggtggagcacagacttaagtgacaagcaatttgcaaacaccgattgaaactaatttcacaaagtttaaataaaagaaactacattcaaaatcgcagctaccaaggattacatctaattacatttgtatgagattccacactggctaaaactcgagtgtgggttccaggagtcagtggtcatttaggggggccccggtgaattgttcatgtatacagtgtctttccttggttggcacaccagtctctgacatgtattcagttaaccacagttaataagttgcatcttaggatgcttgcttccttctatacaaacagctttgaaatgggaaacgatttgaataacaggagcaaatctttaagtagtaagtttagtttcttagaaatgtacttagggttttaaatgaagaaagaggactctaagctacaactctgtttatccactctggtgttcagaagaataaataattttggaaagtaacttttcctttccactactgattttgccttagttaagagcatcgtttatgtggtcatttcaggagccttgctactgttgacatttttggatgtggactaaggtggaaatcacatgactacatagtgttggacattgagtttcttaatgagcgatttgaaatttttgtatcattgaggacaggcaagcatgctctctagctgaaattttacagaatagatattgaaaatattatgaaaatttcataagcctttaaaaatgaataatgtagccaatattttgggggcactttacttgcctcttgaatgtagcccagccattttaatctgatactcacttaaaacaacaacaacaacaacaacaacaacaataacaacaacaaaaaacccacagaactgtatttgttggttctgaaaaaaactctgctatccatagtccagcctcttgcttccatgaacatttagactagtggtgagagacaaccgtgatttgatattgtacaatgtgcttctcagtgtttcctgagagttagtgctattacgctgagtcttaagatcaagtacaagctatgctggtgcataatgaggagatgatgctcaggttggaggcgagcttaaaggaaatcagaaagcatcttgtgtttggcagctatttgaatgtagatgcagctaaaacaaagggatgccctgtgcagtgggaggtgaaacaagggtggacccttgagtgtcccagtgtcatgctgagaagcagggactcttctgtcacagtcactgccatgggcattgcttcattggcactgttggcacatggcagagtaaggggagagaatgaatgtaaaacagaaatcagaggcacaatccatgtagactccaaagtggtcagactgtattttcaaaaagatctcgaggagtagcaaacctgaatatcatatgaatagaaaagtgaacagcaatgcttttcctacccctggcaaaagtaggtgctcacctcctcttcaagggctcgtcattcaaagttgtttccagtgtatatctaatagttatttccagttgtttggaaatgggtcttctatctttttgggggaggtgggtaaatgaactttaacaacatgctttgtgatgaaacaacatagtggccgactcactgcctgggaccctcagttttgctcagtgattatgcatctctaagcatgactttaaatcagagatcttaatgtgttcttacgtatccttttacacatcctgttgttagacagtctccacctggttcctttggcacacgtcctgctccagtttgaattaattaatccattttttttctaattttggaattactagatgactctggggaaagcttagaaaatcaaaacatacagtaactgaaagttatgagggtttgttgtttttcctgcctggagaagacgacactgtgcaccacagagatgagcacagggcttaaaggtttggattattctagctctgtacgtttcagcattttcattatgctccaagttcctcatattctagggatttcatgggatgcgcttgatccaaaacttcactgaagagtcattttaccattattacagattgggtggccaaggcctagccaaactcattgaaattctatccctaaaggcaggatgcttttctaaggcctgtatgtctccagatctctagtgacctgcatattgtagttgccaggacgttgaagcatttctgtggtttagcctctaacttgaactaggtcttgtcagaggcaacctactcgaagaattcagtctccttcaaacaaatctctgtgccaccacctgtaggccagaggagttctatcgtttactttaaataaactcccccatgttgtcctcattctctcttttcctcagtttcccttctaatcttttggcttgagtagcatctagttcaatatcttttcaaagatgaaataaaaattgtgcaaaataatgaggaaaatgtaagtcaagcaagagggcattaaaacaaaagaccattttataataactaattaaaaatcaaacaggtaatagcatcaaacttttatttggggaaagctttttgaacatgtctgaaatatgagaaattgaaactttaaatctgtttgtatgaggtcatcccatggttgttattctaagtttatagtttatatttatgaatattttatatgtggatggagaatttttacttccattccttaatttttaggccatatgaaaataaaacctatcttgctgttgggagcatgaagaccataatgctaaacgtgtccttgttcaacgctggcgatgatgcttacgaaaccactctgaatgtccaactccccacaggcctttatttcattaagatcttagacctggtaagttctagaaactacagtggtaggaggcactcaagattaaagacaaatgtaaatgccatagctactccactcatttagtatagacaactgaagttttcctcttaatgtctagacatcactcaatctcccattattttgagatgttcttcctgcccttgagacacaagtttgttgggatctaaggggaaaggtgtctgcttccttccttccagttttaggagaggattctttgagtgccacaaattcttccctgtttttaagatgctgatgatgctcatctcagagcaatagtcttccttcgtgctaagctaagtacccagaattcctgcaccacactttaagccatggttctcagccttcatcctgtactccagaactattaatcttcctccgggttgaaatcctgcttttcaagccaggtcctggagtagacatgtatctgtgtgtactccatgcatgtgtttatggcactcattattaaattattcagtgagttgttagaaggcttgagtcacaaagaggagagccccagggatagttgccttgagatctccctatcctctagtcagtaaaccccagcaacattcaccttttaaaagtagattattgacccctttctctagattaccaagaagctatttcaaaaggggagggtaaattctatggactcagagcctatactttaatatatttctactgtgattgtacttgctaaaattaaatactttaaacacattacagatacagacagaagaaaataggggctttgtggcttccttattaggaattccctcttaaatatgagagttcacatccaggagctgtttatagagaactcacacgggtattagtattgtgtattgcctatgcacatacatttgtatcacttactataattcccaggctaagcagaaaattgtttcctaagaaaatatttctacaatggttgtcttttaaaaagaaaaaaaaaactgcctcaaatatatttttatcaatttctaattctctttctccccaaactaattgttttatctttttgttttgttttgttttgtttttttcctttaggaagagaaacaaataaactgcgaagtgactgagagctcaggcatagtgaagcttgcctgcagcctaggttacatatatgtggatcgcctctcaagggtaagcatttaacattttcatttgctacttggaatgtgtttttctacctttatgctgcattaaaaaatgtttctttttttaaacttagttatgaaactaagtgagatcaacttgtcctggagtctgatctttgtatttatagtcttggcaatgttcattgttcagggtgggggcgggcggggctggcagggagctgtggagtgagcagagaacctgtttatgtcaagacaggaaaatcaatgtgtcaatcagaatttgttttgcctgcttactctttcccaacaccccaaccccccaccccaggtggccctgtctgccaggcatgttacctctgctacacaaaaaggtgtttttggcaagcgtcctcaaccaagttgtcaaagcatctttaatggtgtccgtctgggcctgccaggctttacactcagaggaggctttgtttctggaagtgatgcattgaatctctcacaccttaaacccaacagtttctatgtgaggtagagctcctgccatacctagaatattccagttttctttaagagatttaaaaaaaaaaaagaactataaaaatgtatttcaggttaaaaactggctctttcctctctcttttccagatagacattagctttctcctggatgtgagctcactcagcagggcacatgaggacctcagcatcagtgtgcatgcctcctggtatggttctgtgtgcaaagaagcagctgacacaaaggacaggcgccattctggtgatggctttaagggatccatggcgccctgttttgataattgtctataaatcacaacagtataaataatgagagcaatttctaccaactcttccctttaccgccgtttcctcttccctccaacactactggatagtaatagctcttttaagtcttcatagtttgcagtaagtgctctctgatgctgaggtttcatgggcctttctatgttttacagtgaaaacgagggcgaattggaccaagtgagggacaacagagtgaccttaacgatacctctaaggtatgaggttatgctgactgttcatgggtaagtacagacggaggcctcccaattgagatggttctcctactgttgttttttcttatgttaatggaggaagcctgttggaacatgtctaagtggaaaggatactgtgtccccgtgattgcctctaaatacagcagcttgattggtgattcattattttaatccgctctgtaatctgctctgatgctacatcaaactcaaggccagctgctagagatttttgtactggaagagccccaatatgctttcagtgggccatggtcatccttcagctcacaacggaggggctcagagttatgtagtgtgcagcttgtggcatagtgcccagtggccgtggtagggagtgacacaaaggactgtgcacttgactaaaccgcttctctgcagaacctacatcctaaccgtgtggcaaatgactaagacatgagcgttttctcttttgaactctcagagtgctctgcagtaagaactctggggccagcttgatggtttcctggtggtcttagtaatttctgagtagatccttctcagatagaaaatgtgtggctagagtctgaaattaaggaatgatgaaatctctagcacacccctggcaagtgttcaaacttgaagtttgtggtttagacatgttttgttgtttctctctgtgtggtccagactggccagcaatgtgtgcagaacagaaggatgttcttggacttttgacggttattctggctctgcatcctgagtgttaggcttatacatatgtaccaccacgcccaataatcattacatcggtgttttgtacaatatattttcatcatattcctaatttttcccaaatctattctacctccctgaatgcttccaaatttatgtcatgtttaaagaaaataacccacaaattccaatttatgatgctcacacactcttgagtgtggtgccatccactgaagtgttttcagacccccccccccatcgcacatacgaagaatactgactttccctccctagaaagccttagctctccacagctttttggttaggggtgggcactcacaggtcctttccacttcctactagatgcatgcatacatttccaacacactagaagataggaattacagaacaaaatgatacatgaattttatgtattgctctaaaaataacgtattccttcatcattttaaccatctatgaggaaggcattcaactgtatttaaatgtcagtttctataactgatagaattcagtatcagttttatgaaggagcaagagagtgttccttctcagaaaagcaggctgtgagagtcagtggtggagaacatcaaagtttattattggtttgcattgagcatacaccttacttctttccatggaatgagcacctctgttttccctgttagtaatcgggacaaagataacaagcattaaactgtgcatgtatgtgttgttgaattatttctaatagctttcctgcctcctagatccctaattgggaattatctctttttagttgctgagtatggactataaatgacttgtgggacagggacttcccctgacctgtactttttttgctgcttgctgctccctacattagtctaattgcaagacttaaaaaaaaaaagttgaaaaacttaactcctagcaaactcttgcctgtagaagtcagtgtttggcttgttgaccaggcttttgcactcccacagtcatcagcaaataattaacaggttagattgagctaccacacctctgcaaagagaaggcttcagctaagtttttttcaagtttgcatgaattgtttcagggccaaaaaaagtgcaaatggaaaccagcctgcaggtgtggggaaggcaggcaagtgtatatattggcctgaataggcatggctacctggccttcctgttacatcagtcgttagagcttctatctgaccaggaaaccaaaaggtttctgcgttaccttgtaaatgtgctgtactctgcctctaagatggactgcacaggccctcatcagaagagcaggacattcaagttgcccttgttcccatcaggcttgtgaacccaacttcatttgtgtatggatctagcgaagaaaacgagccagaaacatgcatggccgagaagctgaacctcactttccatgtaagcaaagctgattttgttgatgttggtagcaggtgggaattcctatcctcacagtgtccttctgcctccgtgaacatggctggctgcggggctgcagtactgtgattgggccctttcctttttaggctactattgtttttcccatttctcttgtcccaaactttctaagtaagatatgtgaatacctcaagcacgtagagtttggaaatcccctaacccttctggagatgcattcaaggcagataagccaaaggacaacatggttggaggcaaatcaggaaatctagagttggttcagatgctttaacaggcccaacattaccaagtcatcgaagcatttatcttccctttcttgaggaccaacataattagtttgccttctgagcttcaggattaggaaagatactaatatttctttatgatgatagtattaaatattttttagttcaaaaagtactatcctcatatacaagtacatacataagtaccaatataaaactcatttttgaaaatttagctgttaagcagaaatttggctgtgtcacagatgataagaagtaatgtttacaaaaaatatttgttttaagcaaaaacactgttctagccttgagtattatagcaatgtatagattgcaagtcttgattagatagtgaaagtgccagtgctctcctttactagcgcaagcaatttcttacccaatatggctggtaagaaatgcaaaccaggcacagactggaagagctacagtaaaattatgtcaagtttattggaagcaattcaattttttatacatttattggcaatggaatataatggcaattgacaggatcaatgctatggcagttgccagaatacaatgatgtttaccagctacctaggatacacaagaataatgtctaagatcaattgtctggtcaagttctaaggaacacagagaaactcagatggcttgaacacttcacttcctgaggcagttcctctgtttctcagcaattgagggacacagtgctctaaggagccagagacttaacctgaaaaacctatgatacatttctcttgaggcatttagaccaggacaacaccatgatttcctgcaggagaggagataatgctttcatgatgggcattagaagcacttatggtgcctacagaagcgacaaattcccagggcttctcccagatcctcaaaaaataatggccttgaattgaaatcctatcacatctacatcacctaagttttttttaatcattagaaatgctcatgagatctcgggagtgttttgataaactaagacagaaaccaagtcatactgtaatgccagccattcattactttgcaatcactacttaaatatttgtaattaaagtgtgatggagtcaaagcaaaacggagactcttgcagctctaacacgtgttgagagtatgctcaggccagaagggtcctcagcggtctactaccgttgggatgagacactgtacgtagtggcttgtcggtagttccgtgttctagtcacgtattcctctgtccaagctgctatgacccagcagctctcccaggctcagggccacccttggtcacccatgtcatctgcattctgacttcaggtctgtctgtcatcctttttcatctaggtccggtggcacacctttttcatgatttgtattggttttataattaagctcctgagcaggtagacttttgtctcaacactccccccctttcacagatctgtaatctccacacttagggactaaaataccatcacctagatagcctttgaggattaagaacatgttgtgttttcttaaagccaagtaatatgtcatttcttaagttttaaacattatagcatcataattaacctgattaaaaatagacatctggtcaacctcacagtagatcctttaaatatataattttaaatagacattaacctctctttggttttgtattttgagacagggtctcttatgtagctcaagatgacctcaaacttgtcagctcttatttaaaactggttttgccataaaatacagtcattaaaaacacacacacacaaataaccaaaaaaaaaaaaaaacaaaacctcaaaataatgtgaattggaactgattaaactagaacaaaattttactatggttattctgtctgctttgctatgtatctgccaactacacaccctttactggctggtaaatgctcgcctcggctcagtgatttctgtgtttgtaattatgaaaaaaaaaaaaaaagcttttaaaattcttttctttctttttcaggttataaacactgggattagcatggctccaaatgttagtgtgaaaataatggtaccaaattcttttctccctcaagatgataagttgttcaacgttttggatgtccaggtaacagtgtgttccccctgtctgacctagcctaagtgtgtgttaaatactagacctgctgtgaagctgcatagtcctgctgaccccagtcacacccggtctcagggactgtctgtgcattaacagaggggactttgaatattttttttctacactgtagaccagaggtggcacctgcattgacatatacaatcagaaagcctggttcttccttctttattaactattttatatgactttcttcgggacatgaacccacagaagtcatgtagtcagtaaaatattccctaaagcttgaagccagtgcagcaagagcagagaacgaagccctctttaaggaaacatttgaatcatttcttatgcgagtgtttagtgtcttataaagtttttgtttgttttgttttgttttgttttgttttacctctgagtatcaagaaacagcaatcacaaaaaaaaaaaaactactatatgagtttggaatctttttttgaaaatactttgattccagatttaaatgctaggatgtataattgtaatatattttgttttgtggtttatgttttatgtaaccaaaaagaatttaactttaggctaatgtttatctgtcatttttttactcatttctgtaaacttggaccatgttgtcgaagtaggactggctataatttgggtggggttttaattgtgggtttgctagagattttcttatattttagtaaaaatattcaatcgaaacttctgaaaccattttgtattagctctgttcaaagagacatgatccttttcttgttctctatctttagacaactacagggcaatgccattttaaacactatggaagagagtgtacatttgcacagcaaaaaggcatagcggggacgttgaccgatatagtcaaattcctatcaaagactgataagagactcctggtgagtttccattcttcagatgtgcatttctgtcttgctacaaagaactaaaacattcaaaaccaaattcaacaggggtttgtgctgccaggagaatgctaagagctgtaaacctaggtgatattccctctagtaaggaaatagcatgatggagtgctgagatgggcccaggattaagtgtgtgctataggggttcattacctagcagttaccacccatgtaccacccagacattattccattaccctcttgacaccaagttacccgggcagccatatttatagcacaagcttctcattttcccaatttagtgactttatgagagaaaatggagaagttgtgcaacaacaaaccagagcacataacgtagggaagagactctaattatgagcatcatccttttcatcctgtcccagaatgttcagtcctaagatgaaacacgtgctacacattgaacacactgtgtaacttataaaacaagaatgtttattgtattgaaggaaagatgattataaaaaggacagctttctaaatacaataaagatacttaaaaatacttcctcacattcaattgtgtgagtgtgtacaggaaagtatgtctctgtatgcctagagaagtcagaggtcaacttgcaggagatagcactcttcttacatcctgtaaggatttgaacacaggtcttcacgtttagcagcaagtaattttacctgctgaagatccatcttgctggcacactaagaagattttagatctatgtgaaatgtgttttacattttaaaattcatatatatatgaattatatatgactatattatatatattatatatgaatatatatgaattttaaaatataaaatacatttcacaggtgtcaactgccctctcccctctgctaacttgtttggggcagattttccttgttgttttgaggctgcttctcaaaaattctttctcccatcttgtggtaggaacagtgggattataagagcatttatatcagatatttacatggcatcattgcgtggcaatcattctatccactgaaccatcttctccagctgcttattttttaagtgtaaaaaattttaatgccagtgcttttaattcttttcaagtattgcatgaaagctgatcaacactgtttagatttcttatgcaatttcggaaaaatggaaagtgggaaggaagccagcgttcatattcagctggagggcaggccatccatcttggaaatggtgagtctgaaatcatatagataactttgtgatgtggatctataaagccagttatttttacatagacaggatattatagaaacagttttaaaaattacatagataagaatacagcttgagaataaaacccaaatctcttttttttttttttaccacactacctgacagagatgaactatagcatccttgggtttcattcagaaatcatgcaactttctgtgaacttaattaaatagaagttgactatcctatcagctcacatcatcttaagtcaccaggtctcaatggctgtaatgctgcaaccctttaatacagttcttatgttatgatagtatctcccaatcataaaattattttattgctacttaataactataaatttgctactgttatgaattgtaatgtaaatatatgatactcagggtatctgatacaaggctcctaaaagggttgtggcacataggttgagaaccactgccttaaatcatcctttaaaatgtgctatttaaaaactaaaaccaaggaataaaattaaaatctgatttcagagaaaaccaaatggaaacatcaaacagtatcaactaaacctgggtgtggtggctcatgcctatgaccccagcactctggaagtcttaagattatctggactatatagtgagttcaaggccctcttgaatttgagatccaatctcaaattaaaaaaaaaaactataacaaaattctgtaacaaaattacatttttataaataacaaactttaaaacttcaaatagaaaaggaattaagagtattttggatttttttcctctaaagagcacattttacaaagagctcccagatgacaggagaaaactgaaaacactggctcagtttccccttctggtcagtgtggacaatgtcagtgaccagtgtagacaaggccagccaatggagttgcaaactgagacaaattttgttcacatattttagttgacccttgcccatgatagctaaaagaaatggctctactacatgttcaatagcatttttgttaaattataacacagtggtcaaaggaatattcatcagatagcagagagagagagagatccattcatcttagcttcagatatgcataaagtcctgaggccagcatcaggactgcctctcatatgccccaagtttctccacagaggctctactgacacagtggacagaaaattttgttgtcagacatccatgcacactgcaagacatttaagagtgccctacaccccaagtggttcctaccactgttcacatctctacagttaaagatgtccccagacattacatactgtccctggaggataagtcttcctgttgaaagaatgctgtaggcctaggtgaagtttggaatttctagctctaaagacaatctttacccagtagattttagcatttgagggaaaatagatctccttaagaatctgtagtcaaggaccaaggtgtagctcaattgggataatgcttgcctaacatccacaaagccctgagatcaatccccagacctgagcactggtgtgaactaggtatgtagtgatgtacacctgtaattagattatagtacgattagtaaatcaaggtcactcaactaacagcctgggctccacgtgatttgctttgaaagaaagagagaaaatagaagaaaaagaaagaaaaaaagtaagataggggggagaaggaggaaggaaggaaggaaggaaggaaggaaggaaggaaggaaggaaggaaggggnnnnnnnnnnnnnnnnnnnnnnnnnnnnnnnnnnnnnnnnnnnnnngaaggaaggaaggaaggaaggggaagggaaagaaagaaagagagagagagaaagagagagaaagaaagagaaaatagaagaaaaaagagaaagtaagagggggagaaggaggaaggaaggaaggggaagggagagagagagagagggagagagggagggagagagagagagagggagagagaaagagagagagagagagagagagagagagaaagaaggaaagaaagaaagaaagagtatcattatcaaaattgctcagtggttgaaacacttccctcaaacaagatgaccagcagcactgtggtaggaaaaccacctacaataagccctcatctacctccacatgtgcataaaagtgaataatagtactatttttttaattatatgtaagtactatgttcttatccaccccctacaaatgcacctcccatgaaattgaggatcatgcttatgagtccaaagaaagccattataatttcagaaagttacagaaattttagatagcaaactggcatttctattgacatgtcttgtgcaatgaaatgtgaatcaaactgtggatggtttcttttcaaaacaggatgagacctcatcactcaagtttgaaataaaagcaacagcttttccagagccacacccaaaagttattgaactaaataaagatgagaacgtggcccatgtaagatctgttctcttaggggctacatgaagactgtatgggaactagttagagggtgtttattagtggtgccttcttgggatctgagtcaagagtcagcctgtcaccaggccatagaggacttttaactccttacccagaggtagcattttccacaactgatgggaagtatagagagagctctctggagccgcgatttggtagtggtgagaatggaaaggatgggaagagctgtagagcattccactcactgtttctgctaaacagttgccagggcttggtaaggctgagactagagcagggcagggtgaacagttctgatctctgtggaggcctgggaggcttttctcaagggaaatgtcagcagtgctatgtctgagtgcgtgtttcttttccctaatttgtgcaggttttcttggaagggctccatcatcaaagacccaaacgacatttcaccatcattattattaccatcagcttgctacttggacttattgtacttttattaatttcatgtgttatgtggaaggtaatcctttaataattatcaatttcatgtgttacatggacactatgcctttcatagttaccaatagtacactactcaaaatgcctttattgtctcaaagccaattatttcaatatttactattcttgtttcccattgctatctcaatgtttactactgatcacctatttattctaacttcactacaagagtccgtttgggaaaatgtgaataacgtcaaatatcaatgtaatggtgtcttaatcagggtttctattccctcacaaacatcatgaccaagaaataagttggggaggaaagggtttatttgacttacatttccatactgctgttcatcaccaaggaagtcaggactggagctcaaacaggtcaggaagcagaagcagaagcagaagccatggagggatgttccttactggcttgcttcccctggcttgctcagtctgctctcttatagaaccaaaactaccagcccagaggtggtcccacccacaaggcacctttcccccttgatcactaattgagaaaatgccttacagttggatctcatggaggcatttcctcaactgaagctcctttctctgtgataactccagctgtgtcaagttgacacaaaaccagccagtacagatggggagtgcatatatatgacagagaagtcctatgttgttcatgctgcatggtccatgctgattatcactgtttacagctgtttccagagctaggcaaacatgggcaaagttaaaagtattgtatactgattagatatttgatgtgactcttatgggttcagaactatacacttgtcatctaatctgttttcaggctggattctttaaaagacagtacaaatctatcctacaagaagaaaacaggagagacagctggagttatgtcaacagcaaaagcaatgatgactgaagacttctacactgagagaactgaaaaactcaggttaggaaaaagaaatcctgttcagaagacccgtcagaatttcttctttttttccatgtgcttatgattttgtgacatactcttagtgcaggggaaatcttcaagaaagaagctacccaaaggtggcttgtcagcttcggtggatgagtgaagcaaaacactaaagctctggatgtaccggagaggtgacctgtttaagacaacttaaagctagagagaatccagactcagcagggccgacttaaagggaatgatttttcaacatcactgatgaagtggctcatctcagtgaaatggatgccatgatgtggaaacttgttggcttcaaatacttttgatttatcttcaaactatgatcatgatctttgaattcactgagactctttcaaatggctgttccaagattgtctaatggataagtcattttttattagatattttctttatttacatttcaaatgttatcccctttcctagtttccactccaaaaatcccctatcctctcccctgtcccctgctccccaatcgacccactcccgcttcctggccaaggcgttcccctatactggggaatagaaccttcacaggaccaagggcctctcctcctattgacagagcacagggtccccaatgaaggagttagagaaaatacccaaggagctgaaggggtttgcagccccataggaggaacaacaatatgaactaaccagtaaccccagagcttcttgggactaaaccaccaaccaaagaaaacacacggagagacgcatggctctagctggatcaatcattttaaagcagaggacctgaagactgctcttggtggtgctgcatccctgggctgtgtccctacagcccttttactctgcagataggaactgtaaaatcctaaagaacaaaatccgtttgcagcaggatggcttctggggaaatggtcagctgcggactcttgtgtgtatgtacatatacttttttaaaggataaaaatctcaatctacttctttattaagaacacccaggaatagtttgcatcttctaagcttcacctttaataccaattcttaagaattttatcctcatagcagattataaatatcgcactttagctgatacacactgatacaacatgaactgcagctcactgatgatcgaaaattgtgtgaagagagatttaggaaccaatatttcataaaacattcactgcatcaaattatgcaaacatgagtatctgctaggatattgttgtttctcttggtctggttgaatatacataaactaggactctaaaacaccacattctgtcatagaaatggagacacaaaaatcatagttggaactgcaaatcactgatcaagtttgtgtgcagtggcatcaaaattcccatgcgataatgcatgcttgatgttgttgaacaagatactattttaaaatgaaatagcttctacctgggtttcacataatttgtctgtaattacaatcatttttgtagtatttatttcatatatgtagtttgataaatgtaagttttcatttgaatctgttatgtgtaagcaagctaaggccagactttgaacatgtgctgggtaaaaggggcagccttcagtgttgtgaagaaagatcgctttacaggaagggtttgatgccagctggcccttcctcagatttcctgacttgtgaggatggcttgttcacaagcctctggctggagccgtggagggaggttttgagtgctgaaacttgagcatagagcatcagatctgggtgagcagaaaccatatttaattagatgcttatatttttaagggatgcttttttgtgtaaaaggtttaagttgatggttttcttataaaaattcaagtagttatttcatgaggatgccaaagttaatagatgagaaatcaatatcattttagacctaccgtttcaaggaatggtctctgaggagagttaaatgtggatcattgcactgaaaaccgactcctgcctttcaggtacaaaagaacgtagctacctcctgggccacattttgcccaattagaaagaaatatttttatatttattaataaaacttagaattttatataagctttaaaatgtagttatttcaaaagatgctgttatgggatgggtagtagaatagtagcctaagaggaaagaatgttttttaagtgggtgttcgtggttatgttactatctcactgtgaagtctgagattttacagaagttttgttttactaggttacaggagatactaaagaattatcttcaacagtattgagagagcacaatgttgttaaaattagatctaacaaacaccttccaaaaatcaaaactttgatttttttcattaatttcatattttttgattttcaaatacctggctactattttaattatattaaaatattttaattgcattaaagtagatactttaattatattaaatagatagcttcattaaaatgtgttgcagtaaatctctccaacccaaatatgccttggcaatgaaaacacaacacagttaatatgattgcatgctgtgcgcctagattgggcagatctactgctacactactgtcttccacagcttatgagaccccttagaacttgcggtttctccaggccatgtgcttctgctctgcttcacttcatcttcctccccctctgcatcctctccctcttccattttctccttcttttctctccctaccttcggctccgccttcccttttatctgcccaaatatcagctctcctttattttacaaattaaggtgggaatcaggtttacaggaaatcacctgagtgctgactcattccttgttcacaaccgctcatgggagaacagaattaacatcaaatataattagccccagggctatcctcaacatttacccctttctgtccaattaaaagactattttatctcagatataattgaacataacaattattattttgtaatttataaagtacaggagacctaacacccagtccatcatctttgttaattaaataaaaatctctgtcatctatccttacttaaaagactatagttctgcacctggctagttctgcatctgaaaaccatcctctcaaatctattcctctcaaagtgaaaagcctgggctcgcctgagactatgtagtttttcaacctcaacataaatccaagaatgactgatattaactgaaaatatataggaagcctaacatagcttccaaaatttagataatttgttgagaccactggtcacttggacagtcccttacttcaacagggtggagctttgatcttcaggctactggccttagtcatctgacaagacttagagaaacaagaatattaaggactagcctactgtctcggcagaatcaagctgtcctaacctgtagttgtgtcctttctttggacagtattatatctgtagatgaaatgagccaattcttgcctagtgactttcaccacaactagagtaactcaaagatgctcagtttcttctttgaatccaagacagggaaagctgtcaggagcagactagtctcaacaacaagtgaataaataacatcaaacttcacattctgtggacttctgatgtttttggaaaaccaattatctatatgaagtaatctgaactgttctctgaacctctctcagccatttctgattaaaataactgaaaacaccctaacaataaactcagagccaagaatttcctatctgacccttaactcacaggcttaaacatctcagctctgtttatcataacagcaattgaaggactgggtctaagccttgtacttcaaaatttttagtatcaaagacaacctataataaccacccgcagccgcaaagcttagggaactgggatgatgaatcttcataacttcttcaagctgatatgggcgttgagatatttttgaaggaagggggaagaatagggaaagggggagttagttggccttaggaaggccccaccatgattgtattagtttctgatgtctctgtcctgactggatccggatgaaaaaccaagatatcagttcaggcaagtcagttcagcatgtctgatgatgaaattcaccaaggctgtatattctgtaatatataaatctcaaaaaaaaaatttagtatcatcaatataacctttttgtttgattctcaggaatctagttctcagggggtctccttctatcaaatctgatccatataactctagaatgtgtaaataccttaatcaccttttccaaaaacacaaagataaaacctttccccaaatcagcatatccttcagctggtaaccaggaaaacctgtaacttgcgctctgtcccagaggaacaataaaacaaccacaacacacaaaatcacacacattttagcctatttaggcctttctaatttgtcatgtcaggatattaacccaaaatttccatggagtccacgttagacagaatatgaatctcttgcagactttattataccatcttacaacaattgattcatacttctattttcctttccttttcctttcctctcctctttcctttcctctcctctttccttttctttctatacctggttttaagaagcagtttgtcaaaccaggatttaaacccaaaattcccgtgcagcccacattagacagaatatgagtatcctgtaagacttattaaagcaatatatctttataccatctttaaagcaattaattcaaacttctactaatacctgttataccgtctatctgttgtgctctctaccaggagccacagacatttatttaattaatacctattataacatgtatctgttatgctctctacctggagacatagactttattaattaatacttgttcatagcaggcaattatcactgctgtctctacttggagtcagtaactaataatccctatatagttccaaatcacaggtaaaatttcccatctttaagtactatacctgcttataagaggcagcttgacaaaccaggatttaaactaaaaactccagtggagcccatgttagacagaatatgagtatcctgtaagacttactagagcaatatatcgttatactatctttaagtatcaaaaggttatatttttctctttatatcaatgagttatttggtctggagacctttgtacctttgcctcccaattttttattcatggggagaagctgaatgtaaaaagacccctgttgtctgtgtccctgtttggaagtgggggaggcagggtagggaacaaaggacatagggaagcaaacagggaaggctctctctggtgtagatgcttctctgctgttctctgtaggcccctcaaatcaaattcatactgctacagcctaggtcactgcccaagcccctttcaggtgttggggggcagtgaatttttatcttagttagttgagttcaaatcaatatgttgggcgccattttgttgtgttaaatctccatcccaaataagccccggcaatgaaagcatgatttaattcatatgcttacaagctgtgcacctagattgggcagatctaccactacactaccatcttccacagtttatgagaccccttagaacctgtggtttctccaggccatgtgcttctgctctgcttcacttcatcttcctcctcctctgcatcctctccctcttccattttctccttcttttctctgccccaccttcccttttatctgcccaatcatcagctctcctttgttttacaaattaaggtggaatcaagtttacagacaatcacctgaatgctgactcattccttgttcacaaccactcacaggagaacagaattaacatcaaatataattagccccagggctatccacaacaaaaatgcattttctatttgtatatatcttgcatgccagattccttcataataaatttctgcttacatacttctttcatatgcaatcacatgctactttgcaatcattcatttcttccaggcttcctccatagagcctgatcagtcttgggtgcagcctataaggaataacaagggtttgatgatttcatttctgggccactatgatttttcacatacctcacaagtgtggtgcataaatcacacatacagattggcatatactcctagctgagccacaagccagcaaggacctaaaacaccaacatctgtgaccattccaaagcactcttaaccacctttcctgcctggttaatatccgctagtgcctctgtgaagagacagttacttaagaacaccccacctagcagaggaccctgtccctccctcccagcacacttcagcctgctgagacattaagcttgctaagattgagtatgagtattgagtttctacaactttatacccattgctcattcttgttgatatatatgtacagtgtgtggaatgcattataaagatctaacagtcaactccattactttgtgtgctgaattaaataaaaaaggattttgataaaagcaaactgttcaacagattattacatgatattagaacccagtttggtcgtggtggtgggatgggagcagggctagagagtatggcactacattaaccttataaggtttaagaatatcctcaaagacaaacaatgtaaattgtcaacatgtctgtatcatttatacaaaataatgtttgcaatgccagcataaatgctcaggtttgtatttattgagaggtggtgcatatgtatttatacaatgtgctaactttctggcttttaatcttctgcttgggcttaggaggcagaacgcccttattatattaatagtgttgcatctagtattctgcacagaaagtcataaaatagttgggcttacctaatgtgaacctctgatgcagcttccattaagtcaccatctacattccacggaaacccgtgttctgaagcagttgtatggtttccaccctcctcctgtgggctgtatccattgctattactctttgggtgaatttttacttcttcaatgatataagtctccacaaagggaaaattgaactaaatataccaaaaaaaaaaaaaaaaaaaaacaaaaaaaagcatgatgcttcatgatggcccctattagaattaagtttcatcatcattctgacatctttatagctttgaaactttaaccagatagccccaggttttctgaaaaaggaccctctttccatgcccattcatctctactgtatgacagtttgtacctgtgaagaatttcccaccagaatgatgtcataatttctagttaaagacagactcttcagttgatctcactgacttcattacaatcttagttatctgatatgaaacaaactctagcacaagtttcacccttggaattcaatacaggagaacttgaatctaaatttataaaaattaaataggaagtacagaagagaaaggaaagaggcaatcaaacatggttttcccaggtgcttacctgccatcttaacaaacaaatggacacaaggtacaggatagtaattagccatcgagaatgttcaggtaatgttcaagttgttctttttcttctttgccaaaggatattacccaggtggaggaacagcaatgaatcctcaattatatctataaagaccctttatacaaatagagtacagggcaaaggtaacaagggctaagactgaatatctggggtggggagcagacataatttagccaatatcagccagccttggaaatttatgtaaaaacatagtctatgaaacgaatgaaaggtttacactcaacatgggagctctaacatagttaaagcgtgcaagtagtttcatggagagccaggctggtgagagttgctaagagctgaagtgagcatggactccacattttaactcagcttattatatattgtaagctgtagtgtctcctagacctttgctctgtgtataaaataagggtttgggggaaaatactaacccttaatttgctttaaacagctttttatattttgtgcttcattgaggtttgtatgcagaagggggaggggaaactatgttcactaagggataatcccaaagccattattttaaaatatgaaatgatcaatgattattaactatattcacaatacaacatttggctatcttaactactttgaagaacccaattacaaaatgtttcaacatactttgtatgccctgcccaagaattcctatgttgaagtcctaatcttgaatgtctcagaacataactgcttttgaagataaggcttctaaagatgtagttatattaaacacatttctgggtggcagagcctaattggaaactagtgtgaaaatatagcctatataatgagtgattatgcagtgatttctcttaagtaagaggcagatactgagaggtttgcacccaatgtgggagccaattgtttctttttggggtggtagaaggttgagagctttgaaaaataccagggattcacatgtcccaggggacagccacgtgaaaatacacttagaggacaaacatgtcccaaagggataatggcctcatgagatagtgaaacagttgacaccttcctcaagtcgtagctggaacttgcagtgagaaaatggcttcccaagaaccatgagttcatgttgaggaaatggaaagctgcccttgggaaagtggagaaatcagctattttaggaaaattcttccaagagaaactacaaaagacaagacaggctaaagatacacaagaggccattatagtgagtaaggtttgaatttaagaagagggagagatacaaaataagaaccaacagaagcagttgatgtaatgttgtgagaaaatgagaaggggaatttcaggaaaactgcaatatgaggggagatgctgttacctgaagaaaggggtaaagtcaaggtcagccatgggcccatcagactgggagacctgggttgtttacaaactttacagtataagagaaggacagaggttctgcaaatctgaagacctgatcagacccttgcatgggtatgtgcttagaagaaggcaagcaattagaataatgggaacaaagggaccacacagaagagaggatcctcagaagatgggagagtgaatttaaaagctttaaaaccacttgccaaaggtggtcatggagaagaagaaatgtggggaaagagaagagctagcaagagggtgcagataaaagggtcccaaagcgtagttttatcctgttttactgagttgggagtcactgtaaaaacagtgaggttatcttcaatctgttcgacagctgttcacaaacactgacattccagcaataaaaacacggctcagagaatgaaatgctaaaacaattcagaatttctttccttcctacataccagcactggctgcagattcactgcacagtggagaatccttcagtaactaagatatatgtagactttcttatatggcaaactggtttttttaatgcattatatataattcacattcccatgtttattattcactgaaatgattatatgaattagatggtattataaataccagattattgtagttctttattgtagtgtggaattatgagacaaacatgggggcctggggactggagtgatggctcagctcttaagaattcttactgcccttccagaggactcaaggatcattctcagtacaaatgtgaatcagctctcacaaccacctgtaactctagctcaagaagatccaactccctcttgtggctcccacaggcacacacagacacacaaaatcagtttgttctctctctctctctctctctctctctctctctctctnnnnnnnnnnnnnnnnnnnnnnnnnnnnnnnnnnnnnnnnnnnnnnnnnnnnnnnnnnnnnnnnnnnnnnnnnnnnnnnnnnnnnnnnnnnnnnnnnnnnnnnnnnnnnnnnnnnattcatgtcccataacagaagaatggatacatacaatgtggtgtgtttacacaatggaatactactcagctattaaaaatgacgacttcatgaactttgtaggtaaatggatggaactagaaaatatcatcctgagtgaggtagcccagacccaaaaggacatacatggtatgtactcaatgataagtggatattagccccaaagcccagaatgcccacaacacaactcaaagaccatat

SEQ ID NO: 342 - DNA, 3333 bp, Mus musculus
ggccaaccgtcgcatcctgtgcaactctggtcagtggccgttttgtgttgaatgttctccaccaagagcgcatggctgcggaagcgaggtgcagaccgaggtcccgagggatcgccctccgggaagcggtgatgctgttgttgtacttcggggtgccaaccgggcactcctacaacctggacccggagaatgcactgctgtaccagggcccctccggcacgctgtttggctactcggtggtgctgcacagccacgggtcgaagcgctggctcatcgtgggggctcccactgccagctggctctctaatgcctcagtggtcaatcctggggcgatttacagatgcgggatcagaaagaatccaaaccagacctgcgaacagctccagctgggtagccccagtggagagccttgtgggaagacatgcctggaggagagggataaccagtggctgggggtcaccctttccagacagcctggagaaaatggctctatcgtgacttgtgggcacaggtggaaaaatattttttacatgaagagcgataacaaactccccactggcatttgctacgtcatgccttctgatttgcggacagaactgagtaaaaggatggccccgtgttacaaagattatacgagaaaatttggagaaaattttgcatcatgtcaagctggaatatctagtttttacacacaggatttaattgtgatgggggccccgggatcatcgtactggactggcaccgtctttgtctacaatataactacaaaccaatacaaagcatttgtagacagacagaaccaagtaaaatttggaagctacttaggctactcagttggagctggacattttcgaagtccacatactaccgaagtcgtgggaggagcccctcaacacgaacagataggaaaagcatatatatttagcattgatgaaaacgaactgaacatcgtatatgaaatgaaaggtaaaaagcttggctcatactttggagcttctgtctgcgctgtggacctcaatgcagatggcttctcagatctccttgttggagctcccatgcagagcaccatcagggaggaaggaagagtattcgtgtacatcaactctggcatgggagctgtgatggttgaaatggaaagggtccttgtcggaagtgacaaatatgctgcaagatttggggagtctatagcgaatcttggcgacattgacaatgacggctttgaagatattgctattggtgcaccacaagaagacgacttgagaggtgctgtctacatttacaatggccgagtcgatggaatctcctccacctactcacagagaattgaaggacagcaaatcagcaaatcattaaggatgtttggacaatctatctcaggacaaattgatgcagacaacaatggatatgttgatgtagccgttggtgcatttcaatctgattctgcagtgttgctaaggacaaggcctgtagtgattgttgaagcatctttaagccatcctgagtctgtaaataggacaaagtttgactgtactgaaaatggacttccatctgtgtgcatgcatcttacactgtgtttctcatataaaggcaaagaggtcccaggctacatcgttttgttttacaatgtgagcttggatgtgcacaggaaggcagagtctccgtcaagattttatttcttctctaatgggacttctgacgtgattacaggaagcatacgagtttcaagcagtggagagaaatgtaggacacaccaggcattcatgcggaaagacgtgcgagacatccttacccccattcatgtagaggccacataccaccttgggcatcatgtgatcaccaaacgaaacactgaggaatttccaccactccagccgatccttcagcagaagaaagaaaaagacgttattagaaaaatgataaactttgcaaggttttgtgcctatgaaaattgctctgctgatctccaagtttctgcaaaagttggatttttgaagccatatgaaaataaaacctatcttgctgttgggagcatgaagaccataatgctaaacgtgtccttgttcaacgctggcgatgatgcttacgaaaccactctgaatgtccaactccccacaggcctttatttcattaagatcttagacctggaagagaaacaaataaactgcgaagtgactgagagctcaggcatagtgaagcttgcctgcagcctaggttacatatatgtggatcgcctctcaaggatagacattagctttctcctggatgtgagctcactcagcagggcacatgaggacctcagcatcagtgtgcatgcctcctgtgaaaacgagggcgaattggaccaagtgagggacaacagagtgaccttaacgatacctctaaggtatgaggttatgctgactgttcatgggcttgtgaacccaacttcatttgtgtatggatctagcgaagaaaacgagccagaaacatgcatggccgagaagctgaacctcactttccatgttataaacactgggattagcatggctccaaatgttagtgtgaaaataatggtaccaaattcttttctccctcaagatgataagttgttcaacgttttggatgtccagacaactacagggcaatgccattttaaacactatggaagagagtgtacatttgcacagcaaaaaggcatagcggggacgttgaccgatatagtcaaattcctatcaaagactgataagagactcctgtattgcatgaaagctgatcaacactgtttagatttcttatgcaatttcggaaaaatggaaagtgggaaggaagccagcgttcatattcagctggagggcaggccatccatcttggaaatggatgagacctcatcactcaagtttgaaataaaagcaacagcttttccagagccacacccaaaagttattgaactaaataaagatgagaacgtggcccatgttttcttggaagggctccatcatcaaagacccaaacgacatttcaccatcattattattaccatcagcttgctacttggacttattgtacttttattaatttcatgtgttatgtggaaggctggattctttaaaagacagtacaaatctatcctacaagaagaaaacaggagagacagctggagttatgtcaacagcaaaagcaatgatgactgaagacttctacactgagagaactgaaaaactcaggttaggaaaaagaaatcctgttcagaagacccgtcagaatttcttctttttttccatgtgcttatgattttgtgacatactcttagtgcaggggaaatcttcaagaaagaagctacccaaaggtggcttg

SEQ ID NO: 343 - protein, 1049 aa, Mus musculus
PTVASCATLVSGRFVLNVLHQERMAAEARCRPRSRGIALREAVMLLLYFGVPTGHSYNLDPENALLYQGPSGTLFGYSVVLHSHGSKRWLIVGAPTASWLSNASVVNPGAIYRCGIRKNPNQTCEQLQLGSPSGEPCGKTCLEERDNQWLGVTLSRQPGENGSIVTCGHRWKNIFYMKSDNKLPTGICYVMPSDLRTELSKRMAPCYKDYTRKFGENFASCQAGISSFYTQDLIVMGAPGSSYWTGTVFVYNITTNQYKAFVDRQNQVKFGSYLGYSVGAGHFRSPHTTEVVGGAPQHEQIGKAYIFSIDENELNIVYEMKGKKLGSYFGASVCAVDLNADGFSDLLVGAPMQSTIREEGRVFVYINSGMGAVMVEMERVLVGSDKYAARFGESIANLGDIDNDGFEDIAIGAPQEDDLRGAVYIYNGRVDGISSTYSQRIEGQQISKSLRMFGQSISGQIDADNNGYVDVAVGAFQSDSAVLLRWVVIVEASLSHPESVNRTKFDCTENGLPSVCMHLTLCFSYKGKEVPGYIVLFYNVSLDVHRKAESPSRFYFFSNGTSDVITGSIRVSSSGEKCRTHQAFMRKDVRDILTPIHVEATYHLGHHVITKRNTEEFPPLQPILQQKKEKDVIRKMINFARFCAYENCSADLQVSAKVGFLKPYENKTYLAVGSMKTIMLNVSLFNAGDDAYETTLNVQLPTGFIKILDLEEKQINCEVTESSGIVKLACSLGYIYVDRLSRIDISFLLDVSSLSRAHEDLSISVHASCENEGELDQVRDNRVTLTIPLRYEVMLTVHGLVNPTSFVYGSSEENEPETCMAEKLNLTFHVINTGISMAPNVSVKIMVPNSFLPQDDKLFNVLDVQTTTGQCHFKHYGRECTFAQQKGIAGTLTDIVKFLSKTDKRLLYCMKADQHCLDFLCNFGKMESGKEASVHIQLEGRPSIMDETSSLKFEIKATAFPEPHPKVIELNKDENVAHVFLEGLHHQRPKRHFTIIIITISLLLGLIVLLLISCVMWKAGFFKRQYKSILQEENRRDSWSYVNSKSNDD

SEQ ID NO: 344 - DNA, 99046 bp, Homo sapiens
caggtagatcacttgaagccaggagttcaagagcagtctggccaacatggtgaacccatctctactaaaaaaaaatacaaaaaattagctgggtgtgatgacatgcacctgtagttccaactactcagagaatcactttaacccaggcttgggaaacagagtgagactctgtcttaaaaaaaaaaaaaaaaaagcatccagaaatgtggtctaatagtctgtatctggatagaagaattgagcttcttgtttctggttgggaatttcagtactatttaaaaaaaaaaaaaaaactatcatctgagtttggatgccctaaaagctgaccttgaggcaagcacttgggtgtaacagtttattgtgggcaaagggatgtcttagaaagttagattagagagaggcagagaaattgtaaaaaatgttttatgcatctctaattgttttacatgctttaccttagtaattttttaaaatctaattttaaaaagtgtaacaaaaaacactacttgccagacgtatctacatgaatgtcacaccaatacctcagacttatctctagaacccagcgagcactatctaaacacactctccatctcccccaacaccatgcacccctccaccccaccctgttcttccccattccaactcttccatctggttgctttatgttttgtttttcatgatattaccagtgtctctgtcaccaggtctaaaaatgccggtcatattttacttccttttagtaccaacaccacacaatacacatcaggttttttccccaatgccttacgagttctttcattttccctgccctgctctttatgtaagtttgggtcttgaaactgcctttatgcctacaccatttatcagcaaccaactgtcttttgtctcctcattgtatatgatatttaatttgactacattatattatctaaggtatatcatatcttcctttgtaaattataaactgagattaggactcactttttatacagtttcatatctgccaaaggacttagcgtattgttttgcatgtaataattaatgaacataaacctataaatttccagcttatgacattaatgatgtaaaaagccaaaatcatgtaaaggccatttaaaaaatacagagcacctgctacttgccaggtagcatataaagtgctagagatatggtggtaaacaacaggagcaaaacaaaggatgttttctactctcaaattctagtgagaaagatataatgaaaaaatatatgattataaattaaagagttctggagataatgaacaggattgtctggcagataatattatagtgacctattttaaattggatgggcagaaagtcctctgtgaggacatctttaagctgagatggaagaaagagaaagaggaattatgtgaaaagtcagaggctatgtgtccgagaagaggtaataatatggtaaagaccttgaggataaaagaaaccttgatgcacttaaggaaattaagaaaggccaatatgacaaaagccaagtgatccagggggagtgaccaatgctaaggctggtgctgtagtcagaagccagatcatagggtccttttaggccacgttgagtgtggtttgtactacaagaaagcgatggaaaactatttaaaggatttaagcaaaggagtagttgcctgattcatttagaatcttgaaagttcactttagcttctgtgcagaaatttgatgaggtgggggaatgacaaagggagaccacgtagcagattcttaaatagcccagatgaaattatcttgtgaaatggtagtagctgtgcaaaagaagattcacataagatgggcttgagatatattttagaggtcaaattgataggaccttgtgactgatggattctttgtttaagttagagggaggtattactttccaaatttctggcttgaacaactggtcagatagagtgcccagttgttttgaaaagaaagagattgggtggaagaatagtttagatgagaagtcagggaaccagaactcagtgttaggtatgttacgcgcacaatgcccactatacatccaagtggagatgtctggtaggcagtagaacaaatgaacccggaactctgaagaaaggtcaaggctggagacataaactggagactcatgatatttgtttatttatttcatgtcaaacaattgagggtatatttaaataactcatgaaatagctgattgattaacagatattgcaacatgtatataaaaaaatcaaacttttttttattattatactttacgttctagggtacatatgcacaacatgcaggtttgttacatatgtacacatgtaccatgttggtgtgctgcatccattaactcatcatttacattaggtatatctcctaatgctccttcccacctccctgcaccccatgacaggccccggtgtgtgatgctcccctctctgtgtccaagtgttctcattgttcaattcccacctatgagtaggaacatgtggtgtttggttttttgtccttgtgatagtttgctgagaatgatgatttccagcttcatccatgtccctataaaggacatgaactcatccttttttatggctgcatagtattccgtggtgtatatgtgccacatttttttaatccagtctatcactgatggacatttgggttggttccaagtctttgctattgtgaatagtgccgcaataaacatacgtgtgcatgtgtctttatagcagcatgatttatagtcctttgggcatatacccagtaatgggatggctgggtcaaatggtatttctagttctagatccttgaggaattgccacactgtcttccacaatggttgaaccagtttacagtcccaccaacagtgtaaaagtgttcctatttctccacatcctctccagcacctgttgtttcctgactttttaatgattgccattctaattggtgtgagatggtatctcattgtggtgttgatttgcatttctttaatggccagtgatgatgagcattttttcatctgtcttttggctgcatagatgtcttcttttgagaagtgtctgttcatatcctttgcccacttgttgatggggttgtttttttcttgtaaatttgtttgagttctttgtagattctggatattagccctttgtcagatgagtagattgcaaaaattttctcccattctgtaggttgcctgttcactctgatggtagtttcttttgctgtgcagaagctctttagtttaattagatcccatttatcaattttggcttttgttgccattgcttttggtgttttagaaatgaagtccttgcccatgcctatgtcctgaatggtattgcctaggttttcttctagggtttttatggttttaggtctaacatgtaagtctttaatgcatcttgaattaatttttgtataaggtgtaaggaagggatccagttttagctttctacatatggccagccagttttcccagcaccatttattaaataggaaatcctttccccatttcttgtttttgtcaggtttgccaaagatcagatggttgtagatgtgtggtattatttctgagggctctgttctgttccattggtctatatctctgttttggtaccagtaccgtgctgttttggttactgtaaccttgtagtatagtttgaagtgaggtagcatgatgcctccggctttgttcttttggcttaggattgacttggcaatgcaggctcttttttggttccatatgaactttaaagtagttttttccaattctgtgaagaaagtccttggtagcttgatgagcatggcattggatctataaattaccttgggcagtatggccattttcacggtatcggttcttcctatccatgagcatggaatgttcttccatttgtttgtgtcctcttttattttgttgagcagtggtttgtagttctccttgaagaggtccttcacatcccttgtaagttggattcctaggtattttattctctttgaagcaattgtgaatgggagttcactcatgatttggctctctgtttgtctgttattggtgtataagaatgcttgtgatttttgcacattgattttgtatcctgagactttgctgaagttgcttatcagcttaaggagatattgggctgagacaatggggttttctagatatacaatcatgtcgtctgcaaacagggacaatttgacttcctcttttcctaattgaataccctttatttctttcttctgcctgattgccctggccagaactttcaacactatgttgaataggagtggtgagagagggcatccctgtcttgtgctagttttcaaagggaatgcttccaatttttgcccattcaggatgatattggctgtgggtttgtcataaatagctcttattattttgagatacgtcccatcaatacctaatttattgagagtttttagcatgaagggctgctgaattttgtcaaagaccttttctgcatctattgagataatcatgtggtttttgtctttggttgtgtttatatgctggattacatttattgatttgcgtatgttgaaccagccttgcatcccagggatgaagtccacttgatcatggtggataagctttttgatgtgctgctggattcggttttccagtattttactgaggatttttgcattgatgttcatcagggatattggtctaaaattctctttttttgttgtgtctctctcagcctttggtatcaggatgatgctggcctcataaaatgagttagggaggattccctctttttctattgattggaatggtttcagaaggaatggtaccagctcctccttgtacctctggtagaattcggctgtgaatccgtctggtcctggactttttttggttggtaggctattaattattgcctcaatttcagagcctgttattgatctattcagggattcaacttcttcctggtttagcattgggagggtgtatgtgtccaggaatttatccatttcttctagattttctagtttatttgcgtagaggtgtttatagtattctcttcaaactttatttttaattgatacttttttttacctgctgagtaaaagaacgttatgcaaaagcaaaacaaggattcctcaaggattttaaagccaattattgggtgtgtagaatatagtaagataatataatttaaattgtaccttctacgtactctttcttttgtactcttctatgaggatgtttaacacaaaaaaaaaagacagtcacggataattttagaggattgtttcttcaagtattttaattgtatcccccactgaccatccaatacagttatttgatattagttgtgaatatcttttttccttttttaactttgttttattatggtacaatatacatataaaatgtatcatctttaccattttaagtgtaaagtccactggcaataactacatttatatatatatttttccctttatcgccctccacctaccgtttcctctcctatagtaactaccattctactctctatgttcatgagatttgctttttaagctcccacatatgagtgagggcatgcaatatttgtctttctgtgcttggcttagttcacttaacataattgcctccaggtccatccatgttgctgcaaatgacaggattttaatttttttatggttgaattatattccattatgtatgtatgtttctttatccattcactcattgatgggcacttgggttgattccatattttagctattgtgaatagtgctgcaataaacatgggagtgtagatatttcttcaatgtattgatttcctttctttaggatatatacccacaagaattgccagatcatatcatcgttctagttttacttttttgaggaacctctattctgttcttcatagtggctgtaataacttacatttctagcagcactgtatgagggttcccctttgaccccattttgtcaccggcatctgtttttgccttttttatataagccattttaactggagtgaggtgatatctcattgtggttttgatattcatttttctaatgattagtgatgttgtacatgttttcttatacccgtttgccatttgtatatcttcttttgagaaatatctgtcgagatcttttgccaattttgaaattacattctttgttaggttttagttttgttgctattgagttgtttgagctccttatatattctggttattaatccctcatcagatagtgtgccaatgttttctctcattatgtgggttctctctacatttagttgatgttttctttgctgtgcagaagctttttagcttgatgtaatctcatttgtctatttttgttcaggttgcctgtgctttttaggtcttacacaaaaaaatctttgcccagaccaatatcttagagcatttccccaatgttttcttttagtaatttcataatttcaggtctataattcattttgatttggttttggtgtattggttatttcaatagatgctgagatagcatttgataaaattcaacattcctttatgataaaaattctcaccaaaatggatatagaaggaacatacttcaaaataatgaaggccatatatgacaaacctacagtcaacatcatactgaacacagaaaaaatgaaggcctttcctccaaggactgaaacagacaaggataccccctcttaccactgttattctacatagtgcagaaagtcctggccagagctatcaggcaagaggaagaaaggaagggtatccaaactggaaaggaagaagtggtgagaaagttttaattttatttttttgcatgtagttattaagttttcctagcaccatttattaaagagactgtttttttccattgtatgttctttacagctttgtcacagattagttggttgtaagtgcatggatttatatgtggattctctattctgctccattggtctatgtgtctgtttctatgccaatactgtgctgttttggttactatagctttgtagtaaattttgaagttaggtagtgtgatgcctccagctttgttctttttgctcaggattgctttggctattcagggtcttttgtggtttcttataatttttaggaatttttctgtttcgtgaagaatgtcatttgtattttgataggaattgcattgaatctgtaaattgctttaggtagtattgtaattttaacaatattagttcttccagtctatcacggagtatatttctgggtttttgtgtcctcttcgatttcttttatcagagttttatttatagtttttccttgcatagatattttacttttttagttaaattgattcctaggtattgtacatttttgtagctattgtaaaaggaactgctttcttgatttttattcagattgttcactgttgtcatataaatgctattgatttttgtatgttgattttgcatcctgcaactttactgaatcagatctaacagcttttaggtggactctttagatttttctaggtataagatcatgtagtctgcaaacaaacctaatttgacttcttcctttccaatttggatacccttcctttcttcctcttgcctgatagctctggccaggactttctgtactacgtagaataacagtggtgagagggggtatccttgtctgtttcagcccttggaggaaaggccttcattttttctgtgttcagtatgatgttgactgtaggtttgtcatatatggccttcattattttgaagtatgttccttctatatccattttggtgagaatttttatcataaaggaatgttgaattttatcaaatgctatctcagcatctattgaaataagtataccgtttctgtttttgattctgttaatgacttatatttagatggtatttaaagacataggaaatgggttagatctcctaaagagggaagatggaaagagaatgaaagagtttccagaatatagccctgggggtttcccgcacttatggcggagggaagggagccatcagaggaaactcagagtggccagatagaaaggcaggaaaaagcttaataaggtggtatcatgagaagagagtcttcctagaaggagaaatgcttactcttgataaaaactgaaaaatagggtgagtccacattagaattctcgctactggggaggactttctacacaaggttagagatcacttgtattttgtctactataattttagtgcataatgcatttttttggcatatagtgggcacttatatacatattaatctgatgacatttaataattgagtgcccaaatatttatgtcgagttgagagctagggataggcatgagtctttcttaaacatccttctcttctccttcctccaccccctcacttgccttcagaagcattgatcagagagatagcagtatcttcagttttttttaaagcaacatgaaacacactttattcctgctaacattaggaaaagcgagctgttttccaagccctggaggaaggaaattcagctaactaacgtgaggtaatgtagggtggctatttcttgaaaggtagtgaatcataactataaccatactatggaaaaaagtcctgccttaccaaccactccactgactgcttgtcaccaaaactacgctatgaaccgaattgtgttgagtggctttcattgtaaaagattttggtgaagggagggaaagaaactggtaggggttcagatcagaagatctggctttgccagtttctggagggtgtcagaatggcttcaacatacctacttccttggcctcaactggaggttttgtagctgtaaacaagaaggattgcatagttcagaataacgacactgtaagctcattgtggaactgggttaaaatcagcatgtagatctactaagaaagaaacacactcagcactactacagaaagaaacagccatgggccctgattgttagctttctggaagccatttcatttttacaatagatttatcacacactgtattgactttttccagtatagagtaagagaaagttaatattcctcatgttttgtctgttgacagactgaaaataattgcattgagtttggctagaatatcctgtcattccataaacatctcaaactccacatggctaaaacttaacccatccatgcccccatctgcatgcacacatacatgcatataacttcatttctcagtgtttttttctccatgaatggtagcaccattctctttcaagaaagagaaatacttccccttgggattatcctatctctacttattgctgcaggggcttccaaaattaggttttctgtgttcagtcttgcattcacacttctgaaacccagagctgaccgagacaaattcttcaacttcctgtcagtcccaacatagatttaaaattcctaacctggctcatgaggttcaccatgtattcctgcttccctaagtcagcctcatatcacaccaacctgtgtgtggagtggctaaatactctagccaggcaagctctctcagttcttctacctggctcctctggagccctccttattgctcatcccattcttagcctgattcaagattcctggtccttcaaatctctctttaagtgtccttacctggatctttctctagttagtacaaatttttctatctaccattggagcgaacattttttgaaactttgtatcagtcctgccttactcttggtggaatcctgtggtcctagtcaagtgcctgctccatgaatgtgctgaataaatgaataagcattttaattgtgtatctgtcattagtgtcagatgtgttatttattccagcatggttttagcacacagacacactctttgatgcagacttttcttttctttttacatatagcaacaataaaaaactagactttcatctcctgaaaatatcagtctaataatcacctatggctgtctctctggttgctgaaggaaaaaaaaaaaaaaggcagggcacacctggattgcattagaatgagactcactacccagttcaggtgtgttgcgttgtgggtctccggcacatttcagaggctcattaggaccctgaccccacactggggtttacacccctaaaagcaggtgtgtcccgtggcaactgagtgggtgcgtgaaaaggggggatcatcaattaccagctggagcaatccgaatcggttaaagtgaatcaagtcacagtgcttccttaacccaacctctctgttggggtcagccacagcctaaaccgcctgccgttcagcctgagaggctgctgctagcctgctcacgcatgcagcccgggctgcagaggaagtgtggggaggaaggaagtgggtatagaagggtgctgagatgtgggtcttgaagagaatagccataacgtctttgtcactaaaatgttccccaggggccttcggcgagtctttttgtttggttttttgtttttaatctgtggctcttgataatttatctagtggttgcctacacctgaaaaacaagacacagtgtttaactatcaacgaaagaactggacggctccccgccgcagtcccactccccgagtttgtggctggcatttgggccacgccgggctgggcggtcacagcgaggggcgcgcagtttggggtcacacagctccgcttctaggccccaaccaccgttaaaaggggaagcccgtgccccatcaggtccgctcttgctgagcccagagccatcccgcgctctgcgggctgggaggcccgggccaggacgcgagtcctgcgcagccgaggttccccagcgccccctgcagccgcgcgtaggcagagacggagcccggccctgcgcctccgcaccacgcccgggaccccacccagcggcccgtacccggagaagcagcgcgagcacccgaagctcccggctggcggcagaaaccgggagtggggccgggcgagtgcgcggcatcccaggccggcccgaacgctccgcccgcggtgggccgacttcccctcctcttccctctctccttcctttagcccgctggcgccggacacgctgcgcctcatctcttggggcgttcttccccgttggccaaccgtcgcatcccgtgcaactttggggtagtggccgtttagtgttgaatgttccccaccgagagcgcatggcttgggaagcgaggcgcgaacccggcccccgaagggccgccgtccgggagacggtgatgctgttgctgtgcctgggggtcccgaccggccgcccctacaacgtggacactgagagcgcgctgctttaccagggcccccacaacacgctgttcggctactcggtcgtgctgcacagccacggggcgaaccgatggtgagtagagttggactgatgcgccctcagcagctcagagcggcgtgagaatggcgccctagggattccctgcccgattcaaactttcctccctcccaaggaggcaggagggaaacgctgcgagagccagctcgctggaaatctgccagggaaactaacttatcttggggcggcagcgccccgggtgcgttatggtgcaaggtcttggagcttcgagtcgggggtggtgggcggaggaggaggtggggaagctgccctgctgcggactgcacatctgtggcgacagggagctcagtgggcagcacagctcacgtctgagcgcacgtgcacgtgtctcgctttaggctcctagtgggtgcgcccactgccaactggctcgccaacgcttcagtgatcaatcccggggcgatttacagatgcaggatcggaaagaatcccggccagacgtgcgaacagctccagctgggtgagttgggtatgggaccaggagttagtgacctcccgaccccccatgtggaccccaccatagggcaagtcctggaaagattcacgttgcctgttacttctggtttaaagagcataaagttttcagtttcaactccatctcatcttgcctccttaatataaaagggattccctttctgttaatatcgttctcccttttccttatggcaatgattgcagtactctgacaactatgctagagaaatttcttatgataccttctcttcatctctccccgtctctccgtgtgtaaagcacattttagactctctcagcgtattaaggacaggatccagctaagccaagacttgagaattttatttccatctttgacctatcaaccctcttaaagaacaggctaaggagcatatcaggaatagcaattggaattgatcccatatcccgtcgtttaacctaaaggcctaaaaaaaaaagtgatagttttacttacaatatacaatctaaaagaaaaggaaaattggcatcttcatcgttaatgtagtataattttccattcccaaaaccgtcatccaaaactcatgttatatgggtccatctttttgcagtcatttctcaatgtctcagatttgtgacaagttgaaaaatgtgtactgatagaggggagaagtttcatgtttcaaagccaaagacaagtttgttgcacacaggcaagtggggaaagaggaaggaatattaaataacaagacctatcttgttccaaagtgttactgctatatatattgcttaacttttttccccttaaagcaaccctgggtcatggttgacattgttcctagtttatgtatgaggactgtggctcagagttgcaaatacctttttaaaagttacttagctagtgactgataggtgggaactaaagtcaaactagggtctgaatgcgtccaaagtctaagccattttcttccatgtatgtatcttcaatgcaaataaaattaagtgaatggtttaatatgttgtctgctgagctgatgggtcatctgtaaacggtgaataaaattggtacttctttatatttctttgctataaatggacttttgagattagttattggatctttaacttcttttgtattttatagtagtctttgctctttttcaaactgtgaagctggttcccttcattcagatgaattcagatagagtataaacataatggaatttttacttttaactcagagcacctataaaagtctacgagttgtctgtagcatgtagaataagccctagcctcttgttaagcatcctcaataccagaaatcacagtaggaatgcataaaacattcacagacccatacattttggaatgattttgcaaagcataattttcattgcatgagagagttgtgggtgaagaattagggagtggagccgacaactttggtctgccagaggatcttggcaaggtctcaggagggagcaattttatttctgttgtcctgtcatagtttcctgatccatgacattataactactgatatttagtgcctacttcctgtctggatggacactgaatctatttctggatgtctgtgtttaactggataaatcatgacataatactgtattaaatttaagataatgcctgtcaatggaaggaaaaaattgtttgggcatgtgtagcatgggagttgactgttctcagagaaatgtaaacatagtagatatgtcatagatatgaattaaatgaagatcttttggatggatgaatgaataaaagtggagtgaaaatttatcaacctgactgatgagtaagataattgattagaaatgatgagccaaactgatttttaactttcaaaattttggccaatctacaaggtatttactgggatgaaaggaaaaaaggcaagattcctagtcagtcaatgagttaaaacattaatagtgatagtaatgccttgagtatttgccgaagagttgactgaagttatttctcatgtaacattctaaagaatacagatatcttttattcctcatgtaaagaaactgcctctctattcagaataaattcagtggtagcttgaagctataaaatagggattgaggctacagtctagaaataaaacactaaaaacaatacattggtaataaagataatttaggattcttaggtttgtgggctatgcactattttgtatgaagaagtttcaagagtgtgtgtaaatatatataagccatcttctgtagaagaatgtgtgtgtgtgtgtgtgtgtgtgtgtgtgtgtgtgtgaatcttctgtataaaatagcttcagttgtcctgtttcaaatgtgggtgactctaatgtttcaaaaatgcttagctcagtactgacacataatacattcaaaaaatagtggttcttctttattgtttacttaaatctattatctgtatgttatctgtaacaagcaggctgaggttaatagggacaattgataaactgaaccaaaagtttaaaaattaaaaggtaatacattaaaaggtagaagttgaaatgaaacacaatgagaaatttttgttggctgaagaaaaaaatgttataatgattaaagatcgatctgtgattgccatgtcagtaaggtatcttctttcctttggaatagctttacttgctatcaagaacctgaaggtgtagggtcttcaaatggtgcccatctcccacacaattaaaaatatccacatggactagtctttgagtctctgtagaatttcagatcagtggttgattcagatagactcctcccctcaaaagagaaggtccatatctcgcctaccctaccctctgtggacaaggtgtcccatatggtatattcatgccataagcagaagtgagcctgcctgtttatctagaatgcccagggtgagagacgttaggcatgagataccccttttagtcaagcaagttgactgcagagccagcaccaagagagttgcctggatagtaccgcaaggtgcttttcttcctgcatatatattgttggcctccttttacctccctgactccccaagagacatctcttctctcacttcttttgtaccagaggaaagtggtctctctgccaggagggtctgggcccagacttgctcgtgaagactatatctgaggagacccaggtgatttctacatgtccactttccacccgggcactctgcatcatcaggcttgtttaaaggaaactttaatcacagctggttcctaaattaaggtgtcacaaataatgactcaattaatatagttaagcatagtccatccatggactatcaatattcaaatagaacataataaaacatagaaatgattatcaaattacactaaaaagatggtctttatttggttattcaaatatgtttccagatctttcattactttggagttaccactgaaagcattatacacacactaactctcatttgggtaatagtctaaagttatacaattacactatccagtatagtatccactaaccacaggtggctttgaacacataaaatgtggctagtcagcgatgagagggctgtaatgtaaattacatactggcttttgaatacttagtataagaaaactcattaatttttatgatatatattgaaacaaacactttaaaattattgattacataatattttggatttattaggcgaaataaaattttaggttaaataaaattaattttatttttacttttttcatgtggctattataaaatttaaaatttccaatgggcttgtattatatttctattggacagcactgctgtagagaaacattaagttctctgtgtaaaaataacgctatctctttaggagatgctttcctgatatttatgcataaatgagtagaactttcactttcttttctagactaagtgttctatagttactgggccttcaagctgcctgcctgtccctctcttacaggaaagacccatctcaagttagtcaccattacccatatttagatttctttctggaaattttattaccttagccagcctcctggttcatattatataacctatttgaaagaatttaattagcattgcattattaaactaatgattacctaatcctcacttctacttgattcataggagttattagcttaacattaaatagcaaatatctcactgttgaaacttcaaatatgtttttcttgataactttttactttttcatttgcaatgtgctttaaattgtagcttatgaagctgagattgcagattggtcattttgaaaaatcatccctgaatgaaggctgttatacaattatgtagaaaatcaagacagagagcttcactaataaactatcaggttaccagaaagaagtttccttatttccagcagtttcccaaactttatgtcccaaaaggatgaggtttccacctaatttgagagatgaggctttctaaatgcactttagtttttgccttaagtttacttggtcactgagtgatatacccaatgacttgaaaatatatccccttggcaacagttctagggtcagatgctgaaatccgttgcacatgtgggtaatttatccattcagttgttcattgagggatgcctaagggcctgaacctgggcatacaaaagaaacatactccttgtcccaaaggctttaaagtttataagataggttattataggaaagtatggtgagatttaatctaggtaagacaataaagtgatgcattcctgaagaattggtgttcaagtgggggaactgaaaaataatcagaagttagccagaggaagaggctatggaaaagtttgccagaaagagcaaactgtgtgtataaagaccctgaagtctttgagagcacgatgcttttgaagaactaaaaattgtgtacagttgcactatggagtgtgagctaaactgtaggttagagaggcaggcaggaattacttctgatacaactctaagtatgaatttaccctaggatatttaaaactggggagtgacatgatcagatttgtgtgtttgacagattctctggttgcaggttagtgaatgctttggagtaactgggtcaagactgaaggcaatgaggcagttgtaggaagattttgttataatttagactacagatgacaagtgtctgtacaaggacactggcaatagcagtggagaagaacatggagattctgaaggtatttaggagatagcacttggtaattattgaatgaaagagatgagtgagaatgttccaaagatgttactgaagtttctaatttgggctgtgacatggatgatgatccaatatactgaaaaagggaagagcagcaggttttctggcaaaatgatgagtttcgttggcttgagattcctgtgagacatagaagtaaaaatctagtgatcagttctatgatcagttccatgtatgggtgtggtagacagtagagaggtctgtactagcaaatcagaggtgagtaattgacgtaaccccattcacctccaaggctttgattaccatctctctggggtaaatagatcaaatggccaatggcaaatttctaaggattcctacagttcgagaagtgattagaatagtgctgctcaagtctggctgtaacttaaattctcatgcagagcttttaacagttctggtggcccatctcaaactactagaatctctggggtaagtctatagggcaccagtagtttccagaggtccccagatgattccagtattcatccatgcttgagaaccgctggagaagaaaagaggctgaaaaaaaggctaagagggtgaagccaaagaggtagcaagaaaaatcaggtcaatctgacattaacctgattaaaggaagagagtgttttgagaagaggtgagtagttggcagtagtaaaggttgccaagacatcaaccagggtggtaaattatgaggtctcattagatttagagaattagttcattagtaacctcggtaagacaagctttaatggtgaatccactgcagagggttgagaagtgagaaacaatagcaagcgtcaataacttttaactgggttcttccttcattaatacattttattgattacttatgtattggaaatacacagttgaataaggcatggttaaagcccttgagtaactcagttgagatgatgggagagacaggtaaatggacaattaattatgagataatgtaataagcatgacaatagacaggtacatagtgatgagaagaaatgaatgggagaaggcttcctggaggagtgaaatctgagtagtggacccagttctgactggttttgaagagcacatgtaagggctcaataaatgtgaaataattttcatctttttcacatttgggcaaaatcccctgggatttgctgcacatttcagcctcattccaaagtgtctaggtccgccttgggttccaaagactcatatcaggtagttcagacagtaacacctgctcctgaaatagggagcttggaaatgactgtctttaaaagcagggatttttaattttgagattagctggaaacatcaaattagaatatggaagtggacatacaggtgacaggtctgggctcagtgtgcttgttctcagtttacctctgagaatttttaaaaatcatagaaaatcttttttatataaactatgtaaaacactataattcacaaaaatgttcagaaaatagattgtagacttagttctaaaaaccccttttatgggactccttgtgtgcagtggattagacatgttcttttgacattatgccctgtgtagaaaatgctggtcaatgtgcaccatctgtttgtgaatcccttcaaggtctacctcaccacaataccagtctgttttcttgcggaagttttctagaagtcattagactacaatcattttgtctgccagtcattgtcaatatcacattttatcctttaaactctgcccagagaaacgtcctttgatatctgtaactcctcatctcattctgatcctctattggccaggataatatgatacattcctcactggtttttctcatgtatttttaagccttcctatcttcctgacctcctttaattctttcattgctgtctttttttctttttctttttcaaccatcctaccctgtggattccaaaaccaagcatggaactttaatactgaccaccaagcatatttccctggagtattttctgtttacatttttgtattttcttgtttcaaagatagacaaagtggcatccacacattagtgattgtttttcaaatgaatttttaaatccaagagattaattgaaaaccatggaggttcagaattttctttccttattttctaatgttagaggtttaaatatgctcttttaataggttgtttcagaatagtataggtttattcaaaatgtccatagttgaaaataatggaaaagtactaacaactaattgtctggcagcatcagatggtggttgatagtgtgagttttaatcccttccttccccacttacaagtggtgtgaccttgggcaagtgcttagtcatcccttgtttcagattctgcatccataaaattgggatgataatagtattgtctacttcatagggatgttatgaaaagtgagttaatacatgtctttgcatgtattaaaactgtggtacgtagtaagcatgcaataagtattagtaattagagactaactttccctctttaaattatgcttacaaaatgtatcagctggggcacatttttcagctttagttattaaaaagacttgcgtacgttttctgtgggattttgaagaagtcctggcagagaccccaaacctaaaatcaaacccagaagtgacctagttgttagagttctgaggcctcatgatgactcaggatcagcccagatttataaaattgcaaccataaagcttggcactactctctggggacatttacctcttgaactctttctaaatagaatagaataagataaaaaaaaatagctgaaataactggctttttcaggactacaattatataaactgtttctcacataaattgagcatgattattggccattgtgagattttatttaggcaatatgaaaagatgacatttaaacacatttttttaaaaaaacatactttgagaatggtttccaactttgatgttttgctcttttgactcttattctccactagactagctggaggaaaagagttctagaagtttagtacttttatgtcctgtatcacctctaaaacccaaggatattttactttccatcacccaaaattatttttattgtagaattcataaacatcattatcttttagaaacattgccaccaggtttaactagatgtgtgaaaagagtacatagtttaatatagtcaattattatatgaattagtattaatggatttagtaagtattaggacttaaaaggaaaaactaaattaaggggccattttaattaaaaagctaaagactgctgatcaattcttgcagcattgtgagcgccctctgctggctcagttcaaagcaccataatgcacgtaccctgaggagcagaggcattgattatttattgaccacctactaggtgccaggcattcttgcatacacaagcataagttttctgtcatcctcatagccctgcaatggtaaattttgtcatgttctcatatttgaattgattttctcacttttaatatatttttcctaatctgaagttatgtgagtgaagggattatatactttaattattgcttttataaaaaatatcttgaatgaatgactctttataaaatatggaattggaacaagggtcattcatgttttaggattaagaaaaactttagagtggaacaatttgaaatgtatgggttttgtcttacaatggaatagagcttcagcttaaaaaaaaaagacagttggtggaaggtaagggcttttactgcttttctgaaacttcacatcacatcatgagttttgaaagatcaggtaagtatatatgttgtcttagtagccagaaagccagactgagagccccagtcaaatgtctgaattggtggggaagtgacagtacgatgacgcaggtagataaagcaggcatttacttgcattagaaagtcccaagctctcctagccaaaaagtatttcactagcactgtcaaaagttatatagaaagaagaccttagagtctgaccttttccctggtccttctttctttagtggaaatgccaaaatactgagaaccattctaaatggaggaaaagagcagggcaagatagggaacaagtaagtgacctttttcttgaacaagtgaaagtcgattgtacagtctgtgggcatatttgctatattttatatattttcagctaaaagcttcagaaagtggaatagatttcagttaattcatatgtctggaatatttctagagttctatgctatagagtgaaataacttagagatcaaagatgctattttttaattctaatctttccacttacggatttgggcaagttatttgattcctttaagactcaattttctcttctgtagggtaggattaataatacagcaatcctctgctactactgtgggtgtaaaatgagttaatgtgtatgattacagttccccaataatgatatgccacatatattttatgagccaggttatatgctgcattgcatgtgcagcttaatatgcttacattaatctttaatatgatgatgccaatggcaactaacatttgcatgttttcgctgccaggctgtcatccaagcacgtcacacatatctcatttactccacagtccttgcagaaaccctcggagataggcatcttctgaggaccccagctgattctgtcttaagtcatcccactcacaaatcatcctttgtaaagatcttcaaactcagagactgtttcctttcagaccatctgttactgtcttaaaattgaagaaaataatattttggaagagaagtaggggagaatcatagtaaagagaaaagacctctccaaagcttagatctctgagagtttggtgataattatgcagtagtacattctagtaaaggatttttttgtggtgatataatgtatttcaaaattccctccctcatacatactgagttcctgcctactgcatgtaaggcactatcttgagctgtgggaatgctgctgtcaacaaaagtcaatctgccctcatggaggtgacatacaaggtcaaatatctaatctcccatagtccctgtcacacttggagcaatgacactaaaactggtgatatgaataagaatgaaagggggaggagtaaagaatgtatttaactagctttgtagtatttctttgatcaaaattcctgttcatttgcatttatatacacatttatatatgctgatacacatcagtaggaagaaataaactgtagtaagcatgcatttttacattttctttcccaaattaaaaaaaataggaaagagaaaggcttaaaaggagatggtttttaatgtggctttgttttttaaatatctagtggaaaaatgcattcaactgtggaaagaattagtcattctagttgtttaaaagcagggaaaattatcaccatgttaatttctgctgacctcttttatgttaaaccatgtaaagtactttttcaattatggagctgatttgatttactaagagtttagatgagtaatttatgaactgaattgaaaaccagattataaatcacttcagcctgacatttggataaaatataatctgaggttgtttatggtgttctgtcagagaaattcatgagaattagctctcatggcagttctaataatcgtcatttttgaccaacttagaaatattgtatttctacccaaagacaatttgcttaacatttgatatttcaataggtaactaaacaaagggggaacaaaggatattacttttatttttaaaacagtaggtttttaaataatacaagaaaaggcataaccatctgttaatacatcaagcttgtccatgtggtccaggatggctttgaatgctgcccaacaccaatccgtaaacttagaatggcgatcattaaaaagtcaggaaacaacaggtgctggagagattgtggagaaataggaacacttttacactgttgatgggactgtaaactagttcaaccattgtggaagacagtgtggcgattcctcaaggatctagaactagaaaataccatttgacccagccatcccatgactgggtatatacccaaaggattataaatcatgctgctataaagacacattcacatgtatgtttattgcggcactattctcaatagcaaagacttggaaccaacccaaatgtccatcaatgtagactggattaagaaaatgtggcacatatacaccatgaaatactatgcagccataaaaaaggatgagttcatgtcctttgtagggacatggatgaaattggaaatcatcattctcagtaaactatcacaagaacaaaaaaccaaacaccgcatgttctcactcacaggtaggaattgaacaatgagaacacttggacacaggaaggggaacatcacacaccggggcctgtcgtggggtggggggatgggggagggatagcattaggagatatacttaatgtaaatgacgagttaatgggtacaggacaccaacatggcacatgtatacatatgtaacaaaccttcatgttgtgcacatgtaccctggaacttaaagtataataataaaaaaaaaagatataaatgttggcaagaatgtggaaaaatggggaacccttgcccactgttgatgggaaagtaagtataactataatggaaaatagtatggagattcctcaaaaatttaaaaatagaactattacaagactcagcaatctcactgaaggtatatatccaaagaaaataaaatcaatatgtcaaagaggaaaaaaaatatgagattttcttgcaattttttttttagctgatcagttatcattagtgtcagtgtactttacgtatggcccaaaacaattcttccagtatggcccagggaaaccaaatattggacacccctgagctacattgtagagctattgttcacaagcccaaccatatgctacaactacctggggggcttcaaaaaaattcttatgtctggttcttaacccagacatgtcaagtctgagcctctaagagtggggcccaagtggaggtactggtttcaaactcccttcagttgattctaacgtccagtcaaggctgagtactgagtggaaaaggagtggactcaggatcacacaggttaagggagaaaagctttggagaaggccatgatcacaagctgatcatgtagcagtcttacttcttctaccaagattccgcaggcacaacaaaagaaaagagaagctgggcatggtggtgggcacctatatccccagctacataggaggctgaagtgggaggattacaagagcccaggagtttgaggctgcagtgagctatgatcacgccaatgcactgcagcctagatgacagagtgagatcctatctccctaaaaaataaaaagagaaaaagtcccagaaattaagaaaaaacccagaacactaggggaaattacaggatgttctctgaacagattctaacctgtaaccagtacttgaaagttacctcaatattattgctgttgggggctgcctctatggtaaaaacagtgttaagaagtgaaaaggggaaacatatctaaatgtagtatatgtatttgctcacttattaagattggtttttcttctgtggaagaatgattgtttcatgactatttccatgaactttctttctggctatgcattcattctttttacacacattttgaattaagatatatgaaataagcagaagatgtttagtcaaaccataatagaagctttgaattgtttttcgtttactgacctttccatttcagcacccatttctgggctgtttgtcgggggtgggattatgacaaagatacagtcctgggcaagatgaatgaggtcactatttactaagccttggaaataggccagaaacattgtaaataaataaatgtagttaaccttaacaaaaatgaaaatacttattcctacaagatattaatcaatttcaccacaatttcctctgagtgatcgcatcctgtgtgtctaagaacccttgagtgctgatgttgagagtcatctttcagtatctaagagtggattaactaacaactgtataggagatatttgaaaattaatgaatcagaaattttatctatatattagaaggcaactattgtttggaaccacattgtaacagatatgagattacatctagtggcattttgacccccaccccaccaatttcccacttacacacctgccatatgtttttctatttggaatctcttctgctcacgggtgaatgaaccacatcactggcttcctgggaaagctcttcctacatttattcttaagtaaacatctctttcttgtggcttctggagggctaattgttctcctatttctaagaatcattatttttagcctagaacaagaagaagggaagggcatgagccacactggaaataaagtcccaggactttggtgagactacatgggacacatcttaaaatagcctaatgatttagtggcccttttcccagagagctgagaggcactcatgtggagagaaagaagtttcagggaagtgatgttagtaagtgagaaagtgagtagtttgtggtgtgtgtaaacctcagtgtgagcctgggcagtgatgacattgtgatgttacctgatggagctaaaactaaaacaagaaggaggcaatgcagaatattaaatagataagagttcataatgcaagagtttgtctagtcttcacttagaaatttacaaaacagttcagctaagaaaccgataacaatacactatttttgcacataattttttggccattttcattaagctatttacatggtacattgtggttctaaactattgtctttttaatcttctgggtggctctctctagaataatagatttgtttctaaatattggatgtaatcgtaatgaaagtgtctattatacacgccatattatttgtgacccccatcctctcctgtccttaattttcttcttgctcaattgtcttaactgagtgttgactataaattcataaaaattttagtattttcagagggaacttattaacatggctattgtagtaaataacaggaacttcatgtagactgaatctaccatttgttatctatttttgacagtaaacaattgattttagtgaaaactgaaaattgtattataatgaaaattaaaatgccttgtttgtcattctcttttaatttaaattttgttggtttggcattaggtagccacaataacaactccctattttagaccttacctatctcccacacacaattttttttctcctaccatcttccctctgttttccccttctcttttcgtgtcatttctctcttcatcccttcctttctcaagttaacacggagaccttatgtgtccacctggactgttctttaccaaggtttgggccacagcaagactcctttccaattctaatagcaaccattgccaatcaaccccagcattctttgtccagacctagtcttagtcctcctcccttcagtctagttctccaggaagccattaccagttagtgggggttgccatttattctatgtgtatgctgtcgagaaaaacattctctgcatttcacagtaacagtgttcctgaccatgagaaccacttagggcaggggtccccaatccctgggctgtggatgggtactggcccgtggcctggtaggaactgggctgcacagcaggaggtgagcagtggaccagtgagcattcccgcctgagctttgcctctgtcagatcagtggtggcattagattctcgtaggagtgcaaaccctattacgaactgcacagccgtgggatctaggttgtgctttccttagcagaatctaatgccagatgatctgaggtggaacagtttcattccaaaccttactactgcccatggaaaaaattgtcttcacgaaaccagtccttggtgccaaaaagattgggaaccactgacctagggtaatcagggcctcacctggatctgctggagcagaatctccagaggaggagctcaaacattttcttcacttcagttgtgattaaaggttttgtttttcctgaatgacattttagaaaacgaaagtataaacaaacatcttcccacactccttaaacaaaatctctcctacccaggagacttagtgcaaataatttcacttctcaaatattagccttaccaggcatagtggcttatgctggtaatcccagcactttaggaggtcaaagcaagaggatcacttgaggcaagagttcaagaccagtatgggtaacatagtgagacccccattggtaccaaaataaaaatattagtttgtatctctgtaagtgttctgagtttgcccaggaagctacatttaggggtcaacattataggaggagacaaagtgccaatgatatagagaatggtcaccataaattcatgaaaacttggtacctagtgactagtgttcaaaattaacaaaccgaagttccacatccttatccaatcaaattgatgctaatgtatttatctgccaggaattaagaacagatgcaatagaattgtcatatgccaactgaagagggtgaaaagaaagacagcaaaaagaatattaggatactgcatcttactcttccccaaagtaacttatttaaaattacttaacatgggattttaataggaacccagctataacacaaataattttttctaacaaaagaaaataatgatcactgtgaagaccacttcttatatagtatagaagtactatctagtacatgagcattttatttatgtttggctattcatgcatttgccaaagtatctattgaagttttttgtttactactgagataatctggtttccaaatcacttttatctctgttgaaaacatgagtcatattccaataaatgtaaacatagggcagtttcttataaacgcaaggcattattggtatgctaattgtatgttccactttctgcatgcttaatcatcaccttccagctccaataaattgtaccttaattgctgaggatgtattatagtctttctattcttaatatctcagtagaagaaacatttttaaaagtgctctgataatattgcttacgttgttagataaatggctaattcttttccaaacgttagacacagcagttatagttgcacaacctggtattagctttaagtggttttccccactcctagtcctgttagctatctcttatatgattgagtctatctttttatggtgctaccagtcagaggtcatttctacaaccaaagtcaccttgtattagagaataattagttggcacagagtaattcacatttatcctcacattgtgcactgaatataagatagagaagtagttaacagaaaaatactggggatgagtgcacagttttctcttcttttgtagaatgttttcaatacaactgataaaattattttcacatgctataggtagccctaatggagaaccttgtggaaagacttgtttggaagagagagacaatcagtggttgggggtcacactttccagacagccaggagaaaatggatccatcgtggtaggtattggaactggtccacagatccatcgtgaaatcagctatcctgggtgcagctttcacatcatttggtctacttttattttattcagacttgtgggcatagatggaaaaatatattttacataaagaatgaaaataagctccccactggtggttgctatggagtgccccctgatttacgaacagaactgagtaaaagaatagctccgtgttatcaaggtaaggcatgattttgatacgaattagataaagataagtaagtgaataccttttagtgttttaaatttatgttcaagtttagatgttcagaggagagggagatcttctaagtaattatgttctttttaactactcaatttctttctttacccaattgcaatagcattatttttcataaatgcactttgtgctataaaaattctacaatttgaataactctgaaatctagctctttaactacccacttttgcatcaaatttactttcaatttggtataggtgagactagtacccagcaaatataggacatttaaattgtgaaattatattggaagtctgattaaaaagaaagactttaggtttccttttttacctttagcttccaggagtaattgggaagaataatcagtgtaagcaaatctttcattcgcactcactatctctttttctaatttacatgttttccttcaagcagcaagagattcgtgtcttgagtttgaaacatttttctcatggtaactatgctataggtagcatcagcaagtacagagctaggacataacagaagtgagcagaattggggtgaatgtcaacagagcatgtcagaggatatctgcagcaaaactaaaatccaacaatgcgtctttaggagctaagaaacatatgaatgcaaattcataattttctaaccaccctcactctcaaaaaaaatccctcagcacgcaaagaaaaattttattggttggcaaaactttggccaagtatttgagttcaattatgggtgctaataagactttggtctttcttccttggaatgtgatgtcacagagcagcttatattacatatattcctattttgccttcggatacccaaaagataaaaaagtgaatattgattctcagttgcaataaaactcagtcttgatttctgtatgtttgctgtcttctttttcctaatagttttcggtttatctttaaaatattttcatagtagagtttttagtttttctcggatatacatagccacatactacaaaaatctcaagatgccataaacctaacccatctacaattgtaaaatacaggatcaggtaagatatatttttttaaagggatgaaaactcctgaccagaaatggtcattataaatgacttaccaatttattgaagttttctgcttagcaaagccaaaaggaagctgtggttccaattcttattttcatagaagtttacttatatcattttttggaagaagcaaagctttgcccccttagaaagttccaaaagcattcattcatgggactttgtaataatagacctttatgtccatgcagatcttgattcagtctatatttcagttgggcaaaatctaagaaaggacactctcttcaattaatggtgttagcaatagcaaagacatggaatcaacctaaatgcacatcaatgttggattggataaagaaactgtgatacatacacactgtagaatactacacaggcataaaaaataacgagattatgtcctttgcagcaacttatatggagctggaggccaataacctaagcgaactaacacaggaacagaaaaccaaataccacatgttctcacttataagtgggagctaaacattgagtacatatggacacaagggacacaaagtaggcacaaacactagggcctacctggtggtagacggtgggagcagagagaggattgaaaaactacctatcaggtactatgcctattacctgcatggggaaataatctgtacatcaaacccctacaacacgcaatttatctatgcaacaaacttgcacatgaaccctgaacctgaaagtttttttttaaatgcctttgggaaaattggctatctgcgtgcaaaagaatgaaattgaacgcttatcttagcaaatataccaaagtcaactaaaatggattaaagacttaaacacgatacctgaaaccataaaatttctagtggaaaacataagagaaaagctacttgacattagtctaggcaatgagtttttggaaattacaccaaaagctcaaacaacaaaagcaaaaataaacaaatgagactatattagaaagctcctgcatagcaagggagataatcaacagagtgaagagacagtctgcagaatgggaaataatattcgcataagtcctatatatttaaaatgtataaggatctcaccaactcgatagcaaaaaaccaaataactgattaaaaattagtcaagagaccaaatggctttctttccaaagaaggcatcaaaatggccaataagtagatgaaaaggtgcttaacatcaccaatcatcaaggaaatgcaaattacaaaccactatgaaatatcacttcacacctattagaattgtcattatcaaaaaggcaagagataacaagtgttggcgaaggtgtgaagaaaagggaacccttgcacactgttggctggaatgtaaattggtacagccattatagaaaacagtagagaagttactcaaattaaaaataaaactaccatatggtccagcaatccctcttctgggtatatatccaaaggaaatgaaatcagtaccacataaagagatctgcgtttttatgttcattgcagcagcattcacaatagccaagttacagaaacaagcttagtgtccattgacagatgaatgaatggataaggaattgtgtgaggtgtatatatacacacatatatacataaacatatacaatggagtattattcagcctttaaaaaaggaaattctgacttttgtgacaacatggatgaccccgaaggacattattttaagtgaaataagctaggcccagaaagacaaatactgtatgatctcacctatctgtggaatctaaaaaagtcaaatacatagagaagaaggtgagcagagagagggttaggaataggaagatgttggtgaaagatgttggcatttgtgtaggatgaataagtctagagatctaatgtacagcatgaggactggagttaataattgtgcactggaaatttgccaagagagtagatttcactctaaatgcacaaaaaagatgaccgtgaggaggtatgtaaagtgtagtaactgtttcactatgtatacgcatatcaaacctgatgttgtacaccttagatatacacagtaaaaagaaagcatgggctcaaaatcacaaatcctacctctgtcttactcatttgacaaaaattttttgagtatatgctgtgtgtgcttcctatgaagaagcagagggagatatttttattgccatttcatagggatattttgaatactaatatggaagggatttgttatatcaaggttactggtttttatttttaaaaaatacaaactatagaccttaaaggacatttttgtaaggatttaagaaacaaattatggagattttatctttaagataaaattctgagttgttttaatatttcattttagattatgtgaaaaaatttggagaaaattttgcatcatgtcaagctggaatatccagtttttacacaaaggtaattgttcaaaaaatagctgctataaatgtttacatatagaatcttaattcttctcatggtttggaagactgatatgttttaaagtaaaaattgtgtaacatcttcatcatgtctcttaaacttgagtattacaacttaatttttgccactcaaaattccacatatatttcaataaaatatcaatatttaggtggctatactgcataagatgaatgaaaatctatactaaagaacatttctttcatcaacaatttaatgaaaatcaaaagtagctatggttaattgtcttgttaacttaggtattgaaaatatcaacccaagtatgttattttaaatttctagttgaggggcaaaggaagaatatcagtctatatttttcattaaattatgataattgggaaatttaagaatttaatatccccttaaatcagatagacaatattcccaagatttcttactctctttctaacattctaggatatgtatgaaagggcacagttgtactcaaccccaaatctctcagttttcttaaaaacacactgtgaattcaggaatgttttttgactccatgaagatcaggcactatatcaagtttggggttgacagtgtctgcacatattaacagttatattaaaatgcttacaaagaaaatgctttcttcagtttaagttgactttttttaagtttaggattgtttaggagtatagaaatatgctaaagatatttaattgctgaaagtgttcatactataccaggcaagggcatgctcattccaatcttctcctaaattttcctctgtataacaaaatatgccccacattccattggacttttttccctaagctaacattattagaaatgttttccctaagctaacattattagtcaggggttctttgcaaatagaagtaaattaagtctactttttattctttggcaacacatgattatctccataattagcactaatgaattacccacatacgattttctttaataggaaccacattgcctttctcccaaaagcttactctagcgttcagtacttgtcccttcaacttttgaaatccactgataaatgcattgaatgagagtttcagagtttcttctctgagatttcgcttttagaaatccattagccaacttctctggctttttttttttcctagtatgttttaacttcacagaatattcctacttcaggaattgattattataaaaatatgttctcttcactatcgtgtatctggaggaggtttggggtggtgagattaaagtttaaataataatagttttttttttcttacaggatttaattgtgatgggggccccaggatcatcttactggactggctctctttttgtctacaatataactacaaataaatacaaggcttttttagacaaacaaaatcaagtaaaatttggaagttatttaggtactataaaaattgacaaacttaaatgatctgtgccttacaaatactagtactgtaattataaataaggaaaatgtattttccaaagatctaaatggccagtataattacagtaataattaggcagttcagaaactgtctcttaaggataggatttatgaaacttcagtgaactcagtattttacatttacacatgtgactaaaatcatcaatatataattcttaatagaactcctagtttagtttactctttgtagttcactttaggaaacactagtaagtttctatctctatgtagtcaactgattatacaggttgtttctgttgagtgcctcccatatctcaggaactttttgtgagaactttacatgaattaactcatttaaacatctgcataagtaagtatagtttccttaagcaccaactgaaagccagtggtactgtccaccacattctggatgaggggctccatgaagcacatgggtctaaaaacagctcattgaccttcacctcataagttcttagaatatttcccagagcttaactatttttatcatcttcctcctcctcactgtcatctcataagtcaatagtaggatactttatcatctgtatttcaacagaaatgcaaacttttctggcattaatgtccattacaagaaaataaatgcttttcctatagattttcagaaaatccagctttgtttaaactgtatgtgtgtcaaatgtgagcatcttacactcagaaataattataaaataagcactctttctttctattcaaacagaagaaatttcaagtagaagaatttgttacaattcaatgttttcttgtttatgatgaaaggatactttgaaatagttcaagaaatataacttgttacgccttttatcacataaaatacgaacaattttttgtcatcgaaaagtcatcacaaagatttggtggcaaaaaaagttgaacttcagcaagatgtttatttaaagtttaaagttttcatttcccaattgagattttatatttaatatactctaaaatatgtctgttgtaatcctagaaactgattatactgcaccagatgtaaagatgctattttcaatttctaggactcggaaatacataccatatgactgcagttttgtaaaacatatcaaaattgcataaaacataatgaatgaccaattttgagtatctctatgctaaatattcttaactgcttaatgtagtgattttgaattcggtatcatttaattttatgatctattttacccatattaccatatgatgtactttacccaggactctcatactttctcccttttcttaaaggatattcagtcggagctggtcattttcggagccagcatactaccgaagtagtcggaggagctcctcaacatgagcagattggtaaggtaagaattacatttttatatttatttcttcacaaaggttcaaatatattgcatgaataagatattaaaggagaaactgtgaatgttgtaaggaaagaaagattagaaatgatgaacagattattacatttagtggaattggtgaaagatgttatggttttagaagaaatttagcaaaaaactttctgaaaaattacaaaagtcaaacgagacattgttttaagaaaattataagatagaactatctaaaaatgtccagggagtatatggtgaacagtttcacagctgaaaagaagttgaggtagctacatattttgtagtaagactagaaagaaggaaatattattcctggttttagtttttgctgtgtcgctatgtgaacattggtcacccagcttttctgagccttacttttgaaaactgaggcaaacaacacttccggtgccccctctataggatcaataagataattcctgagaaaatacttttgcaagtaaggcatattaatgtaacagtggatcccaaacccttttgtgtcactctcaacaggatttatttttatatttgagcaattaactgcaagttgtaaaaattcatgttttgatcaaacagaaaggagtggtgttttaaaaaatgttattcctaaaaacttttctaattctttccctaattacaggcatatatattcagcattgatgaaaaagaactaaatatcttacatgaaatgaaaggtaaaaaggtaatatgtctctacctttagtatctctgtgggcttttgcgagtaaccctgcttttttctcaatgagtggatctggtttgttttgggacagcttggatcgtactttggagcttctgtctgtgctgtggacctcaatgcagatggcttctcagatctgctcgtgggagcacccatgcagagcaccatcagagaggaaggaagagtgtttgtgtacatcaactctggctcggtatgtccaagtgccccaactggaagccatttatggaattatgatcaaaactcaaattggtcttattccagagatctgagattgttttcaggtttcttttattgacaaaagttaaaattctaatactgtactgatgctctaaaaattaaatggaatatgatgatgaatgggaaagtttcccattttgatattccagaacaatctatgaaatagattgttagggagtttctctgttcacagcttgtatgtgttcactctggtagctgaaatttctttcagttttatgttgatactaatctaatttgaaagaataattttcatacctccttcaaaatgtagatttcttaatagttctagttaaggtccttatataaattataaaatattactaggactagaagatgaagaattaagtattttcaatttcttaatttgaaaacaattagaaacaagatgtgttttgttaaaacattaattttcataattcatatatattatgctcttgataagaatataaaattggcaaggtttattccacagtggatatattagttgcataaataggtaattactgactgtgattcaattttaaattattagtgataatttgtggtagaaactgaccacttgataattcaaagacttctggccttatcttgccagcctagattcttggcgttaagtcaaaacaaaaaattggtggagtcttaatgaaatcttcttggcccgttctttgatttgaaaacaagagtgggcttgtgagaagaccagttcatttataatggcatagcatttttcagtcaggattcaacaaagtggactctgtttcaagaaagtatttgtaactatgttcagtcaatggtttcagagcatttagcaagttcttatattaagcatcagactaaactctacaatttaagaaagaaaacatctagtctcataaatggaagattctctaagtttgcaatatagagcagggaagttatttatgctttggtatttcctacactgtatttaacctacatttaatagtaaaagcaaattatctacacagtgatcattaaatctcatagtagtaatatcagataattttcttccatttctatctccaaaaatagtggtctttgtacttgctacatcctcgtgctgcaaatttctcttattttcctctttacgactaaacatccacatgtatacctaaagtaaagcaatatagaatcattttcccccattgaaatcttaatctcattaagaaaaaacagataaacccttctacccacttggctaccctccttttcttccctcatgcctaccctgaggcactactcttatgaaacacttggattaaattaataattgattccagcttttaaatcctctgatgtagattagtcttcctttgttccatctaacctctcatttctcaactctgaaatggcactaaccactaagtggcatttatttacattgatttgatttggtattgtgtgttcttctactgtagtatagatgccttgtggagagagattgtctgtcttgtttaccgtggtttcatcagggcttggaagagtcctagacaagtaggtgaaattgtttttgaatgaactcaagaaagaatgatacttgagtgactggcttctgcctacttgtactaaaatagctctcaggggttcctagcgaactctcagtcaccactctctgtgactagggaatacttgaagaagagtgatcacctcttcctattgaaactctccttccagaacttcagagccattgcattgtcttaagtctataccttgtctgttctccctggagccttttcacccttccactccttaatttggacatttgcccaggagccaagctgttttatccctgactcctttgaatcaatcattcactgcttcagtgtcagtgattatatttataaagatgattcccagtcatcttagttcatttaaaataaaataaatgacatttagtgagtatctgaaatgtaaccaggactataaaaagagctaataatcttagagctgaccccaggacttcaggatctttgtgaagacaccaatgggagtaaacaattgactacaacatggtacatggcacattataagtacatacaaagtggaagaagtgattccctttgggtcaagaagcttttacagaggaagtagtgtttgagaaagacaaaaatcagaatttttctattggaaaattcacaagtgaagacacttgacaaagagcatgtgtatgcttaagaggtgccaagtaaatttgagaagaataaaggacatggcctttttttctttttaatacaaaagactgacatgatcaaagtttcagaagagaactggtagctgttattgcaacagcccattattacattattgaatgtcttattgtagtaactcatcttcctccttcctagttatcagttgactaatctatgctccactgctgctggttccaaaggccagcttcaatcatgtcactcctcaactcagaaaccttcagtgtttagtattattccctaaattaagagtaaattttcctcgacaatcaagacgctacactataagactgcaatctgacatttttgtctcattcattatacataccattcattagagccaaattctttggaatttgttttgctgctagttttctctgtatatcaaaattatgcttatccttcaatagcctcctggcatgccatttcctttatgaaatgtcttctgttataattagattttttttttttgcatctcgatattgtaaagcagtttctacttctcagtcatttatatgcttgtgctaagccttccctataactgtgggcttattgaagaaagggaatgtgttttgtgcacacactgccttgccccttttcaccttttcgctctttgcacagtgtgttgtctttagtagaggctcaataaatatttgctaaattgaattatcaaaatgatttattggattttcaaagctagagatcatgagtttgacaattttttatgtcctctgaggtctaatcatactattatgtgttgacagactcaataaatatttattgaattgaactgagatgtgtgtactaaagctcagtctgtagtttgtccaacttgtttgacacattagaaaaaatccatatccaattacaacagtaaatcgtgtaaagttgtcagggagtgttataatgacacgttttctctccctttctatctagggagcagtaatgaatgcaatggaaacaaacctcgttggaagtgacaaatatgctgcaagatttggggaatctatagttaatcttggcgacattgacaatgatggctttgaaggtaattaaaattatcaaattggtacttgatttctgcttttaaaatggtttatggaagaaaatatgattaaagttttgtattgttttccttcctatagaagatggagccagaatggcatgctaagttttttcttttctttagtgttatatatgacttctcctcaattgtcacccattgatctttaccactgttaataatggatgatattcaaaataccttatttcagtgattctaaggcaccattgattagaaactgcattattatttatgtgtccctaaaagctacctattaagctgttacacccaccatttttctgttaaggaagatcctgatttcagaaataataaaatatgggcaggaaatgtgttatcatagactcattggaccacggtatttaactatcagtacaataaagacactgaccaaacccaacagaggctggctgcagagctggagcagggttctggaagcccctgctctgccaggcattccctacagctatgttgtggaggatctggggaattcaagaagagattctgagcaggccactgggaggcctggggacagtggctgtttacccactgatattgacgttttttattaattgaatagatggtagtgtggtaactgtgcatattgccatggatgtcagtcctgttgttgaaatccctgcatctactagcatttactgttaaaaatttgcttttatcaatctagttctaagtggtaagtaactgagtctgttaaaactgtgcataaaatggtgaataggtttaagaggagagtgtgcagtttcatggagttcagcacataagtatttgatacttatttttagggttcataattgtcttcttgataaggccattggcaattagtatacggtagttttaggctaaagctttctcagagattaaagtgctggggtactataaattctcatctccttaatgtcttcttgtacctagataccacaatctactttaaatatataaaatgcattattctacataaaaagtcagttattgaatacatgcttccagtgaaccttcttaaacgtaaaatagtgtaacttgttatacaagtattactgttctggattttttgtttactattttaaaactgaaagaaaaaaataggtgtatatacttttggttattacgattacacataatttttttaaaaaacatgtatgaatgggagcctctctgtaccccacccatcactagcttccccctacttcccttaccctcccaggaccccaggttgggcattggctcattttcataaataacctcatcccagacaggggtgagggaaggtgttgtggctgttttgtttaaattggagctgtaagagggatcatgtcatattttatgcccttcctagaaaggggacgggacacctggtttgcattcctgtattgaccactgctgccgtcactcgtcacattgagttcacatctcctgagagtttgtataaattcaggtcagcgctgctcctatgcagccatccagtgtcatagaaaagcaattcactgataactgatctctccattcagaagtgtgcagttttaatgtatagcaataagaaattgttatttatctattacaagcctggtttgattaaaaacaaaaaataaaatgttattatgcttgatgttacatctcataagtaaccagcaattctgtgatatttattgaacatttattttgggtcagatgtaccataccaggtacagaatatgtgccataataaatgaaaatgaagaaaatagtggcacccttttttatagctctaccatcaagtagaaaataaaattaatacttgaaaacataagccttatttcgtggcaagtttaagggttctacctaataaagacctatggataaaaccatgtttatgcattttgatttgtcatgtgtgttgtatgagacaacccaattctttcttttaaaaacacaaaatcactgtttagtaaaacacttattttgtctatgatttctctgtcttgttttaattgacacatttaaagaagaccattcactatttttactcttttgaatgtgaaaagtatatgtatgtacacatgagaaattatttttgtggcatcaaaatgtcaatgacaaatttgaattattgttagagctgtaaaactgttgtgagcataggcaaattcccttatcaaaattactctatacctgggaaaagcccaagtaattttccagtggtgtgaaggacagagagtgttcggtcgatgagacttaggaagaggacttcggaggtgactttcaggggacagtgcagtctctcaatttgtatatgagaccctgggcttcacacagctcttgtttcactgaaatccctcagcactccactcctaaaggtaatacctttatgtctggaaggttattatgcaaatgattttttaaaatattcctgcatatttttgtgctatttataatgtcatttataattcaccgcatatttacatttagtggctacattaacacttcagtgagtgtttataatgccatatatctttttctacttggtccagttctttttttattttattttttttttgagatggagtctcgctgtgtcacccaggccagagtgcagtggcatgatctgggctcactgcaagctctgactcccgggttcatgccattctcctgcctcagcctcccgagtagctgggactacaggcacccgccaccaccccagctaatttttttgtgtttttagtagagacagggtttcactgtgttaaccaggatggtctctatctcctgaccttgtgatctgcccgccttggcctccaaaaatgctgggattacaggcatgagccactgcacccagccctccagttctaattttatcttctattttgcccatgagtaggcgttttctatattttagatattagcaagaccattgctgatgtggaaacagggccagtgtgtcctagttcttggctgaggtcttttattccattccaccatgtctgcctgcatgaggcagcaggaatttacaagttatttttctttatgtgtttctttattactttgccccatcttctcttattttatttttctggggtggatgggtaaagatactttgtgttcatggcaagaagtgtaggattatgaagaaagagactccaacattggatgcaaatcacacttaatgtctttttattatgcaaatttttgtggtactttgcatagcaaacctaagttatcttggcatttgtcatatcacttttcaattgttctcaaatggaaaaaaaatcagactctatttcctgtgtccttagaaaagcaacacaagccattttctaaaaagatgaccaattgatttggcaaaaatttagtgtaaaactcatcaaaagcatgaaaaaaattggtcagacagactaatgtacctgacatgaccaacagcagatcacattttttatttcatatgtaaaatagacttgaccactatttatcggtttagtttcttttttcaccttgagccttattatctgacttttagactatatgttgaatatttttagagcagaaccataacaagttctacaattgtaaattacaagctgtactattattttgtgtgcacctgaaatattaatatatcgtcaaatcattaagtgagcacttctgttttatttgtttatagggtacaagtgaaattttgttacatgcatcgattacatagcgatcaagtcagagcttgtgggtatccatcatccaaataacatacatttttacccattaagtaatttctcatcatccaccccacacaacctctttcccttctgagtcttcattgtctatcaaaatgtagcaggacgagccacagacaaaactcttcggacgccgagttaaagaaggaaggggtttatttggtggggggcatcggcaagactcctgtctcaagagccgagctccccaagtgagcaattctgtcccttttaagggctcacaactctaagggggtgcacgtgagagggtcgtgattgattgagcaagcagggggtacgtgactgggggctgcatgcaccggtaattagatcggaacaaaacaggatagggattttcacagtgcttttctatacaatgtctgtaatctatagataacataaccgattaggtcggggtcgatctataactaccaggcccaggatgtggggccaggctgtctgcttgtggatttcatttctgccttttagtttttactttttctttctttggaggcagaaattgggcataagtcaatatgaggggtggtctcctcctctaattctactttatacatccatgtgaacacatttttaaagcactgatttatgagtaagagcatgtgttattttactttctgtgcctggcttgtttcatttaagataatgacatcccccaccagttccatccctgttgctgcagaatacatgatttcatttttttttttatggctgaatagtattcgtgtgtgtgtgtgtgtgtgtgtgtgtgtgtgtgtgtctgtgtgtgtgagagagaacctctttgacacagaacaggaattggtattaggaagggaaatttgggggtatgacctctgttgttaatgagtctatagagcatgggaatagcacaggatctggaccaggctgcagggtttaaatcccaggtccacaacatcctggctctgtcaccttgagcaggttataccttgtgcctcagtttcctcatctgtaaagttggagtcagagtatttatttaatatggtggttgtgagagttacttgggtaaatctgcacaaagtccatatcacagtgcctacattgtaaacatagtataagtgttggctgacatactaataattttgatttatactaaaagaatgaaataaaatgttcagataagaagtaaaagcaatcattaaatacctatgttctgtatattgtgtcccaaattaagttgcataggcttggaaaacatttattgtatatatttcaaaacatatctttctcatttgaataatgatagctagaactttattatataacagatccaagcgtaatccaggaagagtctgaatctatatatgtgatagccagagattgaatatacccaagtgtcctctgtatggaaaaaaatttatctgggcctttttaatattttggctgaaaaggctcatctgtatttttcctaaatatttgccttaatctagatcactcttgctaataacaggtactgtaagaattacatcgccgggcgcggtggctcacgcctgtaatcccagcactttgggaggccgagacgggcggatcacgaggtcaggagatcgagaccatcctggctaacacggtgaaaccccgtctctactaaaaatacaaaaattagccgggcatggtggcgcgcgcctgtagtcccagctacaagggaggctgaggcaggagaatggcgtgaacccgggaggcggagcttgcagtgagtcgagatcgcgccactgcactccagcctgggcgacagagctaaactccgtctcaaaaaaaaaaaaaaaaaaaaaaaaaagaattacatcaaccacttcactaccaaggcttgttatttttttcatgtgttatgaagaatcaatatataggaaattctagagatgtaaccacagtggtggaagtataaacccagccctgattaaaataaattgctgtcttcccttcaatggctataaaatacttttccccactccttcttctcacatccctcttctcctcctcctcctctttctcttccttaccattcctgctcctctgttcctgtatgtatatattctgcacaaatctgactccagttattccaaaccaattgccattcttcacatgtgccatgctgcctattgcttccctgcccttgcacaggcatttccctgcctctaaattgcatttccccttttcttcacctgtctatgacctatggatactttaatctcatcttgggcatcattttctatgagaagccttttctaatttccaccacttcctcctcatatgctgtgttattagtctattcttacttgccattcctccccactagacaatgagtttcctattgtgatactgccctgttttgccagctcctggcaattgcctggaatatagtaggtgctcactagctgtccgatgaatgaataaatgagtgggcatatttgtatatgaaagtttgaaaaactttgtacaagtcaaaagaggctagcctttgtatgtctaaacaaagtaaatataggtgtctaccatttctttttaactgaaaatagaaaagcttttgcatttttaaaattttacattgtttagcatggagttatatatcaaagatatttttatcctcattgaaatagtagccaaaaattaccactatagttgataaaatgattttcaatttgatggtaataagtaatatcatgaagacaaactactttaggtttctattaaataaaccattgcatataagtaaatatatgcataaatagacaatacttggtaaaataatgaaatgctcttgcaactgtagaatattatttttctcctttgtgctatatatttatagcatttaagcaaccatgtcatttactcaggttttcttatattagttgatcagatcttttttcccttggtatcatagtctgacataattatcaataatacagaaaggtgatataatcattattttacagaacaaatcctttttctgaaatcctgtgtgtctgtgtgtgcagatatctctaacagataccttaatcattttcattggaataggaattaaaagtcattttgcaaataaggtaagtctagactcccaaaataaaaattcttatgatcaaatattcatagattatgaggttattacatgcgaggcactgctctaagcactttacataggtcatatccttttatgctgagagtggtttttattatgatcccattatataggtgagggaattgaaacacagattaagaaatgggcccagcctagtgtggcagtgcccagtggcagagctcggatcagaccccagtggtctggctgtagagcccgcgctctaatcattttgttacactgcctctcagatgcttccactctgctttcttccatgtgcaaactattgtgtgcaatcctgtatatgatgatgatagtattttatttttttctgtctgagaagactgttatttttcataaaagagagttttcttatgtgatatgaattaaggttcataaggttagttttcgaagttgcattctttgtatcaagaatttatttttccattgtttaaattattggatagatgttgctatcggagctccacaagaagatgacttgcaaggtgctatttatatttacaatggccgtgcagatgggatctcgtcaaccttctcacaggtaaggtactattctatttccaaaagaagcattggttataatgcatatccttaaaacttccagggtttatgtggacttatttttcttaattttctcattcaaatacttaacactttatttcaccgtttacttatagtggcaaatgatcttattttaagggattaataactcttcaaactccctttctccataaataagagttgtagttcatttccaccctagcttgtctatagcccattaaagatttctctttgtatttcattaaattgcattctgaggtaatatccatatgattctaaaatatgcccatttggatttgattaactgtgtcttggccttgtggctagagccccatattttgtgaagattgcacagggagatcaaacacacatatgattctctgggtttttttcactgttgagtagtaagatgatagcactttaataatgtctcaggatcttactctgacttcacttttgtatgttgaaaaatcatggcatttcagtgcctagaaaaaaaatgacattcatatgcagagaagaaaagtttttcccttgatatttgcatggaaatattagctggcacagttatttttgattagaaaaatgagcaaatggttctctgtaattgacataaaagaaatgtatttgtctagtaaaaaaactaattttcttagcacgaatatcagcttaatatttataaacctgtatgtgaacatgaaattagatatgtggactagaaagtacatatctggctagggttgttcttgttaaaaagtcagcttttatcaaaagcctcagtcataggctccactaagtgattatagacatcttgttttacaaattcttatttagttattcatgttgggcaaggaagtaaatagagagcctgaagagacctaaggaggccagacatggtggtacacacctgtaatctcagctactcaggaggctgagctgggaagactgcttgaacccaggagttcaaggccagcccaggtgccatagtgagacccccatctctaaaagacttgagagggagtaaagactatttcagaaaatctgtacagcataattttccctttgctcgcaaagtaaatttttttagtcacaaatgtcacctgttcatttcaagctggaaaaattttgtcacccttagaagtatttgatttaactaaaatgcagctttgttagtagatgtgccaaggcatgcctgggaaagctcattatttagctaaatcattgcttctctggtatattagtattcaaaaactacttcccactcaactttcctatttttcagagaattgaaggacttcagatcagcaaatcgttaagtatgtttggacagtctatatcaggacaaattgatgcagataataatggctatgtaggtgagtaattagtttatcataatttataaattggaataagctctatcatagatactgctttatagtgaagtacataaaactggtatgaaagacttcatcttactgataattttttttcttcatttttaaagttctccttaattcattcctaaaatgatcaagtaattcctcagcttaacagtgctagttacacaatgttatagtctgtgtttttgaaaacatgaaagcactcatgaaaatcaaatatatgaggaaaagaaagaaaatttttatttagaaaaatttgagtgaatgtttctagtccaaaaattgaattttgttttagtaaacttgtttttgtcataaagtttatgatatatcataatgggatgaatgttgtacatgaatagattcagagaaaagtggaaagaatcgtaagatgttagcatatattctctaattttctataaatagtgttttaggtagtcaaaggtgatacgtagttaagtatttatggctgaaaaataattctctttgactaatgatgatcattaatctgtgttgttttttatcctccagatgtagcagttggtgcttttcggtctgattctgctgtcttgctaaggtaagactgatatatttcactgcttaattgcaatttggtttaattgtaaaatgatgggaggtggtgtttaaaatcagcagtggtagtgacctcatgatgctcttttggtattctgaagcttaattattgatttttagggtatttttttcaccttacagagatataattaaatcatcaaagtcaatatttttagacatttaaataaaaagttattttgccctgtgcacagaaatgtaattagtatgtacacacataataagactcatgaaattacttggtgaatgtaaactgaaaaaacaaacgcatttctctccttaaggaaaaataattctgcaattaacattgctacttttatttccttctcaggacaagacctgtagtaattgttgacgcttctttaagccaccctgagtcagtaaatagaacgaaatttgactgtgttgaaaatggatggccttctgtgtgcatagatctaacactttgtttctcatataagggcaaggaagttccaggttacattggtgggtatgccctacaatattaatgcttgatggggtgcggttcattcattaatcccacaatcctgcttggagccctcaccggttttcaccacggagatcttctttagagcgggggagagaagctacctgatgcatgcttttcctctccatcttccagattcttgcgttgttctaaccaatgagttgggcacattagaaggctgtagttgtttagagattatgagaagcaaaggacatagtatcacttgctatattagtttaaggtaaaccaactgagcttaacctgtgaaatctctttcttcttgacattggataaaattgacattttatcaagtgtcaataattgaggaaagccaggcatggtagctcatgtctataatcccagcacttgaggaggctgaggcttcagcccaggaggtccaggctacagcaagctgtcatcacaccactgcattccagcccgggcaatggaatgagaccctgtctcaaaaaaataataaccataaaaataaatattaaaaaaattgaagaagctagacttgattctgatttctataaataatatgcttgttaataatttactgcgactacaagctcctaagaaccgtcacctatgtccctctgtataggcaactctcaattatctgctctggagaaagtatcattgatatagctcatccaaaatattgtggtggggaatcccaaatcatgtatatatgactttataagtatttttgctagcagattaatgttcctaattatgttttatttaggctaatataagaataactactagtgaaatgagcctgtggtaggagaagagcatatctgggcatatcatttagagattaataattcacaacgtttatgatcccctattaggacctgtcaagagtttattgtattcatgaccctgcaggctgctgttatctaaacatcgtgaagggcccacatacttattaaataatgccatggatatgtaatagaggtcttagtatgcattaggtacacaatgagcctgtacctgaaaggtacacaatgagcctggcatctctactttagatcagactcatttttaatagtgtcctggaaaagtcatggccagagctacagtaataagagggtggacaagccttcatctagttattgattggaaaatggcaatttgagagcctgaccacagagtaaattacacagtaacacagacaagctgaaggataatctgaaagacacacattgagtagatgacgctctttccttttacataaaactagtgtttcctctactaacaattccattgtgaccagatatttttaaaaatagttgaagacaaacatacgaaacacataaataatcatcacattattggagaagcataccttataattatcataaaatgactcccaggagaaataattcacatggcaagcatgtttaataaaaccaggacattttaactcttactaatagtggattttttttcacctttttcatttactttttttctgaactcagggcaatgaacttgtagacagctatatcaattgcagtgctatttctctgaggtattgaatctcagttattataattttgaaatccaattggcttggacttcattattttccaactaaaaagatgattgaaggatttatttgaaatgtgtaaagagtaatatagattttatgcttatgtttccttgaaaaaagtaggtaaaattcttctggaagtgttactcctaaaatacaaatgaacatgtcaagaattacataaattctttaaactatcacttatgaattattgcctctatgtagtgagtgacacctcagcagactattagatttagcttgcatggcaaagaactcatttagattcatgaaatggttctcactttcttggtaagatctggcttggacgtttttgttaattttttcttttttccttttttttttctttcaaatttggagatcttcatgagcagatgaatatttactatttcagatttgaaataaaccctgccaaactgctagaatatttattgagagaattttttaaaaattgcacaaattaacactggaaggtcaaactagaaaccaataacacacagaggaaggacagataatcagggcataagactggaaagatgacatttttaagaaaaccgtatatatagatttgacttaatcatgtgttcacttcatgtataaaaaaaagccttcaaatcagaaacaaatctaaaatataaaaaagtcatatataaaattagtcatataaccacataagatagaattattccaagtgacatttgagcaaagtgctgtgtctatacttccttagtcaatgttctgagaaaaaaaggaatatgaaacatgcaagacttttattagcaacaatttttatatttttgaaatttttatataaagattaagcaaataactaaagattttaatgttgttaatagaaacctagaggaaagttcataaatctttataaaagcaatttttaaaatttgtatttttaattgttccctctttcatatttcaggttagtctttaaaaagctgtttaataaagagaattccagatattatttccagtagtccatataactttaactattatcacttcaaaaataacaatagatgtatttcagtaattagattaattgcaattctctatatttttgcagttttgttttataacatgagtttggatgtgaacagaaaggcagagtctccaccaagattctatttctcttctaatggaacttctgacgtgattacaggaagcatacaggtgtccagcagagaagctaactgtagaacacatcaagcatttatgcgggtaatgtaagctattttttattaatgaatatgtgaacttcaacgttgttgatagagagcaacttattgtattggtatctttttataaaatgtagataaaagcaactgttacccctcctgaactatgacctgttgctccagttaaggtatgagacaatctcaacccaagtaattcagagtcctcttattgtatcatcctttttcacatttatcacatttgacctcatcatttgaaaacacttgccttttcctttctaaaatttcatttctcctatccctctttatctacttgcctagaaatatacatcttcagtagctcaactgagcctcaaatctattccgtggtacgttttttggggtgggtcaggggaggcagggaagttagtttgtttttcatacgactccagcgaagcagaatccaacatgactgcttttgggttatgtctttgtttccgtgccagctttgccagtgatgtcagtgggaactcacacagttgtagcatggtggggatcatctgtgggccaggacgatagctctcatgatggtttggggtatgtcctgccaaagcacagccgatttcatgtttcttttattaaaacactcattcccaaactgatcatcacattcctcacattggtcaaattttatcatatgaagctgtgccaggtctttttcattagggaacggtgtacttcatcagaaaatctattgtcacaaaaaaccaaactattcccaggagccctttctgggatttcaaatagtagcttcagcttagggcttaattttcccttagatacttattccaagcaaatgcaagcaagcatcaagactccaatacgctattaaatgctaagagcaataatccccatgctatttcctcatttcccttaacagtttttattgttgtactagaataaacctattagatggttcagagccaaaagtatagaatattaatgtaaccatcatttatatggtaggaattaaagaggttctttttttcatgcttcatagatgtcgttttacttaccttagtcaattgtagagacaaatattgaaataattttaaaggcaataaaagggccaacattagatgttcacaaagaaatacattgtgttaaatttgtaaaagtgatctggtttatttagtcctgtgtttcttggcatcgttcctgtaaataagggatcatcaaaattgtacagctttttcggagtaaatttgtagcagaaatgattagcagaggtaagtgttgtgttgcatgtatatttgtagtgttaccatggttttgatggtagcaagattcagccattgcctttgtaccatattgcaaatattaaatgatagcacttactgctgggattgtacatggcagggactttttaagaaatgctcgtttccttcagtatctttttctcttcctaagttaccttgcttgtgtttggaacacttttaaaactcgtatatagaaaggcaaaaagttactccaaccctctcctttgtaacaaacccacacagaagataagaaccacagttgcagctaccctgaacttgagttctgtcaaggagctgtagctgttacttaagaaggtataggaatgtaatgattgtactttcccacctccaccagggtaatagcccaaggcattaggaaacattaacactcttaagtttctacagtctgaaagcataagacagcaacctgaattcttccatcttcctagaaaagaagacgcatagcggttgggatgcctgggttgctcctgtgttccataaaacgcatctggtaccatggtaccaggagtgggaatgttaacatatgtatctattttatctctgcattccttacaatgaaatgaagtggcacttgttaattatgtactggggcccacaacccccacttgtcagaggactccctgcctgtctgttggttggacatggtttacttgtgtagatgtccctactggccattcactccattaatttgataggtatttattgagtacccacattgtgtcaaattctgtatataccagtgaataagacataaaaacatcactaccctcatggagcttatagtctactggggtgagaaaaaaataatatgataaaaatatacattttatagtattttggaagatacaggtgataaaggaaaaaggagggcagagtacagaaatgtgcagtgctgcagaaggagtgaagcggagaattttaaataggatactcagagtaggcttcattcagaaagtgacatctgagcaaagacgtgaagaaagtgaggaagttacccatgtagatatctagggcagttgttcttagttttagggtgtaatagcaacaacacctgtagggcttctgaaaacacaaattgctggcccccatctagaatccctgatttagtaggtctgcagtaagggctgagaatgtgcatttctgcaaagttcccagaggacccatactttgagaacagctggttcaggagaagagtattccagcgagaaaagctgagtcaaaaggcctcaagaatgtacctggttattttaaagaacaatggggaggcaaggatggctagaaatgtaagcaaagggaagaatggtggaacaagagattatatagaacctgtggctttttctctgagagaaagggggatctataacagcattttggcagagaagtcacatgatctaacatacgtatacaaaggaacactctagctgctgtgttgtgaatagagtaggagatcaagattcgacacatggagaagaggctactgtggcaacacaggtgagaggatggttccaacaaaagtggtggcagtggatatggtaagaagtagttgaagtcaatttgctgacatccaatttacaatttgctgagagactggatgtctggcatctgagaaagaggctctgtgatgactccagggtctttagcctgagccacttggaaatgtagttttcatcaattgagacaatattgcaggagaacaccttttgagtggaaaattctagagttcagtcgtgggcctgcttagctagagagacctattttaaatgtaaatatcaactaaggctttgtacatactcatcttgagttgaggacaggcagagaacaggaaaggtaacttaatatatctttggcatatggatggtatttaaagccgtattaagatggctgagatcagaagagggccaccgtctgtactctgggccgctacaacatgaagaggttggcaaaaagaggcccacagaggagataagaaggtccaatcagtaagaaaggaagaaaatcaacagtgtggcatcctggaagtgaagtgaaaaaaggggaaagcatgatgatgttttctatactgcagcttgatcaaataagatgagggctgaaaactcaacattggatttataatgcagaggctgttggtggtggtgacaacagcatttcagacattagtgggggaacggggggaaggaaaggaattggaagcgtcataggttattctttcaaaaagttttgccacaaaggtgaccaaagaaatggagctgggggtcagtagctgaactggagtgaagagttttttggggttttgtcttttaagacaggagaagtattagcatgtttttatgctgataggcatgctgcaatagagtgaaaaacttgggatatatgtgacaggggagaagagctggaactaaattcttgaaggcaaaaagggaaggattaaatgtacaagtgaaagggttggttctagataggcatgtgcatgattcatctgagtatgtgcttgcagatgctgggtagatgtggtgatggggactatagaagttcttgtctgattgctttaataatctcagtgaactaagaagcaaactcatcaactggagtagggatggaggaagtggcatttggagtttgggaagatgtgaaatagtcttctaggagaatgggagagtaacaaaatacaggatggttgtcagatggtgtttgggaccacttgcacttattgtcataaactgagtgtagcctgtgtgcttgtgttttttttcccagtcacattcagtcttgcaggagtagatgaagagttacaattaaccagggttgtagtttggtcaagagagtgaagcaagcaaggagcatgcagcgggagggaatgtacaagggaatggttatatttttagttgtgaagttgaagcaggctaaggaggggagggggcacaccaagacggtgagggaccaggaaagaaatttgaattggagatcccaggacaatcagcaaattgttggaattgactattaaacggatcgagctgcaaagatggcatagatattataaaatacaaaagcccttggagacctaaaagtgagggaaagattgaattttgcttttatttttgctgacaatactttgattaccttatgcaaacaaaagcctttaaatttacttacaaaatccattgcgttctttgatggcggggaattcggctgtcaaaaagactccagatcttaagtttaaaaaattattctcttttaatcacaattctttagttttatgctagatcttcttggactagaggtgcatttttaatagtctaataaggatctatatcactggcatgtagatttttgttctggcatgttatttttctgaggctatgttttcatttatctggttagtaggggaatcagttttcttaagtctaatcataattaaaagagtatcacacaggattactttgcttaactggtcaaaatttgttcctcataaaataagaaagaaggaagaaattgtctttttttttttttttttttttttgctttaaaaaaacctttgtattttagttgattataattatgccaagctttaattttggccaccagagccatacaattattagattttgctaatgagttagaatgatatttctgtaatataaaggaaatggttaatttcatttatatcttttagtgttttatctattgaaatcgtcttctattagacattgctttttcctctatgaaaagatgtttccccatttatgtaagtatatgaaaaatctttgtttttgctttatttaaatatacaacttcatcaaattgtggagatttcttaggacaagggataattttgaagcagttttgatttagggaaacccaaactgtaacttgaagcagtttttagacatgttagagcagccatggtagtgaaacttcccttgaaattttgacagatgatatctcttggttgaacttgatggatccctgcatcaaaatatccactgatatttgagaggagaagaagggtgctacattgggataacaaaagaagcaatgagatttcctgtttgtctgcatttccaacaaagctagaaatactggcttagttgctgaacaaagaatgcctgtccccagagatattctgagagccagtgaattcagtggccttcgcatgttttattaaaatcatgacatcaatctacctgggtagattagttaattcttttctttgatttctcaaatttctgaattttagatttctgaaatgtgggtttattttgttatgtaaatctttaggtgacttctaaaactcatcttttttccatagtagtttcaggaaaacgtgtatttgattagtaaatacatttttttgtaattttttatttcatttgcttatattattgagcaatacatgcacatagtttaatgaaatgtcatttactccaaagaagaaattttttaacaatagcacactatggactgattcatatatgcagacatttctgtggaaaatctaagtgtgagcaaactatatcactgtactaatattatggtattctaaaagtgaattgattattataacatgtgaattcttcattagattgcaagatctttgaggcaggatattatcttttgcatatttatattcttagagctagcacaatccattacataaggcagaaacaataaatatttaacaaatttatggatgctatgttcttggtgctatttaaaaaattctataagaaaaatctgagaatgttctattggtataatggttagggcatttgtcttaggggtgctgtcttttctcaggaaattgtaatgctagatgtctgactgttctgtaccacttgagccaagcttactagataaagggactgcaattatacaagatggtgatggttcaggtaccaacctgtgtcttggtctcagcttttccttcccgagccctgcattagcaccagagaggtgtttccaaaatctagtcatattccttgcttaaaatcttcctatgtaagagcctccccagccccttttatgtgtagattaggtggccctacttcttctgtatttagacatgcctctgtcagaatattcatgccccacactgtctatgtggatttgtggaacatagatggtgacaggtactgactttcagttttgtatccctagagctgccttggacacagtaggcccatgaatagatatcttcaaatatttattcctgacattattttttatttagtgatatcttataaatttttttgccccaccaagttaacaggaggacatgggcctgttgctcagctctcaagttggccagaaatacagatttccatgaaagtcaagcaagaagacagacgttatgtaatttcaggcatgtgctaatttgcatgcttgtgggcaccctattttatgtaattgtccataaaaatgtggcatggaatcttcattatttttaatatagatagcacatgcccatccaaattttaaaatgtaaacaaatctacttttttactcccaaatatttaattaatcacttcaagacatttttgatattacagcttttgtccttaggtggagctgttaaagttaaataagtgtgaatatctgtcaaatacagtttttgcaagagtgcatgtacattttatatattgtaagaaaagcgtaattaatagctaattaggataatgaaagtaatatacaacagatgtagagaagaccttgtggaaaattagtatgaattagatagcatgtgatttggtcaaagtaagcttgttgagaagaattaaaacagtggacatgtggagggacaatcagtggctgtctagctcctcctacacctagggaatgatttaatcaagtttgctattacttgaatactcagggcttcaagctgttccgttttcacaagtcgataacttgggatttggccttgatttgcagcattcctatacggtcaaagtttcatgttgagatgatcacttaccaagtaatttaatataagaatctctgtataagaatggaaaagtaatcagggatcttgagtactctcaggctccaaatcttctaaataccgtttaataaatagagctctattccttgttctataactaattttctatttaatgttgatggttggcagtagtagttcagttttcttattccttccaaatgttcaccagaatctcctattctaggaaactgaaatttagtaatttcttagttggcttatatacctgaaatttgaagcaacatacaaatcttgtcaggtctgctttatggacattatgtcatttaatcatcacaacagtaaggtataagtataaccaccataattgttattattcctattttcagatagcacaactaagccatagacaaattaagaaacttgtccaatgttatgtagataataagtggtggaccccagatttgaacaccagttcttcaccttcagatcactattgcttttaaccactatatacataaattgataatgttgtaaatgaaaagagaaaaaagattacatcctttttgtttataattacataaagacatagaatagatatagtcttttatgtggtgtgtgtcatctttattaaattacttcgttgatttttatcaaaagttactatataaataatatagcaacacagcaataatttgtgtgatagggatttattccctatttcttaaggattattaattgatgagctttgaaaataatctattccttatctgctttggggcagtaatgtttaagccatattgcaatcctgaaatgtctatagataaatagaaacctggtccactgacattacttagtaggaggtctgtcaattgcagtgtcatgggtctaccttgaggaactcatctagcataatataaaccttaattatggttgaagctaatatgtctagcctgggtgaaaatactagactctttaatggtcaagagggaatttgttgaatctattttttaagatgagaagaacttatagattgaaacagccatatgaaaagtagagtcaaaaactgagccttaaattattagtatgaaagacatcacagtctgtgaccaattcatcaaattatctcctgcgtatagcaacaattctaataccaagaaaaacaaaaactgcatagattttctccacttgtttccgtgtaggtgggctatatgtggtgatgtgaactgctctctcatatcctgagatcatttctacttttaatttttgcagtgtctaaatcttattttatagatttctcatcgacatgtcttactttaggtttctcaattgaattctgttataaatcctcttaggttactttagtagtaaaatcttattagcttacccttttagataagcagaagtctgttttgttgagtaccctttgaaaatcacatttctgtctgcgtagtgcttgaacaggtgctttctaagagacactgtgttttatatgctacctgattttcatatacatttgccctgcagtaaccctgggggattgattccaggaccccacttggatacaaaaatccaaggatcctcaagtcccttatataaaattgtgccatatttgcacttaacctttgtaaatcctctcatatactttaaatcacctctaaattacttataacatgtaatacaatgtaaatgctatgtaaatacttgttatactgtattagttagggaataatgacaagaaaaaaaatctgtacatgttcagcactgatgcaaccatccattatttgccaactatttttgatccaaggtggctgaacccacagatgtggaaccgatgggtacagagggctgactctctttgttttcatagacttgagagtctaggacacttttactatctagtgaagtgcttacttaatcgaatgacaaatgctttcaaagatttttttttgtttatttcactgtgtgtaagcaaataattttgaaaataatgtggaatttttttaatgaggatagcaagtaatcaaatgaaaagaaaatcatttgtaagttgatagaaaatatttttaaaagaaaataatgtctgcatatagaaataaaggttaaaatgtaagaattgtcaatcagttgtaataaactcgagctgtttctttggagacagaagacaatgaattttaaaaatctgattattgaaaaaaaaaacttgtgaccacatatcaacaagaataggagtaagaaatgctgtgtagacataagatattaagtttaaatgaatgttatacagagcagaatggattgtgaatgggttacaatttctgtgtaactggtaaataaattcaagagttctttgtgaagtataaaagcacaataaacttagaaaaaacaaaaacggctgggcgcggtggttcaagcctgtaatcccagcactttgggaggccgagtggggtggatcacttgaggtcaggaatttgagaccagccctaccaacatggtgaaacctggtctttactaaaaatacaaaaattagctggatgtggttgtgcatgcctgtaattccagctactcgggagactgaagtgggaggatcacttgaacccaggagagagagattgtagtgagctgaaatcacgccactgccctcaagcctgggtgacagagcaagactgactcaaaaacgaaaaataaataaataaataaataaaaactttaacaactaataagaaaatcagtgaagcgaccagtgtatacaattagatgtacaaaacaaatacttttcctatataccattcagtatctgttagaaaagataatagaaaagttccataaagaaagaaaagggctgggtatggtggctcacacctgtaatcccagctctttgggaggccaaaactggaggagcccttgagcccaggagttcaagactagtctgggaaacattgaaagaccctgtctctataaatatgaaaaaatgggctgggcatggtggtacacatctgtagtcctagctactctgaaggctgaagcagaaggatcgcttgagcccaggagttcagaactgtggtgagctacacttcactccagtctgctgacagagggacacatcccatctcttaaaaaaaaaaaaaaaaaaaaaaaaaaaaaaaaaaaaaaaaaaaaaaactaaaaaggatgttttataataaatctggagtcaaatgaatcaaattcaatcaaaatgttgttgagagatataaagagaaaatgtatagggtaaagttaaatgggataaaaagcaccttgaaatgatttacagaaagtttatcatgaaaaatgcttatgttataatatcaagttatcttttaaatgcgtagaaaatagcatggaagaaaatactcccaagtacagacctttataactattattggatagtattatttttcatttttattttttttgtgtttttcataagaaacgtaaatgattttgtgtgatatgaaaaaatatacatcttcatttttttaacggtttagataaaagataagtatttgctttgtcttccatgtatagtgtttggcccttttcaggaaaggagttttatttttttttaatctacgtgcttgtttttgttaattcatatggtggttattttccttagaaagatgtgcgggacatcctcaccccaattcagattgaagctgcttaccaccttggtcctcatgtcatcagtaaacgaagtacagaggaattcccaccacttcagccaattcttcagcagaagaaagaaaaagacataatgaaaaaaacggtaggaatattttcctttattcaaattattgtatggcatttaactaaatttttaaaatatggcataattctgaagaagtgaactatatgtcggaatttttaaaaatacgaatttttaaaaacaaaaatagatttattcatttctttaaattgtttatattccctttaggatattgaactgaatattttaaaatatgcatttaatcacaacagtagattctcatataaaatgctgatgttctatttttaatgccttgccagtgaagaaagatatattactagagagaaatcataatgggagaagattgtatttacaagttagttattcagtgtcatcatgtgtcctcagtttatcttcctcttctcattttctcccttgctttcatcctactcacagattcactcatgtcttcataatcaaattttcttgcttagttttacccatttacagacacatgtatttatgttatacaataatttctttttaaaaatttcattatatgcttttcagccacatcccaggatcaattgcatttgagatggatcctacattctaaccagtgaaccgttttctaaattatctcaaaatatttaagtttcactgacagtgtatttattctcaggagtcctgttgttcagacctttagtgtctatcaacacaaagacatagtgtttgtccaaaaacaggatgtgtctgggcatagtaaaaagccttcattaaaatgttcactaatgacacacagaatgtaaaagatgaaagggacatttaaaggtctagttcacatcctgtccagacaaaattgccccatagtcactttaagataattgagcttacaatcaccactagtctagtctagaatacaggatcaaatgaagataactgaagagcagatttttctctacaccctcatatgaaaatatttacggaagtcaggggttgtttttactcttcttttgaacttcagttgtcaacatcaactatttgtaaatgtctttaatagtgaaaatctcaatattgcaagtacacaagccaaaaccttagcaattggtagttatattaatttatattttgattcttagaacaacctgctttaccaatagaaatggcagaaaaaaaaatcatatttatttagagagatatttacacctctcccccagctgtaggcacgctatttgacagtactctagtcacttcacacttaatgagcctggctccttctgactttctagatctctctttgttttctgcatctgtctctctctacctgttcccgttaccttcccttttatctctccccattttttccttttgcccagcttatgccttgggtcttcctaggtcctttgtagtatttattgatcttattaaaaagcttcaagttaattaaattctgaaacccttatttaattttgttcaatatttactctaagtaaaatttctaagtatctccatgtagctaatttcaatgaatataaaatcactgtcccaacatctgtcacaattaagtgccatacttacacgtaataaatgggatcaaactgcagcaacagaaaattgagaggaacccaatgaaaaacatcttggcagctaataaactcctttaatgcctttcatttaactttttttccaaatcttatttcacttagaaaatttgggctttaaattttacctatttagaacttagctcttttagccctgcaagtaattgtcatttgaaccctactaattctcaaattgaactttttaaaagagataaaataaagagttgtcaatttgatgtatcaattttatttttctcatgcatcacaggtgtcgtcatctttaaaatatatataaatatacttgctgattaaatcaaaataaaaaacgttgtctttttatttccagataaactttgcaaggttttgtgcccatgaaaattgttctgctgatttacaggtttctgcaaagattgggtttttgaagtaagtatatgtggtatatagtctctgttattcatcgagagggtgtaatgagtgtgtgcatttgcattcccaaaagaaaaggaacaagagctaacccttgaaaattaacagcgtttaaagaattagcaacacaatgcttagttttttatcggccagaaaactggttatatcactcagactgatatataatccaagtatgacaaatttaaaaaggaataaactatcttgctcttctaaattcatagaaggggaaacagagtaaaaaggaaatagatatgtgttttagaatagcatctaacacatagcaaagactggataaatgttggttgctgtcgttattttataatggcaaataaaccactgcaattttgtatcatatctggatcccctatattcaaatcattttgcatatcaaaaagatgatgtgaaaacaaggaccagagagagagaatgaacacttcaggttgaggattgatcatagaaggcaagtgaaagaagggaagaagatgcatcagtgacggggcagggaaacagggaactatttttgggagattgggatataaatggagcagctttaatctggggcatgttgaatttggagggacttttctatgtggcattccacttgaaaatctagttcaggattatgtttggaagttcctccatatattagtgacttgtgagatggcccaagggatagaaatgtgaatttcacagaggaaaaaaattacagatcaaatcttggaggacagttttattcaaggagattaaaaagaatggggagtccctgtaggagactgagaaggcatcttcaaggaattaaagagaaccaagtccctggtgaaatagccaatggagaatataaaaagggagacttaatattgtaaaatttataaaaagatcagatagcgtaatgtctaaaggtcatggaagttggcatttattaataaaatgtgacgggtggtgaaaaaatgggtatcactggcaaatgttaagatagaactctcagtgcagaagtagccaaatgacaggattagtgattaaagaaaggagagtatactgggaacaagtaggttcaagtgaggtatttttatgtatttatcaaatgttgttatttgttcaattattagaagatgtaaatgtgagtgccagaggcagggaaaagaataaattggagggagacatcttcaacttaacttccagcacatgcttttcagtccatacttgaattccactctgaagcatttcactgttcacttcctcttttgaacgtcttatcctttaattttcatgatactatcctactcccattgtcttagtagttatttagccctttcttttcagctgtttttgatggatctttgggtttggcaccctaaatggtcctccctcagccctttctctcactaccacattcaaccttggtagtcttgctcataactgcaatttcaactggcatgcctacactgctgatgcctaaaccagtgtctcttgagtttcacacccacctacatatcaaattccctattagacatgtccttttggttgccctatagtttcaatctgtccaggcactatccaggaatgacatggacattagaaagttaccaaagccagaaacctagggctcaatctgcattcttttctctttcttatttctgatatccagaattattaagtactacaatactaccacctagatgtctttcttatccatcatgctttgctatctctaccactattactccaaactaggcactcactatcctacctaggtcactaagttctcctgctttctaggatactggcctttgattttgcattattaacatacacatgtgataacagtgcttcagtggctcattttagacttaaaatctaaactcctgggtggtatttttcaccaattccccaggaagtttttcatcaatggctgaatacttatggtggtttggctgtgccatgctctcctgaacctctgtatcttctcacttcttctgcccatctacctgattaacttttatttatcttttaaatctcacctgtttcctaggggaagccccctggtcttcagctacttaaacttaagttctgttgtgcccttggtcctatggccctgtgctcacgattattgagagtctgtctccacactgtcctggaagctgctgcaaagcagggtcctgtcatttttgtgttcccaatgcctaacagtgcctggagtgctgcaggtgactggagaggtttgctgagaatggaacaagatcccaaaagggatcagattcataggtagaggaattagccttagttaagaatctccttatcttgagctaacaagctatgaaaatatgtttgacattaagaaatttcaatgtggaaggaagggaaatacagagaactcatggatggctaggataaaaagcaagtttatatgtggtaattgaaggcattgaggatatgtttgggaactgaaaggaatggaaaaaattcaaaatagattaaggacagggagtcaactaggaataagtaaaaaggttgacaaatagagttgagtaccctactgtggtaggatcacatatggctgagaatcaattattttcacttaggcaatgtcagtttagccttgagagtccatagttcagggccaaaaagccttgacctatttgattgatgattggattttatacttaagttacccagattaactgtaatccagaaacagagactacggactactttgtatcccagcatgtagggcagtgcctttattgatttcttagttgaataacttataatcttcccatttctgtatttattttcttcctaaaccgcttaattatcttggtgtttttaccctcatgggcctttgataagaagacgagctgtgtgggggaaatcttttctaagctgcaagtaaaggagtgttttcattttcttaaatcagacacttgtgctatcacctttcattgcagtctctctggcctatgagaaaatgagacattgacatttataagaaaatattactaactatgcttctttcctgaataatgaaaatgcatcttaatgaattatttttctttgttacatgttttctcacaacaaaatatctgctttgcatttttaatttagagtgataatatttcttgcagcctatcaaacccattatgatttttaaatggcataatgattttaaatgaagtataaggctgtgtttcttaaggtgttgtctctgagccacctttatgagaatcacctggatgcttgaaagaaatgcagattcctaggccccagaccatccacgtcagaactaaaggggaccaggccacagatcttcacaattaatagagctccaagttcttatcacactgaaacctaagaaccaatgttatggtggtgaagagcttccagatttgaagtcaaactgacctggttcaaatcccatatctactgtattactagtgaccttttcagagaagacttttaacttctctagacctctttcctcattgctaagtgggtaaaaatagtaccgactcattaaggttgtcttaaagggtaataatgcaggccaagtgcctagtgcaaagcctgatttccatgaagactcaataaaagtcattactatttctatttttgaaatattatggttggaatttctatagataagcttttttagtttggccataaaatgaaacattgccaattctatatataattctgcatataagctttatatcctgaaaatatagctgctgtgactggctcagtagttgcagtcttacaaggtttgaagtggcatgaatgtccatataaagtagtaggcgccatattttttgtatcaactaagaaagttacaggctatgtatttctattagataaatgattatttgaggaactttcaaatgagagcccttctaattaatttcttagactcacagtgaaaggttctgacaaagtgctttgtgttttggtaaattatactctatcagacagaaatatgtctctcccacagaggtgtcctctctcctttctcagaaacagtaggcgaattgtgaccatatgttccatacattctcccagctataactctgctggcactaatggtatttatgtgccccagagctataaacctgttttaggtaaatgtatttactcagtaaagaacatgagtttctgaagactgcaataataaactgtcaacagtatgctaaacagtgcttatccactctctctcatctcttcattaagttgaggcttcctcctgtatgtctaaatgcttaggacaataaactgcatttataaaggacttgcagtgcaaaataaagatgaaccaacacgacttcaagattacaaatataatagaaggtattagccatcacatagggagtttaaaatcaaatccttgaaactcatgtaaatgataccgcaatacatttctgcacctcagttgtgcttccagaatgagtgatgtaagctttccctgaacaattgcttctgtatctgctaggaatacttttaattgcaagttttagagtaattaactaatagtgacttgaacaataaagatattatttcgcataataagcagtcttgaggaaggatgttcacaggtttggtgaacagctaccaaagactagacattgatggttatctttccagctctctcagcttttcctcatgatcacagtatagccaagcagcatcaagcttccaagcaagagaaaagggaaaagagcaaaagtgcttggtcatctttaagttgcccttccaggaagggcagtgcctcatttgatgtattctgattaaccagatgtgtgttacctgtttatccctgattctgttatggttgaaggagaatggagtcgtcatgatcacagtaaatggatcctgaatcaattattttgttattgtgatacattctctggagttgaacctagaggtctgtcttctgaaatattaagggaatgctgcctgtcacctgaataatctagggctctgttggcagctaagaagggaaatcactgttggctagacaatgagcaaggagcaacatttgccaccatgctgttaattcccgaaagagctagtgtgatgaaattgtccatttttaaaatggaaatagtacgaatatttgcctcactgacagcataaagttttgggagaatgaattatatgctttataaactaagacatgctaattactggttcaatcttccaatttaagtttttctgctgttcttcccttaacctcagtgagtttgcctgtctttaataaaatcttcctaaatgtcaggtaacctgtctattccaacaggcaagaatttttcagtattgtctttttccctgaagtcagtagtaaaggaaaaaaagataaaaattgtacttaggcctgtagactacttgctgcaggttactcttttgtcaaataaatgagtcatgtatcttgacatagtgaagtatggtatcagtttacgttatattttattctagcatcttgattaaaaacaagttagctatcaagccctaattcattttagggagacagggtgaattcattatactaagacttggggagcatttcttgcaaaataaagctatattattcactcagaaaaaaacatagagcctggtgctgtggtacatcatttttctatttttcctctgtcacttattaagttatgattctgtatgtacacagtaccttgatttgtttaagttacatggattctgtgctgctttgtaaatttcaagtctgcattatgcatgttttaatgaagaatgaactatgagtcccagggacagctctggttcagtcttgtcgcacttccagatgtgcacctggttctttattatgtctcacataggaagctggtaggtatctttctgagagcatcttgttaatgaatcaatttacagtaagatgtatatttaggggaaagaaagtagaattgtaattatggtaatggggcaaaacagcttaaaaatggaaaataaaccaggagtctagctgctgaaatgtgaacattgtgtttctctttaatttgctgttgtcttggaacctagctgtttatgcagtgctttcaccttctgttgcttgtctaagtgccaacttctttcccaaaggtgttcagtgactaatgctttggttacaagccagaatattttataaatgtctatttctgggcagctcttctacaagtcttaattaaactttaatgtcaagctgaagtttacttttagaacctcttaggttgctttagtcctaacatgattatagagtttggggtgggggggcaggatgtgggacagccatgttcccacacacttcctctctcccatttaacagtgccaccaagcagattcatactacttaaccccaaggtttacaacacaggcacgagtaaatcacagccattccctaaaatgttgtggtagcacactgtcactcagactcctccaccctgcagtgatacccagggtttggaattactgctttgttagttattacacattcttccagcatatccaactgctcaaatcagggatcccaatgtagagatgatgcatgtggaagtagcattctttcctttcttctccatgtctggaggagttatgaggactgggggatcattttctctaattctcatatggcttattggggtaaagaactgcatcctatgccatctgaaataatgaagcttctattatagtcagaatagtacaaaatagatttcaattaaatatggtaatatgttatatgtttattttgtaattaatttactcatcaattggattgctctgtagcaagagcctgcatttttttctgtgaagggacagatagtacatatttgagtttttgtgggacagagatctctgtcccaactactcaactctgtcactgcagtgcaaaagcatgtctgtgttctcatagagctttatttactaaagtaggcagacatgtgaatttggccttcagggagtagtttacagacctctactctatgatatgcttgctttttatatggaaattctaaagtatatatatttttattaattaaaaatagtgcctgatagtatattttgttttttaaacatagtttgtcaatataacttaggctggttgtgaaagtaagccaagattcaaagatttttaagaaattaatcctcagttaaaaaattataagaatctctcctagatagaaacaaagatagatataaatatgtatctagcctacagaattacgtgtgtatgttgaccaaaaaactataatagttccaaaaatggaaattgtcaaaagtcccatggataattgaaaggataaataagatgtggcatattcataaaatggactatatacaccaatgataagaaacattttacaactacatgtaccaatatgttaatctcacaaacaaaattttgaataaaagccatgcaaaagaacagatactcaaagattacattacatttatataaaatacaaaaccgaacaaaaccaagttatattattaaaaatcaaggagggtgaggacaataactggaagaaaaagccccagagggtttttcagtggtgctgctaatatttatttccttgagctaggtgcttaacgcatgtattcataaaaaatattgagctgtacaatcaggatatgtgcatttttctatgcatgtattatactctgataagtttaaaatagaaaaaaagaggaagaattttctagcattaagtgaagtgtccattttcttagaagttacattagagttataaaagtggggggaaatatccaaaattattttatttgcatattccgaggttcataagaataactctgaaaaaccgtaccacatttccagtttggattttgccatggtcatatgatgccattaattcataggtcatttcagtaggtttatcaccaccaaaacattaggttgtctggatgggggtacagatcgcaatgtggtaatgctagatatttactttcttagtgagacatttggaatttgtatagcatcacagaacagataaacacggtttaaggctataacgtgacagtatttatgctgatactttcatagacttctaacagtcaataacttatccaataatttccccaatttttttctgacatgttgcttggacaccaccgaacccttctttacatttaatacagacatgtacttacctgcttatattttttgaagactgtgttgttaggctctgagaaagcatgtgaatcacgatccagcatcttctccccaaggcaaattagtctagtagtgagaggaaccagagacttgacattgtgaaaatactgcatttttatagaggtgccccgtgtgctttgagagagggagaagctgccaccttacgctgttaggggagagcaatgcagggtgaaggtggttaacagtgagttttggctggaagaacaactgagaattattgacgtccaagataaatcttgaagaataagtacacgtcagatgcatgaagaggagatgttgacatcagagtgctagtttgaaggaagacgcaaaacatcctggtgtattagatgcctgtttatagaaaaatatgactgaaacaatgaattgtgcagtgaaagtgaagcaggggccaactctggagggcctctgtgtcatgctaaggagttggaactcttatcttgaaggcaatgtatggttctcaacagacaccattatctagtttgctttcttgaaaatgaccctctggcagtgtgaagactggattaaaggagaggagaaggacttgagacagataaatcaattagaaactcaatccaagtgaatttaggttcaatcatgacattttcagacttaaaatttcttgaggcagccaatttaaccatagtagtagagaaagaacaagtatcatgtctttactacctcaggcaaaaagtggtttcccagagccctctattcacaacacttgcccgtttgtgtatcttttttacatttatttacacatctgtcctttattatatcagctctaggaaggagtgaagtgtgttggtatttgggaacgatgaacttagtgcctgatttattgtacagaaactttcaattcattcatgaatcttcaagtaataattaaaagcagaaattttgaaacatgttcttaaactctgtccttacatactctgtctttaatcaattcacaaaaacaactaaattcctactgtatctttagtatttccataaatagtttattcaaacactaatcttctctacaaatgttgatttgaatgacacaatttaaacattattgaagaaactttctaaattctgcagtgctaggtggatatttatcttttttatctatcctcacctgatattttgctttgggtaaatgcttctctacttttaactaatttttctgaatgttaaattactagatatctaagaacttctgttcttaggggaaagtttataaaatgacatactgtattggaaagttttccttagcatatagctgttctaaccctctcactgggaaaaagaatgaactgtagaaatttgcaattgtttcaagacttcagaacattctagctgtggcctttgaataagttccttatgtctcaaatacttcatatttaaaatattttaaggactttatacagtatacataacccagatcttcagtgaatggtaggtagtatggaataggatgactgaggcttaaaaatgctaaattacttccccaccagaaagaactgctggcagtgccaggacttgaactcgtgcatatatatggatttacagcaatctatactttgcaatacacaggaggatgaagcatttctccagttctgtttttaaatttggcctagttactggtggaggtgaccagctgcttcacaatttaattctagtccaacagattttagtgccacgcacttgtgggtggacatagtagttcttcctcatgccttgctcacttctaccaagtattccttctagtcttcttttctaccagttccttccattttcctccctcggttcaggcagcagctagttcaatgtctattttaggcttgcaagaaagaaaagaaaaactgctttgcctttagaaaatgttacgaaataatcaggaaaatgttaaaattatagaagcaagaggttatgcagaaaagaaatgagaaaagatacgagtttaattatagctcattaaagtttccttgggtaataggtgactgaatttataaaaaacatgacaaagagttcttcttaatatggttttacatctgcttgcatagggtcaatcccatgattgtttttccaagaaaattagtattttatgttcagcataaattatatacatatatccttgtatgcatataagagagagggatttttatttcctaaacaagaactaaataatattacttaatttttaggccccatgaaaataaaacatatcttgctgttgggagtatgaagacattgatgttgaatgtgtccttgtttaatgctggagatgatgcatatgaaacgactctacatgtcaaactacccgtgggtctttatttcattaagattttagagctggtaagtactgtaaaccacaatagcatgatactacttggtattttacttaattttttaaaagtaagtggtagaattcacttcactgatttggggtataagtcttaatatttaggctcctagttattttcagacttactctgtgcccctgctcagaatggcaagttcttgggtcttaagtccaaaggcatcagcctcctgttttccagtactaggagtaggaggaagctgtttgggtgcctttacattctcactgccgtagccagcacacgtctgatgttggaacagtatccccttgattgtggtccttgcacaagtaacattgatcctccatcctggactccagagttatagttctttattttaaggtgacactcagacaattaatagaattttctctattctttatcaaattcgctcatcttttgtccagggaccacaccttcataccaatagtgacctttgacctctcacgaatatctgttaccttctttctctagtgtttgcgctacttgcaaaagtaacagtggaaactcagatattcacggacagtatttttaaagcattttatacttattgcaattataacctcattacacctattgagattatagctattttgattaaataccttaaacacattctcacataccagacagaagaggaccattaaaatatgaaccttatggattccttgcctcatgatttttcaaggaattcagaccctggattaaatagggaatatatcaagataaatgaaagctacaagtccagaattttttttttgtggagaatctgtttgaatactagagtacacacatatatgtatatacacacacacatacacatacacatatatatacacacacatatatacacacatatatacatacatatatatacacatacatatatacacacatgcacacatatttatatcatatgtctatttatctcaaacatataaatagaaaatagttttcctagaaaagcaaatacttctgggatgatattcttttcaataaccatccttaaacatatgttacaaactttttatttccttcctgtccaaaacagttgtttcatttttcccattaggaagagaagcaaataaactgtgaagtcacagataactctggcgtggtacaacttgactgcagtattggctatatatatgtagatcatctctcaagggtaagtgtttcatatttatggcttttgttcactatcatgaatatttttttctattcttccctatctttaggttgcatagaaaatattataaatattttagcttggggtaggtagctgagtgatgaaataaaactggttcttgaaatctttgagctttgtgtttatattcttggcaatgtttgctgttttaaagggggtggcatgtttacatcgaaatgggcatgtgcatgtgtcaatcagaattctgctccccctacacacccttcccgaaaacccccacccccaccgcaggtggtcctgtctgccaggcatgttacctctgctatacaaaaaggtgtttttggcaagagtctccactcaagttgtgaaagcatttctaattttgtctagacttgcctgcgttcacattcagagacgtctttgtctctgaatgttacgtgtggatatgtgtgtactttaaaatagccacaaacccaacaacttccctgaatcttattgccaagggaggagtagctgatgcctttacaatggttcaattctacattccatagaacataaacttttaagaaaaaaattcagattataaaaaatgtacttaagattttttttaatgggctttcctggtctgtgttttacagatagatattagctttctcctggatgtgagctcactcagcagagcggaagaggacctcagtatcacagtgcatgctacctggtataatttattgttaataaaatgaactagaaatatacccccatattctgaggggggggaattaggagaaccgtaaaactgtgttccattaattgtaagagaaaacttctcttacgtggtatgcttttaaaagaaccaaacaacatagttaaatgggagttactggcaatgttttagctcttgagctatgttaagtatttattagattagattagagtagacatgatgtgtcacgaatcaaactgtgtatttgaaatcaaaaacagaataaacagtttacaagtaataactctacaagatttaaaagtgagggtaatgacttccatagatatgtctcctagagtaaataggaaatcgttaatgactatttcatgagtgaagtttcaatatattttttaaaattcagaataaacgtcaagatggacttcattttacctaacacaacaacttggtcaccctctcatcctaaaaatctctataagtaaaactgattataaagatacgttaaggcagtacatgacttgctatacagtttaaaaaattatatgattgatgtgctttctttgatcattaagtcttgcaaaaacacttcttcaacctaaagagagtaatagatttgtttctaaactacctatttattctggtttttgtaccacctagaacataaatgttaaaaaatcttttaatctaataaatgtaactatttgttaaaaaaaaaaaaattcctctatctagcattagaagcaaatgataacagtttaaataatgagagaaattttctgccaaccttgtcctaaaaaatttttactaccatatctacttttatccccactcctcaaaaagcatttaagcaaacctctgagtatattaggtatacagggtatgtaattagttctctctgaagatttttctgcttggtgaattctaacagggtgttttctgtttgtatagtgaaaatgaagaggaaatggacaatctaaagcacagcagagtgactgtagcaatacctttaaaatatgaggttaagctgactgttcatgggtaagtagacataaaggcttcctttcaaatttagagctgatttacagtttccttgcttcttacattaatgaaaaaactgtattctagaatttttttaaaataaaaaggatactctatcttttaataattacctcattgttatagtcccttacttagctgtccattataataatccactctataatcatcactgatactacatcaaactagtacccagctggaggagatttcttactgtgagagccccaacaagctagcaaggccacactgagcctttcagctgtgcactgtgtaatcctaatctggaattaggcagtatgcagtctgcataatcatacttaatgcccatgtcaagtgtgaagttcagagaagtgtgaacttagtcaaatcactattctgcagacccgtatctacacatgtggcaaatggattgagacgtgagagatctggctgaaaggtgtcccttgtccactttttatacctatgggatcaccagattcctcaaccacagtatcagaattcattgcttcctcatgattttaatgattgagtggatccccctctcattcaagaaggagatgtgtggagaaagaataaaagggggcttacggaaaccttcagtaattccactagaacttattcatggtgttagtccttaaaactacatttttatgcagtagaagatatgagttacagaacaaatagacagatgagcctttcctgttgctctaaatctaaaccatcccgcagtcatcttatccacttagaaaggtgatatacagtcatgtaaatgtaaaatgtcagtgtctgatggaattgagtatcaagtttgagataaagcaaacgggtgaaaaaaggccattcacaggagagtaagacctagagaatcacgagtaagcaaataaaaagttcattgcgtgtttcctggttttcattgtttatcttgccactcctcctggcttatgatgagtgtcttcctatttttctgttattcacatctcattattttgaacaaggtatgttcacctgttaaactgcctaaatctatgctggttactttcctgtttcatgagtttctaatttggtattacctaatattagctgccaaatgtgagcaccttatggagtagagatctccctagaaacatatttcttagagtttattgcagataaaaatgtcaaatcacaggcctttaaaagagagtgacagccttgtattgtaacaaaaaatttatcatacttaataatgttagacttgttccccagatttggggttcattataagtagccagcagggatcatgagatgggaagaaataattcaaaaatgggtaacataaattgaggtatgagaaccttaggaaaaaactaagaagttatcccacattacatttgccaaatttacatgaatcacttaagggctgaaagagaaggaatggtcagtagaatgaaaaaggtgtagtgtcatggaaagcaagaaaagaatatcggtgagggacagatattgtcacccaggtcagagcacatggcctttttttttttttttttttttttttttttttttttttaagagtctcgctctattgcccatgctggagggcagcggtgtgacctcagctcactgcaacctctgcttctcgggttcaagcgattctcctgcctcagcctcccgagtagctggtactacaggcacacgccaccacgcccagctaatttttttttgtatttttagtagagattgggtttcaccacgttggccaggctgccctcaaactcctgacctcaggtgatgcgccctcctcggcctcccaaattgctgggattacaggcatgagccactgctcccggccctaatttaatttctttttaaataaaatgtatatctgaccacaaaaccaaaagtattccatggtgacttgtaaatatgctataatccagactatagaaaaagactctttataatacgtcatcgaataagacagttaattaaatttgaatttgtttttaccaggtttgtaaacccaacttcatttgtgtatggatcaaatgatgaaaatgagcctgaaacgtgcatggtggagaaaatgaacttaactttccatgtaagaaaagttaattgtgttaatatttgtaacaacctaaaaggatgtcactgatgcattgctccaagggacattgtacacctatgacgtccttcagcctctgcagaccacagctggctggaatggggcagcagcagtggtactcctgcctctcagacccctgctgctttccttccacttgtcttgtccctgatattcaagcccatatttccttacaggacaggtgagaaagagcatgcaggaacagagataatgcctgaaacaggcaaagttatgggatgagctgaatttgctagagacacatacagaaaacaggacaggccaagggaaggcatctttgggtgcaaatcagtgaaatttcttcttggttcaagcgtataaaaacctcagcactacaaagtaaaggaggctcttacctcccatctccatttaagatcacgttggttagcctttcaagccataagtttatgacctgtgacaagtgctttatcaattattaaataaccttttaaagtaaagagtactatcgtaattcagaagtattaggagactgatgtaaacctaagtttttaaaaacattttttgctgtcaaactgatatttttattgtatcaaagatgttggtgattagtaaatataatttccaaaaaaaaattctttgaaccaaaagcactgtccaagcattcttatagaataatctatatttgtgagtaaatcttggattaggtataatattttgtaagacaatgcttttcaaaatgtgtattagaatcacttggggtacctatccagaatgcaaattccttggctttgccccaaatctgtggaaaaagaatgaccttgaaatcctgttgattctatgtatactccaatttttgttacactagttgatactaatgttgaaaaattttagttctccactttgaagtcccaagaaatgctctttaaaacccaatgggagtttgtgctttgataaactaaaacagaaaccaaaccggactctagaatgtttatttattaatttacaattaatagttaaaaagtattttctactaaatgtataatgtagtgactggcactggagaaacttgcagtatataggatttctgtgtctagtcaactatgtagatattcttagaggtttaattgttgttaggcaaacagatgtttgtgatttagatatttaatggcatccagaagaccttgtctgtagtattgggcactgctaggtatctgttgctgacattttcctgctgcaactgccctgtgcttttatggattagcaattaccacctgttcccaatttggagacactttcttcatctatgtcacatgcattcataaaatgactgcaggtctgcaagtcatcttttttaatcgaggtattgggatgcatctctttctgacttactgtattggttttacagttaagctgccagttcagtaggctatattttggccccatttcccttttcaggaatcttcaatccccaaatttatcatcctcttatgcattttttgacaagtattgttaaaaaccttttgtgctttctcaaaacccaacaacatacttttcttctgaatgcatcagcatatagatcctgaataaaaatacatttttattcactttctcctgctgattatcctcttagcacagagtgcttttgcgataacatcataggatttagaattacaatacctgagttttggtcataactcttgtcattttttaacttttatcttgggaacactaagaacacctgttagcatttcccttagctggtgaataccaaaatgttggcctacctcatgagaaccaaatgatatttttaaaatatgtaatgtaacatacaaatatatattgtttgtctcctaagactgtttctccaataaaccatcagcctgtactttttgttttcaacaataccaaaactagaaggttagaaacaatgactcatttgaaattattagcaaactttaaaaattctgactatggatatcctgtctccctttgttatgcagctgccaactataaacctccaccactataaatgttgcatggaatatacgggatcacctaaaagctcactgatatctgtacttacatttatagaaaacatttaatttgttaaaaaatttttccttcttatcaggttatcaacactggcaatagtatggctcccaatgttagtgtggaaataatggtaccaaattcttttagcccccaaactgataagctgttcaacattttggatgtccaggtaaaaatgtatttcttccatctaacctttattgtgtgtcttaaatactaaaataaatgcaaaccaatcctttattcgagtaatgatgtgaaaatggataattgttaacttacttcagtcacactctaagctatgaattcaccatgcatttattgagttatgctttgaatattatacatttctttagaactgtagagttacagtgcaacttttacatttgatttaaataacagaactatattctaccatctccattgaataattattttaagatacattgttgtgtgatatggacctatagaggtaacttctattagtagaattcttcataaaacttgaaactactgtgcaaatatgaggattatagcctttttttaaggaagcactattcaaaccacttcttaagaaccgatattcttgcactgatggttccatcagaattgttttgagcttaacaggttgaagacaaaagtcaacaaatctactaaataggtttgaggtctgatttttaaaaatcctatttaaattccagatttagagagaagaatatggtgttatattgtttcgcctataaaggcgaagaaatatttaatgtcatgctaatgttccaatatcatttttcacatttctgcaaggttaaggccattttatcagcttagaacctatatccaacctgctgtaatttggctgggtttttgtgtttctgccacagacatttaatcactcccaaatctgtcaaaaaaatttctacaatttcagaggtacttgatatattttagcaaagataagctactggaacttttaaaaccaggttgctttttgctgttttttccagtgttgaaagataagatttctcttgctttctgtcttcatagactactactggagaatgccactttgaaaattatcaaagagtgtgtgcattagagcagcaaaagagtgcaatgcagaccttgaaaggcatagtccagttcttgtccaagactgataagaggctattggtaagtttcagtttttcaggttgtagttcctgctttccaacagagaagtgagacacttaaaatcaagtcaatgggtttgagctgtcacttcaataataagagagaagacaagtttaggtagtattcttgcgtggaaggaacaagcatggttggaaagttgagatagacccagggtctatcccatatataaacatgttggccgggtgtgatggctcacgcctgtaatcccagcactttgggaggccgaggtgggcagatcacaaggtcaggagttcgagaccagcctggccaacagagtgaaaccccgtctctactaaaaatacaaaaattagacaggtgcctgtaatcccagctactcaggaggctgaggcaggagaattgcttgaatccgggaggtggaggttgcagtgagccgagatcacgccactgcactccagcctgggtgacagagcaagactccatctcaaaaagaaaaaaaaaaatgttatacagtttcatttttttatctaacaaatgcccactatttgccaacaagacattgttccagacccttcaggacaccaagaggttgtcttcacctgggcagcctttgtggcatgggttaattttcattcttttcagcttagtgaatgtatgaaaagaaactggagaagcagtcatcaccttgaaatgatccatgttttacaacaaacaaagaatacgtaacttagcaagactctgattaggaacattttttaaaaattctgtcccagaagattatgttaatacaaataataagaacatatgctgcagtttaaatactttattataatttagaaaacaaacattcatgtcttgtttaaaggtaatttaaatgccactaaggaaagcagatgtttaatttcatatttatggaaagatgattttcaaaatgccattagagtatatattaaattctatataaaatattttaaaaatattttccaatgttgaaaattttaatgtagcacttttatattcccttcaagtactgcataaaagctgatccacattgtttaaatttcttgtgtaattttgggaaaatggaaagtggaaaagaagccagtgttcatatccaactggaaggccggccatccattttagaaatggtaagtaagtctaaaacattgacaacttggtggctaagtttacataaaatctataaattcagtcatataggcaggatagtatgaaggcattcaacaaattaaattttaaataaaattttggagtaaaactctaaaactgtatttctatcacttcaactatctacattgactaagtgaaatggctttagaaattaacaggtaataaaggctaaaataggccaggcacagtggctcatgcctgtaatcccagcactttgggaggccaaggcaggaggatcacttgaggccaggagttcgagaccagttgtattcctaggtagatgtctggtgttatttctgaggtctctgttctgttccattggcctctgtatgtgttttggttagccttgtagtacagtttgaagtcgggtagcctgatgcctccagctttctttttgcttaggattgtcttgactatatgggctcttttatggttccataggaaatttaaagtagttttttctaattctgcgaagaaagtcaatggtagcttgatgggagtagccttgaatctgtaaattactttgggcagtatggccattttcacgatattgattcttcctatccatgagcatagaatatttttttccatttgtttgtgtcctcttatttccttgagcagtggtttgtagtgctccttgaagaggtccttcacatcccttgtaagttggattcctaggtattttattctgtttgtagtgaatgggaattcactcatgatttggctctctgcttgtctattattgtatacgaatgcttgtgacttttgcacattgatttttgtatcctgagactttgctgaagttgcttataagcttaaggagttttggggctgagaccatggagttttctaaatatgcaatcatgtcacctgcaaacaatttgacttcctctcttcctatttgaataccctttgttgctttctcttgcctgattgccctggccagaacttccaatactgtgttgaataggagtggtgagagagggcatccttgtcttgtgacggttttcaaagggaatgcttccagtttttgcccattcagtatgatattggctatgggtttgtcataaatagctcttattgagatatgttccatcaacacctagtttattgagagtttttagcatgaagggatgatgaattttattgaagcccttttattttaaaaatatagctaagaagaaaaactaaggctttcataaaatcaaataaaatcaaaattcaacaacaaaaacatatttaaattttaaaaataatgaaatatatcttggactttttcctacaaaggagcatgtatatttatgaggagtagtttgagatgaaactagttttatgtggagttctgtttttcagctttctcatctgttcaatatggataaatgagatgatttttataagaacttagttcatggaacataggaagccaaaggaaatggcagctgttatgttcaagtggaattcttgaaattgccaaacagtgcttaagaggaagatacactagacaggcaaagaagaaatatccattttagtttcaactgtgctaaaagcaaagtcattgaaccatcagcaagtcatttaaccttttgcagtttgccttatctttttctctaggtctaggttttccatcagtggccataattggcattttgaaccagataattttgttttggggggttgtcctgtgcattgtaggatatttagtatcatcctcagcctctatacgctcactgctggtagtaccacctcccacgttctgacacttgacagtttctttagacattcctgactgtcccttaggtgataaaaccctccctgctgagaaccactgctctagatctataggaagcttgtcatttttggctctaaaatgttaaataacatttacacaatagttttaaaggtcatatccctctttaagaatctgactaaatatattctcatctccctcagcaaatgcacacatgaaaacatctcctaaagattcttagaatttataaagcccttctacagatccccaagcttcatggattctgcgttataaaatccttgctttagatagtaaagttctgagttcatccactgattttatatttgaattctataatgtatttaatttagaaagaaataaaaagcccaaataagatagattcaatatgcggtggtggggtggagaacaatggtaaatggtaacttacctctttctgtagtctaatatttaaatcaagttatttgcaaggtagctgtttaatcaaaggatttcaataaaatgatactatataaattaataccaagaccacactttgggaaccaaaggaggcactgcagttaattttaagtggtgaaataaattggggaaggtaaattgtgaaaacctctagctagaaggtaaagatcctgataaattatgtctttatgaaataaaccaggctatggtgatccttcttttattaaacaggatgagacttcagcactcaagtttgaaataagagcaacaggttttccagagccaaatccaagagtaattgaactaaacaaggatgagaatgttgcgcacgtaagattaccctcttaactgctacattaaaattataggaaaacacatttcaagggtgtctataattacttccttctgagtaactgagttgggaaagtagagtgtgaccagctcatggagggcccccaatacttggttgagagttggcattttccacaactggcaggagggaacaatacagcagttctttcagagaggtgaattgggcagcagtgagaattgaatagattggaggaaaagtcatggatacagcccattacactcactgtttctgctaaacagttaccagtgtttcctgcaattatattagaaccagcaagaaaatgggctgggcagttctaaatactactggggattatggcagggctttaaaggaaatataagcaacgttttaaactgatttttttttttttggtttttgagttttatttttcttaactcacgtaggttctactggaaggactacatcatcaaagacccaaacgttatttcaccatagtgattatttcaagtagcttgctacttggacttattgtacttctgttgatctcatatgttatgtggaaggtaagcatttaacaattaccaacattagtctactaaaaatgacattttctcaaagccaatttgacttccaagttattagatttaaatatttcactatttgaatgttaactttttatgttgctcagtactgatctcacatttctcttcaacaccaaagtctttctagaaaaatatgcattcttaatttgttttgaaagacagacgttccttttaaaaaaccatttggaaaagattgcaaattacacggaatgtcaattttggagagaatgtggtgtgtatcactgagaatttctgcattaaaaacaaaaatgtttctttaacccggtatgtccccactaatttttactgattacctctgttaaacctttatgactgatgttacaagggatgcagtttaagaaatattggtgttaactgcttagatattagaaatgagtatagtagataagagagtgttcataactatacactagtgattatgttatgctattttcaggctggcttctttaaaagacaatacaaatctatcctacaagaagaaaacagaagagacagttggagttatatcaacagtaaaagcaatgatgattaaggacttctttcaaattgagagaatggaaaacagactcaggttgtagtaaagaaatttaaaagacactgtttacaagaaaaaatgaattttgtttggacttcttttactcatgatcttgtgacatattatgtcttcatgcaaggggaaaatctcagcaatgattactctttgagatagaagaactgcaaaggtaataatacagccaaagataatctctcagcttttaaatgggtagagaaacactaaagcattcaatttattcaagaaaagtaagcccttgaagatatcttgaaatgaaagtataactgagttaaattatactggagaagtcttagacttgaaatactacttaccatatgtgcttgcctcagtaaaatgaaccccactgggtgggcagaggttcatttcaaatacatctttgatacttgttcaaaatatgttctttaaaaatataattttttagagagctgttcccaaattttctaacgagtggaccattatcactttaaagccctttatttataatacatttcctacgggctgtgttccaacaaccattttttttcagcagactatgaatattatagtattataggccaaactggcaaacttcagactgaacatgtacactggtttgagcttagtgaaatgacttctggataattatttttttataattatggatttcaccatctttctttctgtatatatacatgtgtttttatgtaggtatatatttaccattcttcctatctattcttcctataacacacctttatcaagcatacccaggagtaatcttcaaatcttttgttatattctgaaacaaaagattgtgagtgttgcactttacctgatacacgctgatttagaaaatacagaaaccatacctcactaataactttaaaatcaaagctgtgcaaagactagggggcctatacttcatatgtattatgtactatgtaaaatattgactatcacacaactatttccttggatgtaattctttgttaccctttacaagtataagtttacaagtataagtgttaccttacatggaaacgaagaaacaaaattcataaatttaaattcataaatttagctgaaagatactgattcaatttgtatacagtgaatataaatgagacgacagcaaaattttcatgaaatgtaaaatatttttatagtttgttcatactatatgaggttctattttaaatgactttctggattttaaaaaatttctttaaatacaatcatttttgtaatatttattttatgcttatgatctagataattgcagaatatcattttatctgactctgtcttcataagagagctgtggccgaattttgaacatctgttatagggagtgatcaaattagaaggcaatgtggaaaaacaattctgggaaagatttctttatatgaagtccctgccactagccagccatcctaattgatgaaagttatctgttcacaggcctgcagtgatggtgaggaatgttctgagatttgcgaaggcatttgagtagtgaaatgtaagcacaaaacctcctgaacccagagtgtgtatacacaggaataaactttatgacatttatgtatttttaaaaaactttgtatcgttataaaaaggctagtcattctttcaggagaacatctaggatcatagatgaaaaatcaagccccgatttagaactgtcttctccaggatggtctctaaggaaatttacatttggttctttcctactcagaactactcagaaacaactatatatttcaggttatttgagcacagtgaaagcagagtactatggttgtccaacacaggcctctcagatacaaggggaacacaattacatattgggctagattttgcccagttcaaaatagtatttgttatcaacttactttgttacttgtatcatgaattttaaaaccctaccactttaagaagacagggatgggttattcttttttggcaggtaggctatataactatgtgattttgaaatttaactgctctggattagggagcagtgaatcaaggcagacttatgaaatctgtattatatttgtaacagaatataggaaatttaacataattgatgagctcaaatcctgaaaaatgaaagaatccaaattatttcagaattatctaggttaaatattgatgtattatgatggttgcaaagtttttttgtgtgtccaataaacacattgtaaaaaaaagaatttgaattgatatctaaaaacagaatttgaattgatatttcatcttgacttttaaagccctagaggctaattgttagtaacatcaatttctattaggatatccgtttggccacacagcaggaggttagagcaatggagcattactgagttcctccccctgtcagatcagcagcagcattagattctcatagaagtgcgaaccatatggtgaactggtatgtgagggatctagagtgccatgttcctcaagagaatctaatgcctgatgatctgaggtggaacagttcatcctgaaaccattcccccatccacagaaaaattgtcttccatgaaactggtcccaaaaagggtggggaccacaggtttaaagcatggccacatttctttatattaaaattctagtttgtacatttcttttagaaacaattacatgttactttggaatcatttcttccatgcttcctccataaagactgataagtcttggatgcaatctgtaaagaaaatacattatttcatcaacttattttgttgtttttcacatacacctaataagtatggtacacaatgccaatgccaaatacaaattgataacaaacacagcattcccaacagagctgtaatctagaaaactgagaaggtctgattgataaatcatcaacaacaataattgctctaaaacctccttaactgacttccttgattgtccaatgctctccattacctctgtaaaacagtcagttatgccaacccatgtctagtgggcacccctgcatgcttcttctaaccactgagtgtcacaatgcctaccaagaatgcgtttgcaggttcctaaacctgtttataccagttgctatgtaaaattgttcccaagggaagttgaatgctctgtaaaggcctaataaaagcaaattactgaacaaaacatgttacagtaattatgagtgagaggaaactaagatggaaggataaaaatctaacactttactattcagatggctccactaaaagatttaagatcttgatccatttttaaaaatccaaaatggaagttgtagacattatctgtagtttatgcacaacaataaattagaaagccaatgtagacacgcataaccaaagaaaatgccttgggtctacataacagttgaataaatgtaaagttgctttttatttattgaaatttgtgcatgtctctttatgcttccctgatttactgattttttaaaaactaaccaactgcctgctttgatagttcagagaagagagctttcgttgtaatattagatttatgtttactggttgacaataagcggtgaaataaatagacttacctaatatggacctctgatgcaacttccattaagtcaccatctacattccaagggaaacaattttctgaagcagtttcatcctcctcctcctctggattatatccaccagtattattccttggatgaacttttacttcctcaacagtgtaagtctcaacaaatggaaaattgaactaaaaataaatacaaataatcattatacttggtttatctctagctactaacgcgaatcaaagttcactgagccctctctcacaagtaaatatcagcatgtatgctgacattttaatagctttgagactatgaacagggatctccaactttttttggaagaaggaatctcttatccaaagccttttgggttcttttagatctagcacctagaaatcttgttttatgacaaatagtacatatctgtgagaagttacataaaatagtgatactgtagatttttcaattaaagataatctttaatactggcctgtagatacagaagacatataatccattatcaacttgtcaattagtttagctgacataaagcaaactagtacaagtttcacacttggaatttaatttggaagaacgcaagtctaaacttctgaagataaaatgggatgtatgtcttcttttaaaagagaaagccaatcaaatatggattttaaaaggtgtttgcctgccccattcccactttaacaatggacacaagctgcaagatcactgtttacttaccactatagaatggtgcaaggtaaacttcaacttgcgttttttcttgtttgcctaaggaaactatactgaaaaagcactatgtattttctgacataattaagaaaatatagccaaataacttgagcagaaatgtataactactcatttcagttttcagaaaaatgacatgagatacattcctaattaaacatcatctacatagtttttccccttttccacatgtaaacctcaatgaaacatagttttaaaagttgacagaaaactaatattttccccaacacccatattttacatatgtagataccaaggtccagccaactttccagtttatactgtaaacacagttaaacagtagatgatatgatggcatcagctgttgtgactgaggtacagaattagagggccccaagcaaaactgtttgacagtaactgcgttagacctcctacctcgggtataaagccttggctacatgcctcatccttgtagaattatctacataatcattcatgttagttgataattcatttaaaacacacaactgcctgttatgatctaaattatatttccctccaccaccccaactatgttcaagtcctaacccctggtacctgtgaatgtcccctgtttagaaatagggtctttgcaggtagaatcaacttaagatgaagtcattagggcgggccctaatccaatatgactgatgtccttatgagagaagaatgccaaggatggcagagtcagagactggagggatgcagctgtaagccaaggaatgtcaagaattgacagccaccaccagtaagtctattatcttaaatcagcagttgtcatgtgcactcctcacaaaatgaagatctagccatccttcaaatgctttaactgtgaagccacagacgctgttaagtgggactttcgggagccaagagcttagtatcctgtgtgagggtatgtttggggcacggggaggagaagtaaacagttacaattttgatacaggggagtgccatgatggtgcaagtgtggagttcaacggaggaaacaagaggaggcaaacaggctatggatgttgggaaagcttcccatttgaattgagccttaaagaacatataagatttagcctggagaagaaagtctggagagaggaagcatttacaaaactagaggcaaaccatggtcaagcaactacacagaattcagtgtgactcctaggtgctcaacatcatgccccttggccctcaaattcctgtattgaaatcctcgctctgtatacctcagaacataactatatttggagataagatctttaaagagacgattaagctaaaatgatgtctttaggccctcatccaatacgactggtgtccttataagaagaggaaatttggacataggaaaaggcatcggggatgaacagaggaaagaccactcacttgtgggtgctgtgagaaagcagccatgtgccagccagagagagaagactcaggacaaaccaaacctgctgacattgtcttgcagctctagcctccagaaccatgaaagaaatacatttctgtttgtttaagccatcttttctgtggtatttgttatggcaaccttagccaatgaataaaatgccaaaacactgggaatgtggtggagggtggtaataagaggtggggttgcaacacaggcagggacctggatacaaaggccacgtgttccagactgaggatattccatattattctgacaacaagagaaaggcactgaagaattaagcaggagagaaatccaatgtgtgtcttagaaaaaagtttctctaaaaagaggtatggaagacaagaccagagaacctgaaggccaaaaggaggctactgtaagcaagaaaggattaaagtttgaattaaggtgagggagaaattttagaaacatttaagaggagaccaacagaacaagttaggggactggtagtgaggaatgaggaagaaggaacagttcagggtaacctggatgggtagaaagtggtgccattgacccgcacagagcaacgcagaaggaacaactttaggggaaaagataaggtcggctgtagacatgttggcctccagatgccggtgaatttcagaacctcttcagcatacaagaagacagaggtcctgcagataagacgagatgacagaacccttgggagtgcatgatgttcagacagttcaaaagtgaggggcaatgaggccatccaggagacggcatcctgagaagatgagagggctgcaaagaaatcctgggggaagcactcacatttaaggttttaaactccctaccaaaaatggtcacaatgaaagagaaaagtgtggacagtgagaaggggggcaaagcaataggatggagctgcaaggactttgaagggtagtgttcagcctctatctaattttacacagagatggggaaggaacaggagccactccgcacatggtggtttcaatctattttacagtgttatacagtaacattcgcttattcaacctggtaaaaatggttcagagaagcagatgttactctccttaaactgaattgccacattttccttcctgaataccagcactgctatgaattatgcagtagacatgatttttacatagatctgattttcataatcttacaaaatttatataaattcacatttttaatgtcaccatgaaggaaagagcctaaataaacacacctgtgtggataattaacaaatcaaattaacattgcttgaaagcagtcaccctgggaatcaatctttcttactatatacactatgcaaaatattttagaattctttgcaaaaaaaaaaaaatagcatggattttaatttttgaaagttgataaataaatcagagttaaggccagtgaatcacacacaggcaactgtttcttgtgtcaaaagcaagatatgcctcgtagagtacatgagaaaatatgataaatcctgcataatattatctcttagaaaacgtcttcctatcgatacagatttttattattttctgtatgtctgtctttatgtgtaaggtaaccattgcttttaaaatcagaagaaaggtatattgatttaaaaaaatgaagaagaagaatgtttacaaaaattgcctgagagacttgccccataggcaatttcaaaagagaccttccataaacaatttgtgcaacatacacctccccaaaataaatacagaacttctcaggggtacattaataggttaatactatttaagttctcaaatagaggtacatgaatgaggttaatacttactttacttctcatttatttaataaaaaaggattcggaaaaaattctaccaaggtaatgacactaatcttgaggaacatggaattttgagtgctttaaaatcattttcttgtttctattttctgacttaaaaacagcaatgaatatatagtgctttgggttttttaaaaattggttttaatgtttagaaatttattaaaatgtgaaagggcatatattcctttgaaaatcaataaatctccatattccacccaaacacatacataaaactgttatgtaggctcacaacctacattatacctgctgatctactttgacatataaagaaagtgggactgtaattttttatgatttaagtttctaagcagcccagttagttgttcaatacatgaggatcaaataatgttactgacagatcaaacttcatgaagatggcctaagaaagttttaaaatataatgaggcaaaaatggagagacttgctatggctaaggtacataagcaaggttcagctgccagtcattggctgggtttactctcctcctcctcccgtctgttatctcccaactctatccaagcaccattttatacctttaagaatgtgtgggccggacgtggtggctcacgcctgtaatcccagcactttgggaggccgaggtggacacatcacgaggtcaggagtttcgagaccagcctgaccaacatggtgaaaccctgtctctaccaaaaatataaaaattagctgggcatggaggtgtgagcctgtaatcccacctactcgggaggctgaggcaggagaatcgcttgaacgtgggaggtggaggttgcagtgagcagacatcacgccactgcactccagcctgggtgacacagcaaggctctaactcaaaaaaaaaaaaaaaaagaaagaaaaagaaaaagtgtgaaactatagggttttacaaccatacctatgtacttcaaagactcacaatttcagaaattcacatagttcaaggatcattttcctaataatcaggtcaaaacagctgccaaaataatatggcttgtaatagttactgtttctctttaaagcaaatcacttaagtggaaatgtatatcttcacatattctcattttgaatgaatatttgtataaaactgtcatatttttaaatacatatctacagatctatttcaatcaatgcagatatgcaaacaaatgtcaggaagatctaaagatcataactttagaaagtctgctgccataatatcaagaaggctaaactctcaaatttcacttcttttcattctgaagaacagcctgagtatggaattttatccttaatttatttcacattgcaatataacactacatttcctattttatctttgtggttacagatacataaccactaattcatcattcaaaaaaggccaatctatattaatcctggcggatgcttttcaaaatttggatgaaatagattgggaaaaagaagattaatatattcagaagaaaataaaaccttcttatgaggcaggattcgatgtcaattcttgcagcatctttttctacatgattaatagctttgcaaataagtaacaaaaagaatttactatacctgattttttacactggcatatcttttcaggtgttttataaattctggccgagaagtgtttcgggcaattataagagccatacttccattatttaatctgaaattaaatatttctattagacatcaagaaatttactaagagattataccaaaaattatgacatactgttccttataacaagtatactgtttactgaaagtattggacaagatagataaatcaccatgttacgtttacctaaaattcataaaccgtatcttgctattttttaaatgatgcaggctttcaaatgagttttattaaatcactggcttccttctcaataagctcttacattagagcattttacaaagcaaaccatcaagcgtcctactcacatatcaagacataatttaaaatacaatgtaattagaaattctaaatgtgaaactatgttgttaaaagatgtattatagaagagttaatatgcacaagttgtgtaacaaatagctcaacattttctaaaatctaaagtgtgatttaaatatttatttatagacagaaggtctaagtgacataggaaatgaaataaatcaaagtggcctttggatggatgaaatggagtgaacaaatgctgccacacatgttcagttaaatgactgaacattttaatcttgcataactgttccatccaatataagagagtgaaaattcagaggtgtgatttagtgccaaaacagccactcacaaatgcatcaagctatagaatgcagtttgcagaaatacatacaaatgacttctagcttgatttcagtgcaaacatgaagttaatttaagaat

SEQ ID NO: 345 - DNA, 4295 bp, Homo sapiens
ggcagggcacacctggattgcattagaatgagactcactacccagttcaggtgtgttgcgttgtgggtctccggcacatttcagaggctcattaggaccctgaccccacactggggtttacacccctaaaagcaggtgtgtcccgtggcaactgagtgggtgcgtgaaaaggggggatcatcaattaccagctggagcaatccgaatcggttaaagtgaatcaagtcacagtgcttccttaacccaacctctctgttggggtcagccacagcctaaaccgcctgccgttcagcctgagaggctgctgctagcctgctcacgcatgcagcccgggctgcagaggaagtgtggggaggaaggaagtgggtatagaagggtgctgagatgtgggtcttgaagagaatagccataacgtctttgtcactaaaatgttccccaggggccttcggcgagtctttttgtttggttttttgtttttaatctgtggctcttgataatttatctagtggttgcctacacctgaaaaacaagacacagtgtttaactatcaacgaaagaactggacggctccccgccgcagtcccactccccgagtttgtggctggcatttgggccacgccgggctgggcggtcacagcgaggggcgcgcagtttggggtcacacagctccgcttctaggccccaaccaccgttaaaaggggaagcccgtgccccatcaggtccgctcttgctgagcccagagccatcccgcgctctgcgggctgggaggcccgggccaggacgcgagtcctgcgcagccgaggttccccagcgccccctgcagccgcgcgtaggcagagacggagcccggccctgcgcctccgcaccacgcccgggaccccacccagcggcccgtacccggagaagcagcgcgagcacccgaagctcccggctggcggcagaaaccgggagtggggccgggcgagtgcgcggcatcccaggccggcccgaacgctccgcccgcggtgggccgacttcccctcctcttccctctctccttcctttagcccgctggcgccggacacgctgcgcctcatctcttggggcgttcttccccgttggccaaccgtcgcatcccgtgcaactttggggtagtggccgtttagtgttgaatgttccccaccgagagcgcatggcttgggaagcgaggcgcgaacccggcccccgaagggccgccgtccgggagacggtgatgctgttgctgtgcctgggggtcccgaccggccgcccctacaacgtggacactgagagcgcgctgctttaccagggcccccacaacacgctgttcggctactcggtcgtgctgcacagccacggggcgaaccgatgcgcacgtgcacgtgtctcgctttaggctcctagtgggtgcgcccactgccaactggctcgccaacgcttcagtgatcaatcccggggcgatttacagatgcaggatcggaaagaatcccggccagacgtgcgaacagctccagctgggtagccctaatggagaaccttgtggaaagacttgtttggaagagagagacaatcagtggttgggggtcacactttccagacagccaggagaaaatggatccatcgtgacttgtgggcatagatggaaaaatatattttacataaagaatgaaaataagctccccactggtggttgctatggagtgccccctgatttacgaacagaactgagtaaaagaatagctccgtgttatcaagattatgtgaaaaaatttggagaaaattttgcatcatgtcaagctggaatatccagtttttacacaaaggatttaattgtgatgggggccccaggatcatcttactggactggctctctttttgtctacaatataactacaaataaatacaaggcttttttagacaaacaaaatcaagtaaaatttggaagttatttaggatattcagtcggagctggtcattttcggagccagcatactaccgaagtagtcggaggagctcctcaacatgagcagattggtaaggcatatatattcagcattgatgaaaaagaactaaatatcttacatgaaatgaaaggtaaaaagcttggatcgtactttggagcttctgtctgtgctgtggacctcaatgcagatggcttctcagatctgctcgtgggagcacccatgcagagcaccatcagagaggaaggaagagtgtttgtgtacatcaactctggctcgggagcagtaatgaatgcaatggaaacaaacctcgttggaagtgacaaatatgctgcaagatttggggaatctatagttaatcttggcgacattgacaatgatggctttgaagatgttgctatcggagctccacaagaagatgacttgcaaggtgctatttatatttacaatggccgtgcagatgggatctcgtcaaccttctcacagagaattgaaggacttcagatcagcaaatcgttaagtatgtttggacagtctatatcaggacaaattgatgcagataataatggctatgtagatgtagcagttggtgcttttcggtctgattctgctgtcttgctaaggacaagacctgtagtaattgttgacgcttctttaagccaccctgagtcagtaaatagaacgaaatttgactgtgttgaaaatggatggccttctgtgtgcatagatctaacactttgtttctcatataagggcaaggaagttccaggttacattgttttgttttataacatgagtttggatgtgaacagaaaggcagagtctccaccaagattctatttctcttctaatggaacttctgacgtgattacaggaagcatacaggtgtccagcagagaagctaactgtagaacacatcaagcatttatgcggaaagatgtgcgggacatcctcaccccaattcagattgaagctgcttaccaccttggtcctcatgtcatcagtaaacgaagtacagaggaattcccaccacttcagccaattcttcagcagaagaaagaaaaagacataatgaaaaaaacgataaactttgcaaggttttgtgcccatgaaaattgttctgctgatttacaggtttctgcaaagattgggtttttgaagccccatgaaaataaaacatatcttgctgttgggagtatgaagacattgatgttgaatgtgtccttgtttaatgctggagatgatgcatatgaaacgactctacatgtcaaactacccgtgggtctttatttcattaagattttagagctggaagagaagcaaataaactgtgaagtcacagataactctggcgtggtacaacttgactgcagtattggctatatatatgtagatcatctctcaaggatagatattagctttctcctggatgtgagctcactcagcagagcggaagaggacctcagtatcacagtgcatgctacctgtgaaaatgaagaggaaatggacaatctaaagcacagcagagtgactgtagcaatacctttaaaatatgaggttaagctgactgttcatgggtttgtaaacccaacttcatttgtgtatggatcaaatgatgaaaatgagcctgaaacgtgcatggtggagaaaatgaacttaactttccatgttatcaacactggcaatagtatggctcccaatgttagtgtggaaataatggtaccaaattcttttagcccccaaactgataagctgttcaacattttggatgtccagactactactggagaatgccactttgaaaattatcaaagagtgtgtgcattagagcagcaaaagagtgcaatgcagaccttgaaaggcatagtccagttcttgtccaagactgataagaggctattgtactgcataaaagctgatccacattgtttaaatttcttgtgtaattttgggaaaatggaaagtggaaaagaagccagtgttcatatccaactggaaggccggccatccattttagaaatggatgagacttcagcactcaagtttgaaataagagcaacaggttttccagagccaaatccaagagtaattgaactaaacaaggatgagaatgttgcgcacgttctactggaaggactacatcatcaaagacccaaacgttatttcaccatagtgattatttcaagtagcttgctacttggacttattgtacttctgttgatctcatatgttatgtggaaggctggcttctttaaaagacaatacaaatctatcctacaagaagaaaacagaagagacagttggagttatatcaacagtaaaagcaatgatgattaa

SEQ ID NO: 346 - protein, 1008 aa, Homo sapiens
CCCCAWGSRPAAPTTWTLRARCFTRAPTTRCSATRSCCTATGRTDAHVHVSRFRLLVGAPTANWLANASVINPGAIYRCRIGKNPGQTCEQLQLGSPNGEPCGKTCLEERDNQWLGVTLSRQPGENGSIVTCGHRWKNIFYIKNENKLPTGGCYGVPPDLRTELSKRIAPCYQDYVKKFGENFASCQAGISSFYTKDLIVMGAPGSSYWTGSLFVYNITTNKYKAFLDKQNQVKFGSYLGYSVGAGHFRSQHTTEVVGGAPQHEQIGKAYIFSIDEKELNILHEMKGKKLGSYFGASVCAVDLNADGFSDLLVGAPMQSTIREEGRVFVYINSGSGAVMNAMNLVGSDKYAARFGESIVNLGDIDNDGFEDVAIGAPQEDDLQGAIYIYNGRADGISSTFSQRIEGLQISKSLSMFGQSISGQIDADNNGYVDVAVGAFRSDSAVLLRWVVIVDASLSHPESVNRTKFDCVENGWPSVCIDLTLCFSYKGKEVPGYIVLFYNMSLDVNRKAESPPRFYFSSNGTSDVITGSIQVSSREANCRTHQAFMRKDVRDILTPIQIEAAYHLGPHVISKRSTEEFPPLQPILQQKKEKDIMKKTINFARFCAHENCSADLQVSAKIGFLKFNKTYLAVGSMKTLMLNVSLFNAGDDAYETTLHVKLPVGFIKILEEKQINCEVTDNSGVVQLDCSIGYIYVDHLSRIDISFLLDVSSLSRAEEDLSITVHATCENEEEMDNLKHSRVTVAIPLKYEVKLTVHGFVNPTSFVYGSNDENEPETCMVEKMNLTFHVINTGNSMAPNVSVEIMVPNSFSPQTDKLFNILDVQTTTGECHFENYQRVCALEQQKSAMQTLKGIVQFLSKTDKRLLYCIKADPHCLNFLCNFGKMESGKEASVHIQLEGRPSIMDETSALKFEIRATGFPEPNPRVIELNKDENVAHVLLEGLHHQRPKRYFTIVIISSSLLLGLIVLLLISYVMWKAGFFKRQYKSILQEENRRDSWSYINSKSNDD

SEQ ID NO: 347 - DNA, 54669 bp, Mus musculus
  misc_feature (1)...(54669): n = A,T,C or G
cagtcgggctgagactagtctgtccctcttgggccttctcaagccactcagcaattgaagagctcatatctcccgctaacacctatagatacaaggcagtatttatttgagagaggattgcgtagctcagttggcagaatgcttgcttggcatgtttaaaaccttggcctgcataaagtggccatggtgacacagagtcgcaggcctagcactgggaggcagaggatttggtgtttatcatcaggctgtgtattgaattggaagccagcctgagctacatgagacctgtctcaaaatgaaatgcaagtaaacaaagaaatcaatcaatcaatcaatcaatcaagcaagcaagcaaaaacaaataaaacaaaaaaaagccagcggcagtctttcccttccgttcggaactctaaggacctgagacagtcttctctaagctgcctggttgtgttttgttctaattttactagagttcttttgaaacactgccaagggctcttcaggtgagcccagctgctcccctccctacccccttgctctcactggtttaaactacttctctccagagctctctagaacaagctctagaactacttctctccagagatctctaaaacaagctctaccagcctttgggcaaatgcccactgccatgttattttctcccaaagcactggtgtctagcagaccagacatttctacttccttaagatgtggatgactgctcccagctttggagggaaatttgttttattgttctgtagttttcaaatcgtgtgtgtgtgtgtgtgtgtgtgtgtgtgtgtgtgtgtgtgtgtgtgtgtgagagagagagagagaggggnnnnnnnnnnnnnnnnnnnnggagagggagagggagagggagagggaggccaaggttcacaagctcagatgtatgtctttgccttccatcttgtttgagacacagtcccccttccccctgcatacaaaaggctgtttggcctgagaaccattggggactcctgggtctctccttgccatccctccattggagcagtggggttgctggtgtgttttgctaagtcaggcattacaagggttctggggatccaagctcagggctccatgcttgagagacaagtcctttacccactggcccttctccatagcctggtttctatagaaagggggtggggtgagtgggaaaagagagaggtggaggaggggacagtgagaaagagacagagagagacagagagacacagagggatagaacttttcctgtaatgtcatgaaacccagcaggccccttgagtgtgaggctttctttcctcaagtttgctcttctgacacattgtacggggttggcttccacagcaatttgtctcattaagagaaagaacaaaactcttattcatttttattttgttgtgtaccctaaatggaaaggttacggctagctttaaagtgagaggggctaaggctaaccaaacaacctctatttagagatgttttcatgacagcatgtcctagttcaactgttttggaggaaaatggagcttgctagtgttttggacatccggaaaaaaaattgggcttatgacttgtaacagctggtgtttgacttttcaaccagggtatttcagagaagaatttgttttgagtttttattaaaacaacaaacagaacataaggcacatgttttgtttatctaggggacttcgtctagactggagggagagtttttgtcttgctgtgagaggtgttaaattcctacttgaggagagaacaccttaggtctccaaagattcagttccttcaacaggtagaggatctcttaactcacatctcacttaccctcccatccatatgctaaccccaacacacctccttcactgttggaacagatctcaagtgaatgcacccttccacacttggggagctggagtcagcttccatttcttcccacacttgaccactcttcagagacagctaattagagacaattgtgtgggtaattgtagattctaaaattatcaccagttaattccaggccttggaaacattcatcatatgttaatcgtgtgactgtgagagatttgacttttaagcaggtttcagttaagaatccaagcttattcatgtgctaactgtgtgtcacagtgcccgttgtcacagagtgggaccaaacacagtcacatcaagatgcaagaggcagctatcttgataagtcacacaagaaccatcataattctttaacaaacttatgtcgtgcacactatcattttacatggtctgacccagtacaattatctggatactgttaggcattttataactgtgattgatctataaatagaaacaaaataagagaaatttataacttcatgagtaaacattgtgtttaaataaatttaaaagtttaaggttatgtaatatagctatatgggaaaagatctaactttgatgataaattcttctatttttttaaggacttcacacacaaaaaaagagtattcttttacccaccaatcgaatggtcataattaacacactgtcaaatctacgaagtctttcttcatgagaagaattgaattcttccgattaagttaaagctctactggcgtcccacacccaggctcagctggacccagaaacaggcattctctcagccctccagagaaatgcaggtgaattctaggatctgttccttgtgagtgagtgagtgagtgtgtgggattgtgtgtgtaaggacttgtgtgtgtaagtgtatgacgtgcattcaatgctgtgcttttccatacatagcgtcatccagaagtactgtgtggatgttggttctactgctgagatgatgttatccacatgtcaggatgaagattggggcattttcacaggtttagtatcacagaatcatctagaagtcagtgctttagagaaactgttcagttgatttaaaaggtgatgtaatgttgtgattggctatatgactataagggagaggagttcttgggtatgtgcttttataacaacagcatttgctaattgaagaagccctttgaccaccataattttgtgaggtctaatagattaactaaaaaatgatttctggtaaggtattaaacagtttattcttttattaccttagacattaaataagagcataataatattaccagtattagcaatatttagaaaatttcaatgtgtcagcagtatctagaaaattctactttgtcatttcatcaagagtccttagtttgcactatctgtcctcagcatttgatgacaagttttacacctataatgtcaaggtagccctcacagagttggccctgcagggataataattagcaagtcaaatcaggtagcacttgaagtcctgcgttatattcgggtcttggacaactgtagctttgctattatcattcattctctctgggactagatttcttcatctcagaaatgctttgattgttggcatgaggagaggaaagatttgaagagatgaaaattaatattccttccagctccaaaaattgtcttattctattattcatttctcctttcttccttcttactctgtgttctaggacatagagtgatcattagctaaaaaggaagggaccttgtagaaaaatagcaaagcttattgtgaaaggctaaaagtacctcacatataaaactctctcgtcatccctggtctcgaggagagtttgatgtagtccaggacatgtgatatcctgtctccaaataaagcaacgtaaaagtattttcttcttaattcactttaaagtcaactcctttagaagaaaacagacaaatcctgcctgcatagaagtcacaaatagaaatatacctgaaacatccaatgatgaatatccatctgagctcatgcacggttacactccagctcaaagtgttgatgcactttagctcatgacccatgtttattaggtgcttcttcatcagcacagaaaagtatgctattgtttattgcatgaccaacagagatgcctgctccgtgaccttgtgatcatgtcaagttacatcagcttttactctatatagagagaaacactgtcttgtgtcacatgtagctactctctacggatatgaattggtatgtgcaataataatgcttattaaaggaaatgttttggcagttcttgtctatagtaattttttagaatttttacatgtccatgaaggaattgaaaaaaaaactatcctttgcagagtggaatttcccatgctgctgttacattctttgtggaacattagggcctttgagataaagagctgcaagggccaggatctggaagagacagtttctgaagtgatcttctgtattgaagtccctcctcacagggacgaagtcttcctttgcaggctagttatgctctcagagaatgaattgcctatcttctatcatggctgctgtcacactgaatggctctcagtgccctccctaaggcagttcaggagatagggaagcattttacaaactgacacatgttggtaagtgttgagatgcctgttccaaggccaccctggccatttgtctgaacacagtagtttccccaaagcagcaggactcattttatagtcatcaaaggatttatggccctgagcagggagttagaatgagttagaatcacaagtaaataaattttagatcctgccttcccttcgcttcttaccatgctccagggatgtgaatgtttggagccccctgccccacatctttgaattactatgaaaatagaatagaggattccaacctggccatgctctaagctaggttggccacaggcggactttccttaggtcaaagcaggaagaggacacaaaaccaaagcacgccaagctagacctccttccccttctgttataggtccccagacaataaggggtggaaaggcatggaaagcaacactcaagaacaaggaaggaaataagggatttttctctaggggtctagagccaagctcttatcattgccccaagaccttggcacagcaactcatcttttcgttgctatagagtaagagtgagagtttaagatctgtaagggatttatgaaatagccatgtaagtttcccttacagagggccccagggagggagcttcatgatctccagtatcctggccacacaactgcagtggttctccctttgtggtgtgtatgagtcgggggtgggaggaggagtgttacatttccttcctgtctttaaaatctgtttgttgtaaaataagaaagggctttcctttctttaacaagtagtggttcacctgttaaatattgtagatttccgagttttttttttcttattatgtttttcctgttgaagaaaaaaagtattgcatttgtatgtcaccaagaagcactttgaatactctataggttaagaagcagtaaagtgacattcagaaagtactgggtgcagtttatcaatagtttatctgttcattcttcatgactctgctgtataaaattctcacagtcttttgtcaacatgcacgacagaccgtgtaaagcatccttgccaagtgggtttagctttaccttccttggtttttaaagctggatgaacaggcagtgtgcaggctcgctgatggacaacttgggcctttgtttctttccatgtacagattggagctcaggttccatatcttcagctgtgcatacccatattccagaatgaccgagagaacaataattgtcaaaatgtaaaaacactgaggagttacatggctatttcataaagcccttacagatctgtatcaacccagactatcagaagtctccaagggagaagagttattcacaatactaccgagttgtaaagtctgggaacctcaataaagatgggtctgggcctggcaaaatagttccaactttgcaatagtggcacttatatcttgagggtaaccagcagctgtctaattgaacctaagggcttctcagtaggaaggaccttatgcctggtaccatgagcctagccaagaacccatgtctggagcagtcatagactctagaggagatccaactacaatcattttgctaatctaatatttcttctaaccatatgctaaatatctatccttactcccatagataattaccagtcctcaccctcatcagataaacttcattgtttgcagtagatgaataatatggcagagatcctcaaacaaccaaaatgtaggaacaaatgacgaggtccccagctcacctgggacacctcgcacctaaggggaccatagcggaagaggaaacagaaagcttgtaaaagccagaggacccgggtgactgctgtgaaacactgccttctacacaacaggaagcctgcactcatgcactctcaacactatggcgacccacacgagaccatacaaatgaatgtgttaacatggatgagaaaaatgtcacaaggtctcagtctagaagaaaagctacaggcagtctatgagtggctagggaaggaggttaggcttaggtttctcagtcctgaggggttagctgtgaacactcgcatgtggacactaattggactctacagattgttgctctctccctctctgtgtataatataataatgcttcaataataatagacaaggtcacgaacacaggctggggggtcaggaggagttggaaaaggaagcaggataagtggaaataatataaatgcagtatactaacttatgaaattctcaaaaataaacaaaaaaagagaattccaagcaagagctgctcgtctgattcagatacctgcagcatttccactgtaccgactttatgatacgcgcccttactccttttcttctttgatcttgagtggtgtttctggcacctcattttcttttacctcaggaggtttgatatttgaacatggttctgttttcattttcacttaaggttcagaggcctaaatgagatagcaagttgtaactaatggaattaaacttgcatctattttaggctaataataataattgcattgtgagaaaacagcttgtttctaacttaaatgcacatcttagacttttaaacatccttcgcaaactcgcatgagtgattagtgccttactggaactggaagaatgagagccctggattcgggatatgtggcttctttattgtcctgagcctcattccttcttgtcacagtgtaagtaatggtacctgcctcttgtggctttgttattgattaaacataacacaatcagatgtagcacagatatggtaaaccattcaacagtgggtaagaatgtgttgatgacagcgatatatgctaacatggatagattatcaaaaaacagaaggctggagagatggctccgtgtttaagagagattgttgattttgcaaaggacaggagtttaaattccatcagccacatcaggccgcttactgctcacagccctgtaatactagctccagggcatggagtctttttggtctttgcagggacccatactcatgtacacacacacacacacacacacacacacacacacgtaaataaatctaaaagagagaagaaagaaagctaaaaacatgtatgttgggtcaccatgatgactcagcagttaaaagcacttgctatggaaacctgacccttgtgttccattcctggaactcagagcggaacttccaaaagttgtcttcaggcttccacacccatgctgtagtgtgtgcatgcgtaagtgtgcgtgtgcacgtgtgcgtgtgcgtgtatgtgtgtacgtgcacagacaatggctctcacacacacattatgcacacacacaacaataataaataaaacaaagtgaactatttataacatcacaagctgaagaaaacatatcagtagagattgcacattgacatctacgtaaataactcatgggacccgtcaatcaatagcatcattgttctgaaaaggtgggttgaaaaatactctgactatagcatgatgtaagctgggatttttctttggaaatgaaagtgccaaaaaagaaaggaagttggacttgtaccattcatgatgatatttgcacttttgcacgcctgagtattagaagaggcataggacaaacaacccttccttacatagctatacagtccctgtgtggtggaagtgcaacacaggtcactatcattcagtgctggaatgggattctactctgaagacttgatttgcctcaacatgactgttgagtttactaatatttgcatttttatgttaaacacatgtgtgtgtgtgtgtgtgtgtgtgtgtgtgtgtgtgtgtgtgagaagttgacgaattcagttctttccattcaccgtgtgagtatacaggggttcagaggcctacagtgccttgaggagggtttcacaggtgtctgtgtgatagacacagggctatggttaggaatgctggctcctaaggtgtatccacaactaatagttttcacattggagctagaaggaccctgaaaggccaaccagaataaggtaaaacagtgtcaatatcatagtggtatctgctttacatttttagattctaaagtgaacatttcatcttttgcttagcagcaaagacttcaggaagtaaaaaggcagctgtctgggttgccttctcagcagtcttgagagctcacagatgttacaaagggcttttctggtggcactactaagaaatactggtttagttcagcccttttagtttcttgctatgtgagcaggaagagtgtgctttgcccagtgtcatatggtctacttgttaattgactcaggatggaagtcggctccttgtgtggacccattctccttcacagaacagacaccagagataaacaaaaggctcagggtttttagaataaactgcggggcttaaggagaagcatctgtagaatatgcgtaggatagtgaagcaggaagtatgagagagacagggaccagccaagaccagccaaggaacatgaacgttaggttaaaagaggctctttccatcccagagagaagatgcagggaccttagaggaggaaccgtgttgctccatgttaataaggccaattacagtctatgggatggtcctacagtgtttatgtatgaacggaagcttacaaagcctgcttttcatactcagggtcacagctgcaaagtctccaaatcttgtgcatttccccccatgggtaaggtatctttatttcaacttcttcccttacctttctatcacgcgtaggagagtattgagttcttacctctatatttatttttttcttttctaaaatagttatcaggtattcaatggctgattcaattaagtagctgtctacaatgataaaaacaaccttcaccgaggaccagccttacacactagagtatcttcctttcctttgcgaaagttctaacacctgtaattttacatgtggattgaatagcagtttatttagcgtttgccctccaggagccagtaagcttctgggaccagccggttgcggccaccagtgtgcccccagcgtttattacaatacccaacactcagcaagtgcttcgtggttcctctcagatctcctccgaaagttacacggacagtaaccttcagctcataattatgataatagatactgtacaacgagtcgagccggtatttacaggtagagcacacaaggcaaatgaatacacactcggcgacacatgagtgcacaaacagccgcgggcagcgacacgaaggaggaaacgcgcgccggagtgggccctgcccaggctgcggagacccgctgcgccagcaagccagcctctgcagcgtgggtgggtacggccgcagcgtcacgggagtccctacccgcggaaccctggcaagtccccgagcgcccgctgcagggcggcgtgggcggagagctgcgccacgattggccagcgcaggatgggcgtggcctgcggcgggcgggggcgtggcctgcggcaggaggcgggcatttccccagcaagggggtgtgcgcggctcgggctggagtttcagtataaacaaggaccccgactggatcggcgggttttccctttcttctggcgttcgacccttcccggtcctgagctcgccttttggggcgcctcggtacggcagccaggaggcagaggctccgagctgtgtgcgggtaggtgctccaggggaccccgcggcgggatggcgggagcgggctgcgccggcgctgctccggaacggcgccggctgtccagtgcgccccggcgtggcgggagatcctcggctggcgagcattggcagagccacagaactaggagttctcgcgcctgctgcttccgtgccccgggctgccgcgctcccaacaggtgcggggctgagcactgacgacccggggacccggggatctggggacgctgtgctgcgcctcgccccggccaggccttctgtttggagatcttagatattgagggtttgtctgagttggagtctcgttcatcctttttgctttccctctcagcttcttgtgcatacctagggttgtttccatgtactttttggctagtttcctagggtgcttgagagtgttcaggctgttgtttattttttgctgcagtttccttataatttaaggtctgactcccaggaacagtcagggaaacaggacttgtgtgttccccaggctcgtatgcaaacttgaacaagtagcctgttttttgttttgctttgtgacccaggtgagttgccttcggacactagcctgggtgataataacgtggcccggggtacctggtagcctcgtgggctgagtgcgtgagggaggctcctctttattggagagccccgggaataacttcagcagcactgtactagagaaaagggcaaacgcggaaacggaggtgttctctctcgctctctcgctctatcgctctgtctctgtctctctgtctctctctctgagtgtgcgtgtgatttgactattccttgccaccttaccccatccaaattggttcagttcaggcgaagcactgtggctaaggcactgacagtgcggcgaggtgttctctcgcacagcgtggtaaagggcgctaggagagcatctgggctgcagttttctcttgtgaatgtaaatgtgcccgtttgcagatggattcggggcgtatggtgtatatggataaatatgcacgcatacttgtgtatgtatgtttgggtgaacgcgtctccaaggagtccttcgtcagcagcgccatgtgacaatggcctggaactgctggtgtgcgtagagctatatttagccctgacagtgtctcactgggaggacgggtcttgagctgggaggataaagcggggaagaatccaggaataaggttatcgagctcttgactgatgtctggcgcagtcagactcagatggtgaataatgactcctcatgagtgcagtagctggagcgtggcatgtgatgactgctttaattggacatagttgtgaccagggtggtcagccaatgcgaagaggattaaacaaggagatttaaaaagagaagatagtgtgtagctgatttgaagatttaggaggagagaaccggtcatgtgaggttcaaagtgcacgaagaattgatttcttaaagggaataataatagtaaaaaatgtttggctgttgaggatgcagagaaaataaatgacagccagttaaacagtgttatgcactaaggacagttttgtttggggcagggagcaatgtttgagttactgaggacccagggcattttttgacagaagtcagggctcagcaacagccctggctgcttttccctttcaggcagatttgctggcacgtgagataacatcagcctctggtgagcaagtcgctctcctgtgtcaggcaagcctttgttttcctggaggtgccagcccttctggctactaaggatcctggcctaggacttccttatttcagcttttcagctttcctgtcatgctgcccgaggtgtctgtgctaccacactttggacctggccttgtgggaaggtcctcagcgggatgcatctgcattgccattctctagcgtcagcatctaatctagtgtaccctgaagtatagatagctgaatatcgctgtggtcattgctcagcataatactcctgtaatgtcattaatatctcattcttgtaacattaacttcactgtttattagagcaccataggccaaatgaaccaggtaaaaattattcctctggagggaagaaggtgggtaagagaacagagagtgatgtgggcacatggacctgtgtaggccaagtagggatcctagtatcgtatagaaaaccatgggaccaccctgttcactctacagaagttacctagaagaaatgaacctgaacattccgagggggaatacttaggaaggagacagggaaaggaagttctcagctttgcctggaaggagaatcgggaatgccaagcaagggttggagagacggttaatactaatggcacagaaacctagaaaacaaatgaaacagctttaaagagatctgtgaagtctttcacattggctgattgtcctggagaggatttggtggtgggggtggtggctggggtgggggtgggggtggggggagaggggtaagtaattgaatttaagtattatctgactccactcctgtcatttttcgagaactgtataactatatacggttgtccatgcttttattggctcatcagttaaacctacaaaaattagatatgtatgggcattgactgctttggcttagcagacccgccctgggaatgagtctgggcagatggggagccctaaggagacccctgccctctttctgtagttgtgatatctgtgacgtggacacaggaagttaaaggagatgacttagggggcctttgtatgcctgtcgcagctgttttattttgttgcaacctcctacctccgtcgatgttaaagtgggccaagccaggatggaggcagcctgtcacatgggcaggtgtcttctgagcacatgaggatgaaaagggtggccagcattcttcctttggtgaacttagatagggatttagtagtttcttgagttgtcttttccttttctttgttgtgagaatattttttaaaaaattgaataattatcaataaggcggggtcagaaaaaaaacatttcagctgatgaactcactgttcttttcaaccaggtgccaacttccctttcaccaatctgttttcatagacttatatatttattatttcctcttaaggtgaatatatatctagaaatgatccagttgattgaaattatgttagagaaccctggtgtgaaatttgggcacaaaaagatctagtcatgtaaaaaggaaaacactttggaaccactttgggcctctttcaacttctctaaaagacaaaaattgaacagagaaaaacataggttttcacccccccccccaattaaattgtcctattcgccgtgttacataataaaatgcaaagaaaaataatcttgcctttttacagatatctctgctgagtattgacccatttccctattgaagtgaattagacacagagaaataaaatatttgaataaaagttatcccccctatgataccttatgatttaacttcagatctatcacatatctttcataatctgcagttcatctgttcggtttaataggacagcttctagctgcatgaagatattaaaacataaatatgtttgaattgaacagaattactggtttcccagttgtcttttcccctctatttctttctgctcctcactcttgtgctgggatgaacacccccccaccccccgccccgtacattctgtgcaagagctgtgccaccaagccacccccagcccacaagccagtgtgaagtcacaggcactgcagcctgtggtgaccatcagacaatgaagaagaggctcttctcttaggattccagccctggtggcaacacttgattaggtaatggtgattttggagatcagtcttattattctcagtgagataactgattctcaccacagatgggcatcgggaaatagagtggatgggtactgcccactaatttatgtcctacttgttccccaagctcagtcgtgtgctcagaccctcacatcccctgtacagcagctgcccttcccttgtttttataaaccagctcaagtgctggaaagcaccagctctgtcaaagacagggacccgagcgccacctactgctcagctcgagaattgcaagggcgctgtagaggataaaggcttttaaaggcatgaaggaagtcagcctgtcctggcttcccgtactacaggaaggttttcaatgacactccaggcctcttcagagtttccatgtacctaaatgtcattttgtgctttagtaaattgctaacaccatcccatgacaaaagatcataactctaacctttttcttccaactgaaaatgttaactagttgagtcagaattcttttcctttgccagttggggactaggaaagaaagaaaggaagaaagaaagaaagaaagaaagaaagaaagaaagagagagagagaaagagagggaaagggaagaaaagaaaaattctaggtaacttaagggtctttgtgtgtgtgtgtgtgtgtgtgtgtgtgtgtgtgtgagcggggggtgggaggtggggggcatgtaacaaatcagaaaacatccccactcctttgcagaggggaactaggcccaggtcccagcacccctgctggcttatagatgcctataactacgttccaggggacctcacgccctcttctggcctccttgggtaccaccctacatacacattaataaaaaaaaattaaataagtaatctttctagggtttccatgtactctttctgctctcagctacttgccttcttaacaaaataccccttttctaaagagggtcagtggtgccgtagcctgccagcgttttccacggatgctctctgaggtctctgctaaaaaggcttctcagtctaaggaaaggagggagaagataaccctctcaacattcccgagcctaaaaatacactgcgctcaggtagcatcagaagcttggcttcgtctgtccccccccccctcccgctcagatccactgtcacctggatctttgctcagcctgcgtccccaagtctggtgttaccgaaaggaagctgtcagtctcagctagaaggattcaggaacttgtccccagcgtctgcagtgtcaactgagaaaacaaagagttgctgactatgtaaggtgcgaagttcctttggaatctagatgggaattgagaaaggctgagttccaggtttcaaatgaactctctccccactgaacaagtgtgctttcaaggtttagctgagagaaggagatctttgcctacttacttaaattgggacacttgtctagcatttaggctgctgctaaaacactgtaatcatcgccgggttgtaaacacctcgttcctgttatgacgcggagcagaaaatgtgtttctgtcttctcttgagagtgaaggagacgctgacttgctggtctaggaaagatttgcgaagcatctggctcagaaggaagggatggcttttgagttttgatgtcaccccacacccttctgcactgccacctcctctccagtgtgagttaccacctgaatccacctcggcccccgtgcatctgcttcatcataaataacattgtgcaaaagcagttgctaattcaaatccagtctgccgctcagggaaagagggcttttcatctggagctttggctggtctgaagccattagacatgcctttcagacccattcatcctgtaaatcacccacggcctgctcccttgcttagggatcaatgtcaggccaaacttcctcagggtccttggaagtacatgatctatttttgtgcccaaattaacagcccctgtaagatgtctgacagctgagttcagcttaccaaatcaattttaagaaggaatattcgtcttctctgcctgggttgggcacgtcacattcctcctagaaacttttccagcataatgtataatctgtgggccagtttcagtggccaggaaggtattttttttctttagcccagtttattgttttataagaatgtcttttctgttgtcttactgtgctgtctacccagagtgatgcctgttaggagcagggagcctatttcagggactctgcctcaaagacgagtcatttttgtgttatctttaactcagttgaattggtacccccacccctacacacacagacacacactagcttatttttaaaatgccttagctatctcaaaggctgggcactctcaaaacttcccttgctaccccaggcccaatcaggaaagtggccagtggcccctcacccgaaatttcacatggctcattggctcttgctcctgcagctctcctcctctggcgattttcccctgttcctctctgcatcccagctggcgcaactctaagggttgtcattgtcattggcatctttattgattgatcaaaaaaccaactggggacaaggacctttagcatttggacacgcagattcctgattggatcaaagcattagaaccaagctccaacaggtcctaaatgtgttccaggaaggttctctgctgacccatcctaacttcttgctttggagtagacaaaagacatgtagggtctgtataggacagctctgtgtactggacagcaactccattagtatatatgcagacacgcaggtgtattcacataaggatagtcagggagaggaaggaggtctgtacaattggctgactagaatgtgccttgagttccaaacaaccaacttagaaatgaaactctctagagtaagagttatttttccagcctgcgatatatgttaaatggtgatttgaatagtcaaccggtttcttcatgtctcatacaagtctttttttcaagggaattaactcttggtgtttgacttagctataaatcaagccaggacttacccaagtgcttttatacactcacattttggaaatagacatcggtccccatttataggtgcattggacagggcagactttgtataaaagaaaaggagtggatcatggagggctggctttgtgttaggaggcctgggaggggtgagttataagcacatggactgccccctcccaccccccaccagagtcatgagaactgtaaggaaggatggtggctgctgagaaggcaccagacctgccatgagatagaaagatgactggagccagaggtaagagcagcctgcctttgcctggatctgcccagaggagtcactggcacgttgtccctgggcatccataagtctccaatgaccctcatatctggtgcttttgatatggatattgttttcctagcaagagacaatctcatttcatcatctggtcctaagtcttcaattccagaactgaagcaaatccatctaaaggctcagatgtggagtctgggtgttgttgaccagtagatcacagtactaacgatgcttgaggaaccaaactgcacggcttatcttcttaggtgtataaactcaagtttccaagcatctgttccataccacttggctggttttgtgtctatgtgctatagttcgcctttcaggctaactggcagttgtctggtgcttggtggacacgaagtcccgtgatctttcatattgctatttggctcattatatatatactttccttttgatggcaatctgtaaagttaaatacaagaaaatccctctgtatttcattgattccctgagtgctacccaccatgtaatgctgtattatttcataggctgtttgaataactgtcaaccaaaccagtttattctgccttgacacgtcccagtggagtggttgtcgacaatccctttctctccatttctaccagtcttgttttctgtggaacttttgggaattctctctctgcactggcttctgggtggggtcaaggtcacttgagttcaccttgttgagtcctaggtcacattcatagaaacaggagtttggatgggactgtgagagcaaatggcttattctatgaccatcctaccgtggtcataatcactcaggctccagatcctccaggcttgcccttgatcctccagatgactgcttctaactgattagagtttgaaaagaaatctagtttctacctcctgaaacagacggtttctctggcccctttgaatggttatcattttttgattttctagagttcacaagtcctggttaaccatctcccagagacacttgagtagattcattccaataacaagtgaaagaaatatcaaggaaacttcatggttctgggtagaaaaggtctttgggggtttttattctttattctgtgtggctgccacccctggaaggtattctaggacaccaaactggttttgattagggacaaggtcgcatcataaagcttttttctctctatcttcctgtctttctctttgaggcaagatctgtctacatagttctggatatcctggaactcactctgtagatcaggctggccttgaactcgcagagacctgcctgcttctgccttcagagtgctcaggttaaaggcatgtgccaccacgtccagcacttctgtatctctgtatcattcttgattcttgtctttcctagatgctgttttcatttgccacattggctttatagcctttttcccaacacaccattccttgggcatcacctattcaaccccatgaacccaaccacgttctgaggcttctagctcatcccccacatgcctaggtgggacagatgctgtgggagaactgagctccaaccctagatgcgatgcaaatacctttcagcatcttgaaaagaaggattagtccaggttatgtccccttgcaacctccacaagttgctcccagtcagtcctgagcccctgaatgtcctgtgtcctgtgtcctgggcacaacatttggctttccttcagctctggaccccctggttccacaagtcctgaatgcctccattgtccagacacagccagaaacctgagtcccctcacaggccctgacctaggtcccttgaaatccaagtaataacttaatggcttctggcctgcattgagcagtgtctgacaggggctttgtgactgacaaaacacaccaactggtaggagcaacttatctaggttgggcggtactccttgttcttaaccataaagtgcctcctcaatgtcagaggctttgtacacgctatacacacagcacccccaaccccagatttgatgagaggtgcaaaggtcgaataattatctgacgatctaataaagatggggagccagcctcaagtctctcgacacttgacacagctggagtctggttcctctacgccttttcacgagtgaccgtaaagacgtgatgggaaaatgaccccgtgtgggtcaggactggatctaggcatttcatcctgtttggttgaacatatgcatgtgtgtggaactcagagcagtttggcttctcatgcttctgacagtgtgtggcagctcttttctctctttgcctgacttccgttataagaatgactgacggaatcttacctcttcataccatgccactgatcattgtgtttgttctcttgtattttttattcctcttaggaaagtatgcctcagacgccccccttctcagcaatgtttgacagcagtggctacaaccgaaacctctaccagtccgcagaggacagctgtggaggcttgtactaccatgacaacaacctcctttctgggtctctggaagcccttatccaacacttggtacccaatgtggattactatcctgatgtaggtattgctgttcctcaaatactcatcaactgtatggattagaaactgcagcaggctatgcagggacacagcctttgctgtgcagttatctaggttgctaagaattttttcgaagaagaaaatacatagtgattattgaaagctctaagaccaggggctggatgagcttatggtagagtctccctgtctgtttcttttcggttgtccacctcattttcggcggcctaaatggagcgttgcccgtagacttactgtgtgcctacatcttgctccataaataaaaatgccatcagggagaggattggctgctcctagaatatgacatgattgtagctagggaaaatccacagaaagagatgttacacccagatgtgatgatttatagattggccatcaggtgctgttggcttggcttcccttgatagcttataaggcacttcctaagctaggaaattcactgagtcatatctcagtctttgttccaagaggcaggaggggagacagaggtcaaaggtcaacaccacatgtttattccttggtttcctgtctgggccacgcgagttccccttccctgctgtgtctgaatttagaaggacacagaggttgagttttctaggcagctgttattgatagcgagtccatggaaaatacctggagaccacatttattagttttcataaatacaataataaccttgttgcacaaagcagagtgtgtgcctgccaatggtaattcaccataatgtcccttactgagctatctctgtgtgattcattgcatagcgttctcaaatatgcccgcacccagggaactatgttatcaaaagtaaaaagaatcctgtgttcagtcctgtaagtgtttatgaagcactaaaggtgcctgaggaggggtgggggcaagcaaacagtccgtggaattcctctttccacggggagcctggaactgtagaacaaataagtgccgcttcaccaccagctcctcaggagacagtgtggttaaagcaaagtagtgttgcattgcccttcatccgcctgcttagtctggagcgagccacttaggacggttgcaagtcagcctttgaatgttgtgatgcaaatactgggtattctacgctgaacactccggagagttcttgactgaatgggaatagggtggtcggttgtttgtttgtttattggttacgggagatgatatctggacacacaaccttattccacgtgggcaacatatttaaggcagttctgcctctctgggctgaatttcagtattcttgattacaacaggaaaaggaatatgtcctgcctcccgatgacccataaggaaatgtcctctggattagtccaggcattgaatttatctcgtttttagtgtatgttaagggaaaggatctgaggctgcttattggcagatgtttagcccgacctgcagcctgctaacttcgatgtagaagaaggttgtaatatgcagggatggagttcagagagactgtaacggtgacgactcatttttttctctctctcttgctgcagaggacatacatcttcaccttcctgcttagttctcggttattcatgcatccgtacgagctcatggctaaggtttgccacctgtgtgttgagcaccagcgactgagtgaaggggacggcgataaggtaaggcgacatttgaatggttgttttcattaggctggctagctctggcttaggttttgtgatctctccatatgtgaccccccgctcagccccaggctgacggggcctaaatggcaccatgaccgtgcatatggaattgggaagggtgtgaagatcatggcgtagggctcagaaagtggttcagtgatagcctgcttatctcctgcttctaggaccgtgggttatattcccgggactgcaaaataaaaataaaataaaaagtacaaaggatagaataaaagtcacagaggaccctcagtcccaccttggttgactgcacttgatgcctcttccactccagagagtttgcagcactagacgtcagccagccacaccagttacttggttgtttatttatcgaggaccacagtgatggatatctctgacgcagatttccttttctccctagaaccagatgagaaaaattgcacctaaaatccttcagctcttgacagagtggacagaaacatttccgtatgacttccgggacgagagaatgatgaggaacctcaaggacctggcgcacaggatggccagtggcgaggaggttggtcaccgaaagccattggcacttccagatgaagcctaggagggacctgggttggattgccacagaacttggcagtggtttttgtgtgtgtgtgtgtgtgtgtgtgtgtgtgtgtgtgtgtgtgtgtgtgttgactttggacagccctctacatagcctaccttggccttttggcaggttgggtggggaataactaccccagtccacttcacatgagtgtgacctacagttctatggggttacttgagggcagtgttggtgctaactcaggatgtcaggtgtggtttgatttcattgcacctcagtctgtcttctgcaaaggtttgacccagctcacatattaatctctgtgtctgcccacacttaaggtagatacagctaaatagcgtgttaataactcttaattagaaatagacagtcccaggccgtggaggggaaagcacttatgctagtgtttagtatgagtgtagctggcaaggatggctgtggcttgtaaatacggaatcaaagggaaatacagctgtttacagatagtcagggggagagaaagaaacatactaattattctaggcattaagtgaaaaacttagaaatttggggccagtagaacatttgccagacagacataagtgtgatgatgtacaggagaaacagtaagcaaagcgttccgtggagggatttcgtgtcggaggcttaacatgccttttacagtgttcaccgtgaactcttcttgataaaagagagagggtgcactgttgtataattagcaaaggtgactcctggggctgggggtggcctgcaggagacaatccaaggattctggtgccggaagttgcttcaagggtaggacccagaataagtggagattcaaagtctcttaggtcatgcttcataaatatcacttacctcagctgagcctttgataggcaggtgctaaccggcttcaatagagtcgaggttatttgaagcaggcccggagggctaactttgtgtgttaaagcttgttgggcaagggatagctttgtagtttccgtgtggctgataagtttctgggaacaagtttggcacggatgtaacgctgtcacctagaaagaggcacctggcagtgagtgagcgatgtcccatttgtggagagatgcactgggcctccgtgtcagctctctggagaagtggttccctcagctctgtgctgcagagataacacctcaagacacctgacctgacccgtgtcactgtgtcttactgccattctcctatcctaagatccatgacaggaggcaaaaccagctcttctgagcacttagctctctcatatggttttaacccaagacttaatgctttcaagcttctttcctggcgccgtgaggaacgccccgctggctgtggctcttctgatccgtttgcctgtcttaggttcttcctgctgagaatgaaccgatgcagatggacacccacaaaggtgaatgtccaacagtgcagtttgccgggagcgttctgttagggatggcagctgctggctgctcggcagggcctaggttggctcagtggctttggcttatgacaaactggtcaaaggatgagtgccatcccagggctgtatcttctctgaagctaagatctgagtcacagtcaatttttcagtttggttcaattatacggagctatccatgctgccggccgatctcttctctgttgcttctcagagataggaactagaaattgcttctaaacttgtttcttcccataaaagaaatacatggttattattattatatttaaagatctattttagttattttatgtctgtgagtacactgttgctctcttcagacacaccagaagagggcctcagattccatacagatggttgtgaaccacgatgtggttgctgggaattgaagtcaggacctctgaaggagcagtcggtgctcttaactgctgagctatacttctagactttattattattattattattattattattattattaattttaaagataaaatgcagtgatttgaaaatgccaaattgatggcttttggtctttcttatggaaataaaaaccatagtgtttcttttcatttgtttactgagatctggtctttatccacaaggtcacagcttcaggaattgggggaaatggaggaaagggacagacatcctctgaccccaacttctcattgatgttgatacgcttgtgttaacagcatggagaggtcagctggctcattagtaggtaaacaggatttactggggagtacactgaacgcatgtacatggaggacatgcctgccttcactggccagggcttcaggatagctgccatttcttggctgcttttatccagaatttaggaattggctccacacataacagttgcttgatttgggtgtgttctggctagtcctctaaattcctagttcccttctcattccataaatcatggcgctaagtgccttgtgctaatgtgttaaaggcccttgctgcacttaacagtcttggcagtctccctgctatcgagtacctaaatttctcttctcagagagacctcccacgactccaagtcacagaccctcccatttttgacttataccttttgtttcctggcactctagggcttgtagttcattgtttgttgttccattggactctagtcactttgttcacgatggtttctttaactcctatttaatgctgggcatgtacttggttcccagtatatttgaatggatggatggatggtggatggacggacggatggatggatggtggatagatggatgttggatggatggatgtatgttcgatggatggatggatggatggattgatggtggatggatggatggatggatggatggatggatggatggtggatagatggatgttggatggatggatgtatgttcgatggatggatggatggatggatggtggatggatggatggatggatggatggtggatggatggtggatggacagatgactgaatgaacaagcaagtcaattatgagaatggggaaacattattcctcccagttgaagaatccttggtttgaattgggacctgttgcttcttgcctctgacttcaggggatattttctttttggcaatcggtgagtccaggtgtgccctgtgtataatttagtcaggttctttaggatctgctaggacagttccacataatttgacttaatgtgcttctcccctggggatttgccccagatgaagtggttttattagggctcgcctgaaagacacacaaaataaaactaatgattgaatttcatgacaaacgaccggagtgggcggcatgcaatttcccttccttaaggggctggcctttgtaataaggacttcagcctttatttgccaggtaattactgtcgctggcaactgaagttataaagaagaataagtacatatttagcaattcatgactcagtgaggaggcatgcttaacttcacaggacctgatttctcaaacagcatcagacgaaagcaggaagctttgaaaggggtcacagtaccccctctccctccctccctctccctccacacagatttcaatacttccgttgtgtacttttttgtgttatatcttgctgttggtttttgttcactgtgacttgcagttcccccaccctctttccaaacatgacatttttcagaggagaacacaaatctttcacctgataagcctttcaggagagctccgcttcctacccattgctgcctgccagaatcatctgaggtggatctgcagtgtgctgcgcagactgtgcctcatcccagttcaggcagaaacctgccccaagctgcagcccatcctgctcagcccactgggatttttggttttgtttggtttgtttgtttgttttgctgggaccttcaggtggtgaccggtagaaaagtggccattcccaccaaaagtctcttgagttagggaccctgagaaggtcgagagaggcgaggtgtgagatatagactatcttgtgtgggatgtaaaatgacgcacattttaaagatgagtgttttgctttcccaagtggaaaggaacttttctacacatgctccttacattagtatccaggaaagagcactgggctgacttttgctttatttacaataaatcgagtagtgtaggaatctgttctgactatcgagtaagaacatttacacagtaaacatgccagccccactcctgtgaacagcagttagtgatgccagctttgtgtgtaccttgctccttggctcagatgtactcaggcatggctgagctcacccataggaatggtgggcttagagaattcagtttgggttttgtttttgtactctttaactcttctcagaaaaatttgaccgagatgtcccttatctaccccaaaatacactttttatgtcagtaacggcagttgtggcctacgcttgtaactagtttttgttgctgttgttttgtgtgcgttggcattgggctttcctgtgtatctgtgtgatggttttgggactcctggagctggagctacagacagcggtggagcctccatgtgggtgctgggaattgaacccaggtcctctggaagagctctaaccactgagccatctctccagcctctgtaaataagttgtaatgactgcaaaaaatgtaacatgttttctactcggggtgccacatgatgtagctaacgtgtctaaaggagagtcatatattgggaactgttgcatagctttaagaagcagtaggaacacgcatgtagacatttataaggacgtttggtagagaagatcaaagtacacatcacaagtcagttctggtgtatctcagtgttgctagagaaggtgagcttgggctgggtataacgtagcccagtacttgcgtttgactcgtttggatgtcaagggaagacatatttttctttgagtgataaatacaaattaacaacctccaaccttaatcctcagtgggacctagattgtttgaagttttgtttgtttgctttttcctttggggggggggtgttgtttatttgtttgagactggttctcatgtatctctggctggtatcaaattcgaaaaaaaaatatatcttttaggcttacaattttcaaatttcgaaatgttggcagatgctactgggcaccttttaaaaagccattgaggagtaagcataggcttgcccgcatctgtaggctccctgggtctgtcctcctgtggagctatctgcctaagtgcccagctggcattgagtcagtctgcacggctcttgccaacatgagcatcataatttacctcgaaggatggttggctgttagcagttggaggatagaaaagaaagaccagaataactccatatcaaataactatactcaacaaaggaaggaaggaaggaaggaaggaaggaaggaaggaaggagaaagagtggttgactgggaagtcactactttgctttaaagagtgttttagaggcaagtggtcgacatttacctataatatatgaaatacctttgtaacctatgcctcctaagagtcatgagtatagcacggtgcagtcatcaatgaggtggcatctggtggtagcattgtggcgagagctgccctgagagagaatgccagtgaacatcagtactgacccgtgcacgggagggaatggacgtgagtcaagagaggtcagatgacaagagtgaatacccaattccactgtagatgggaaagatcaggaaggtggactagacagtgatggtgcattcttgtcacgtagctgctgtgcacttggcaaaacagggctggaaattataggcatggagaagccccgtaggtgactgtaaaatcatgggaagacgatgatccaccttgagatagtgaacagagacagtttcactagagcacgcttagttgtatgtagtactcattatgctggaccacctctagagctaatctgaagtttctgaggtgtttttgaggcccagcctgaattatatcttcacaagcaacctgagagaacctaggttattgaaacctaggtgtttagctgctagagctcagagcatttgaagacagggtgtctgaggcctcacagtgctggagaagaagcagggcaagaataccatcctcccttcacttcctagcagacgtaccggaagaacgtccagcagatgatgcagtgtctgatccgaaaactcgccgccctcagccagtatgaggaagtcctggccaaactcagctccacagccacggaccggctcacggttctgaagaccaagccccagtccatacagcgggacatcatgaccgtctgcagcgacccttacacattggcccagcagctgacccacatcgagctggtgaggcgctatctgctttgccctttgcagccacagctagtttgctttggcaaccagactgttggctgatagtaaatctcgggagagaggtcagaatcactcaaaaggggaaacatccacaaagcagccagagcgtgatttgtgtgggcatctgaatatggatgccgatatcccgagaatttactcgtaaacacaccctaaacaagacgggaagcagagtctactgaatctcttggtcttttttctgcctctaattagtttcctgttattggcttattatttccttcattcttcaactgtcttaggaaacattgacctaaggagagcattgcccctcttcacaacttgaagctgatgaaagtattcagggttaaaagcccattttataacctggtctgagaaacgcggggtagcatcaaaattaatagaggggagttggcatctgttttcttcccctttctttaatattttctgcttttgtcccaggagagactcaattacattggcccagaagagtttgttcaggcatttgtgcagaaggatcctttggacaacgataaggtaatcaggaccgagttgtttgttttcgtgttttcattagctgttttgtgattcatcggggtttgtcttgggttgggtctatacaatagtgcctatacaatagttctactccatcatttcctccttattggggaatttaataagcccttcctggccagcagacacagtgttggtgagagaagacgataagaacctaatggttttagcagattaaagccagaaagaaaatctaagagaacggtctgcccgcagttcagcagcaggagcagagaggcaggatgtgcaccaagcctgcctctctggccctgaaaagctccaggtggtctggcccctttctggaagtgaatctgcatacatgtaaagaccatggtactggacatacactatacatttcatgaacacatgaacacatttgccccattctagagtgacctctagaagcactttgagttgttaggctatctgcagctgctatatctactggtgaagtctctctgggagacaagccaacagctgtttcccgccttggtccagcttctctcagtatgggaagtgaggactgggtttttcaataggaggctagtggaatgttttgtttgtgtcttctgaaaggaaggaaagaggattaatgaacctccccaagcttggccttgaactccacgctaagatgaacagtgtggcattcaccctactcaagagcatcatggtgtagatttccatttatcttcgggtaaatggtgctccaaaattctgtattccctccccttgctgtgttgatagcaattggtatgagcagcccaaggctgttggagaatgaaaccccctgccaactgcatttctgttgctgtgataaaataccctgataataaagaactccgggagaaagagcttgtttggctcacagttccagattctaggccaccatagaggggaagtcaaggtcggaacccaagtagctagtcacatcccggccaagagcagagtgaaacatgccagggtttaagggggaattgtatgccctgctttactcttagggtgaggggcgtgcaaccttttggctttcttatgtagctcactctaaaaatggcaagttcctcagaaataaaactttagcctttaaagaggggaaaggaacagagagaaacaagtacagccaggcctgttcacacatgagcttctgtgctgtgctgttcagcatcccctgcccagaagaaatggtgctgctgccctcaggggctgggccttcctacatccattaacagtcaaggcagtctcgcacagactcgctcttcccacgggattctagcttgtccagtagcttgtcacggagactatcaagtggacagttaaaagtaaccagcagacccttctttggaagtgagggtctgagggcacaggcctcccaggataacatcatttcagagaaacttcagttcttgggagggaaggaaggacacgtttgggagcgcatccatgcgcattcacaggcttatctgtccacgttgcttccactgtagagttgctacagcgaacggaagaaaacacggaacttggaggcgtacgtagaatggtttaatcgtctaagctacttggttgctacagaaatctgcatggtgagacaacacattgttttttcctcagatccagttttcctgctttatcttctatctgttgggcctgtgtgctgggttcctgtctgctcacgctcgtttttcttacagcctgtgaagaagaagcaccgagcgaggatgatcgagtatttcatcgatgtggctcgagagtgtttcaacattggaaacttcaattctttgatggcaatcatctgtgagtattcgtgtgtgtgtgtgtgtgtgtgtgtgtgtgtgtgtataaacactagttttatggggcttggaaattgtatccactgaaaatctgcctttcctgaaaactctactctctttaatccagagttattatgaaacgttcagaatgctttatggacctaaactagtgccaagtacatacagtctttccttaaaggacattcattgaatgtctttagttcatctatgctcagttaaatatccatctgtaaaagctgagaactgaaacacttgtctaaatacaaggtttctagaggtatttgggcagcatgtatgtcaagcgttatggaaatggcctgacctgagatgaaatctcgccatctcgtcagcagtagcctgaggatggcggaagaaaccaagcgcttcactcttgaccgtgcctctgagacaacatcagcttatgactgcagtcttgcttccaggtccctccagaggatcatgggggctttaatgactgcagaggatcatgggggctgtaatgaaagacactgtgttcctttctactgattttattagcacagataaaagcaaatctttgtggctccatcttaatactcagtggccatttacacacctacaggcactcaggaaatatttgtgtaaaaggtagagttgggtcactttgaagctagagaatctcctcaacttagtttattaatatttatactgataaatctcttcactataccccctttttttctattttgtcttctatcatctgcctttcttttcccccattgaaatgttgactatgtttgactccatagaaatagtggatagagcgggcatctaagcacaggggtcctcggggatagaggatgacttagttttcttcatctgccaattagaaagtgccagggcaaatcatagtatggaagaagatattaacatatagccaacaaagagcttgtatccatgacgcatacagaaccatacaattgcactggataactaaccaggggattgtaagtgcataaaggatcatcagaaatgcaaaggaccatctcatatagcaaaataacttaatcaaaactagttgcagcaaatattgtccgggataaaggggtacgtggaatgtgttatacaggaagagagggagtttgaatagttttatggctttagcaactggcatttcttataaagctaatcaaaaacctaccctgtaatctagatgttccaatgccaatgtatttgcgccataacaagtgagcacgcctacagaaagatttgtgctagaattattaatgaggctttatccctaatagccccagcttggaaagagcccaaatgcctgtttgcaagtaaatgactgaacaaatcgtggcgcagtcatacaataaatgctctggagcagtaaagatgaatcactgaaacatagctaagctggatgagtttcacaatcgtcgtgctgagcctttaccaggtcaggcacgacaaggcatgtgcagtgggatcccactcatgtaaggcctaggatagacaaggtcaactaatgtctggtgataggtgacccttgaccactgttgccatttctggaggaggtggaaactgaccagaagtgggtcaaaaggagctttctgggtgatggaaagttctgttataacttgactggaatggagacgtatgaccttgtacacctatcaaattcatctcattggacatttaagatctgtgtctgtgccttgcctcaattagaaatctcttaaacttactaaacttagaaatattggtggcaggagatgaatacatgtactcatttaggtccacgtagactccttttccactgcagtgtggtaccaagtagctataggatataggttttcactgggacaggcatcatgggacaggtatgggctatggagccatattggtatgatctctgctactggggcagctagacaacattgggaaaattccccagcctagaacttagcttattcttgaaggaatgtatagtgggtatgtgaggaactttatggaaactatgcatgacaggttaggtgacaggaaacaggtcagcaaataacctggagcccagtcaccaactgttccattttgttttctaatggccaatgagctagagttctaatattttgaagtgattgaaagtaattaaaaaaaagaatttccaatatgaatataatataaagtcaaactttagcatcttgtcaggtccagtgtcttctatcttttctcctaacacatgagggattgaaacaggaggagctaaaattccagtcttagttctggagaaaagcccagaccagtctgaactacatgaggccctgcctcagaaaaccctcaccatataaacttcagcatctataagtaaagtgttgaaggactgcagtcatgaccatgtgtttgtgtagttaccctggctgctcacatgctacaacatggcatagtctaggtcctccagtatgacctacattccccaagaaatgtgcttagcctgttcacagctgtgctgtgctgcttctgagctgaggagaagctagcaaagaaatgtaaaatcagaggctgttactaccgttggaggactcagttgccgatgcttggttatgtatgcattatgggagtacaagctacaatgacttcttacgtctctgttttccattctcttcccctcatgcccctcttaaacgggaagctggtatgaatatgagcccggtctcgagacttaagaaaacctgggccaaagtgaagactgcaaagtttgacattcttgaggtatgtgaaagggatgactcggtgttgagtggatagagcatgcctgtggtacctgcactcaggaggctgagtgttagggcagcctggggtggatagcaagggacctggatgatgggattcagctgtatgatgctgcttctccatcagagagtaccatcaaaggaaaaggctttcagacccggaggtaggaaaggtacgcagactggagagggcaagataaagttggtttggagctggtcgttttacagagggtttggagtaattgatgggagaaatgctgccttctgagtcacgcaattttatataccaaaatagaactggggtcctggaccgtagagaaaggtctacttcccagtttgtcttttgtactgctatacagtgtctttatctccttagaatattcattcaccactctttgagcaaagtttgttaacccaaacagctactcccatataactcttaggttatacgtttctgtgtgtgtatgtgtgtgtgtgtgtgatatgactctgtgtgtggtgtgtgtatctctgtctctgtctctctctgtgtctctgtctctgtctctctctctctctctctctctctgtgtgtgtgtgtgtgtgtgtgtgtgtgtttggatagtgtttactttcctgttaccttggtgtattaatgttgaccatctcaagtcattggaaataataaacattctttcacccaaattagttgcctaaagtggaaattaccatcaagtatatatccttttatttgaactctctagtaaacttcttttttaaaacaaacaaacaaacaaacatggcatgttttcgtggtttatgaatgattgattagaactgcggaaagcaagttctcttcagctgttacctgtgacctggcccactgaccatcaagtagaaccagaaacttttctaatgccagggtttggatctctcgcactgattttaatagttctgatctcaacaatgagcttaaacgaacaggtttgatttaggtttgacatcatcaaagttcaaataagcctctaaaaataaaccaaacctcaggaaggaaaacacttgtgttgatgttgttgttgttgctgctgctgctgttggtgttggtatatgtgagtgtgtgtgtgtgtgatggataaatcatacctctaacgaattccctgacttgctgtgactttgtatgcatcggcatgatctgggaagttgagagctgaatggttaatgatgttctctctccacagcatcagatggatccatccagcaatttctacaactacagaacggctctccgaggggcagcgcaaaggtccctgactgctcacagtagcagagagaaggtgagctgcgggaagcgttgcttattatagacttgtccggatgtaaactactacccggccttgcatttacctgctcagacctaagagacgcgcacttaccttatccctcgggaggagtaggccatgaggaagaggagcttggacaatggacaaagagaactggcgaggggtagcactgtgtatttgtacatgatatgatttgtattattccgtttctgatgtgttctgtagtgcgtgttggttggacttcaggcagtgagttaagtcatgtgataaggtgactaatagcattagagagtaatttggtttaatgggaaaaagacatttaannnnnnnnnnnnnnnnnnnngccttttggagataccagccatagcctgagaagactgcgtcccctttcctccaactcctcctgcccctttcattccatggtatatcagagatatactgatatatccctgcacagatatggggggttctccccaatagctgtggtttaatgggaaaaagacatttaagttctgcataaggtggttcccttaatgtaacctttctttcaaaagaattagcttacctcccacagtcaagccgtttattctcagaaagtaggttagttgctatggcattaggcctgctgtgactaattggatatgtaggtggctcaaaaaatacaggggcagtatctaaaaaaaattaatgatcctgtcctctcttccccctctcgttgtaccacaagttctggactctgagaaacatttctgtctcagtttctctcagaggaaggacagattgtctgtcacggagtttgagaagtaaatgttcagttatgacaacagttaatgctgccttttttcttttgaagaggtattcatttttactttacgtgcactggcggtttgcctgcgtgtatgtctgtgtgaggtgtcagatccttggaacaggagttatagaccgttgtgagctgccatgtgggtgctgggaattgaaccggggccctctggaagagcagacagtccttttcactgctgagccatttctacaaccactaatgctgatttcttagtggtggctatcaacttttaaattctgcccctgtgttaaatggtattttcaaccagcttgaaaaaaacgggaggaaaatattccctgacttctaagtcatttccccacagaatcatcaggactaatgagctaaggcaaaaactccttttaaagatctgacatttctaccaccacaacacaatttccggctccggtgacatccgagaaacattgtaaatgcattaactttgacttttaactggggaaacctccggatggatgcgaggcagtgtgcttgcttttatattttgctgaaaagagccaatctgaagtgggttacgcttcctagtgatcatggagggaggaccccgacaccctgagctgggggtgcagggaagctgtgagaccaccccacatctccctatggtggacaccagacaccacatggcccttggtgagggagggaggcagtatggagtcctgtctgtcagagggctctgacagcagccaccaagagaagccactgtcacttgtgcaactttaacagctgtccccagaaaggaaaacaaacaattatttacacctatgccacttagacatttcatcttgctttatttgtaagagggcgttctatataaatttataggctgtgcctgcagttgatggaacaactgtaattacaaccatctgaagaagttaaccgttcctttctcataattggcctcaaaagataagaaataaaagcatgtctggccagacctctcctgttattttaaaaaatgagattattttcctcatttcgagctgagggagtactttctttattccaaagtaactgcccattttacagtctccctggcagtgcctttcaaataatggtctttgatcctttccgaatctcaagtttatgtggtcagagcagtgcatttccaggtacctattatggtgcaaatcaaatctgtcttccgtgcaggagcccttaagtgctttctaaatagtctgctccctgtgggtactcggagactctgttcttaaccatgcgtctctcacatggttacttggtttccagtcccttcccgatcctatttgtgtttctgcaaacatggtcctcctcattagcattgatttctagacgtggaactgacgatgccttaaagaaagaaggctgatcctgaattagcagcagttcacgcttacagtactgggggttgatcctggagcttttatacctaccagacaagctctctagcattcatctctaagatatcccagctgccatttcaccggtttgcactggtttgtttttaaagaagaattcaccacgtagcccaggcaggcctttagtagctaggattatcaagcctaaaatgaagtcagaatatatattattctgtctgcatgtacgcctggatgtcagaacagggcatcggatcccattacagatggttgtgagtcaccatgtgggtgctgggaattgaactcaggacctctggaagagcagtcagtgctcttaactgccgagccatttgtccagccccagcgttcagaatatttttaaaggggaaatttgtgttgtagctcagttggtggagtccttgcctaggttgcacaaaaagagtggagttcagtccccagctttccacagaaccacatgaggcagtacatgcccgaaatcccagcactcaggaggattagagatgtctaaggttatccttgactacatagtgattttgagggccagccaggaggaatacatgattcaacatgatagtatatatatatatatatatggttatagaatatatggctatataatatagcttatatatagttatataatatatatgtatacatattagtttatatatggctgtagaatatatatgtatatatacacatagtttttatatggctatattatatatatagtatatgttgctacttagttttcccactaatgatagtggcaagacctaagagaaacaagacataatccctttacttacctcacaaaacccttgagttcttatattctgcaccgttcagttccttgtgtaaaactgatgggcactctcaggagcgattaaggggttaaagtctgagattctcttcttgtcataagcatgagaaatagagcagccaagtgccccacattaggctggctgtgtttctgtgttcctggaagaatgactcagtagtcgagcatcttgtagggacactgaatacaaaactcccagaaggaatccttctgcctcccacgatttaatggccatggcaagaacacaggcttaagtctacaagacagtaaatgaggcccatagcccagccctgggactgggacagcacagagcctctcctttagaagccgttgcactgtaaactaccatgtcttgattttcattgcgcccccacttccctggggctgtcccaggatgtgtgtttattgtcttacaagtgcatccacaacctgggtagtagcagagagcagaccagcctgtgtctggatcagtgagcatagccacgctccagtgaaactctgtggccactgtcacttctgtttcacatttttcatgtcccctgcagtattattctttcgatgccctgtgccagccacttaaaaatgtaaggtatgtgtctccgaggccataccaagaataacaacacatacatttaaagcaaaacaaagcacaaacaaaatccttacattttgccagcccctagcttttattaccagccagctgtcgagccagttcttaaactgatgtgtgatggagtccatagcccagccccttgccctacgagtgttctttgaaagaggcaagggtcagtgtagatgcgagccgagccgggaccaggagagggagaaggaagtgcatacagtctttgcgaatgctgcttcaggcgctctgcagacaagagcaagtgctagtggagcagaagatacgtttgattattctcaaggatcaatgaaacagaactaatcaaaggtgttttggctttttgaaaaagacttcagggaaaagatctgaatttctctctaggagagagttggcacttgccctttgtgcgtgagccaaaaagtttgttttctcattcgtgagtcatgagcttagaagacttctaagacctgatcttggtgttttcagaattccccaaataatctgttggacgaattatttacagtgcagaactttttcaaatatatcacatttgagaaaaaagtaaataaaagtggctgtatcagaacttcgatcgctgattgagacgggaggggtccgatacaggatacttgtaaagattgctactctaggatagtcaggaaagtaccgcctcatcaaaccacagaatcctggccaagaaggtatcattacagaagcgtattggcttttgaagtctttaattttaattcacacatttccatctccccctcacttgtagtgcatctgtctggcaacagacagtgcaaggttcttctaaggggcttttccagggcagcatgtgaagactcgctctctcatgtagccaggtttcttctacaggagatggtaacaactgcttaaaaccttcagctgtcacagacggtaacaactacttaaaaccttcagctgtcacattatcttgagaaatggcgtcaggaggaaaatataaaaccaaccaaccaaacaaacaaacaaacaagcatagatgtctaatgatggggtaatatagagcataggaagaagatgggtcatgtgcctttaagactactataattaaggggtccctaaatgaatagagttcttttaggtgcttctatttcagcacctaaagtaaacattgaagaaaataggaaaatctgaacaaaaagtattgacccatccacttgccaacaatgctggtccctactgtgcttaggtgttggtgacatttgtatcctaggctaagccgtggaaggcagtgaagtgtgtagcgtggagcatacaggaacagtgtaccgtaattcaccataattcaccgtggcctttcatgcaatgcacgttaacgttgctcatgtatcccttctatctgtgacaagagactatttatttacccagacaaactctgaatctttttctttctagattgtgataccattcttcagtctcttaatcaaagacatttatttcctcaacgagggctgtgtcaaccgtcttccaaatggccatgtcaactttgaggtgagtggaacgaagtaggatgtgaatatcagtaaggatcaggcttggtggcacactcaggaggcagaggcaggaggattaccccaagtttgaggccagtctggtctacatagtgaatttcagggcagcagtgtgacataatgaaagtctgtctcaaaaactaaaaacttaaaaacaaaagccagagggcgttgtttctcagtgccccagcctagcagcaaggccgattctgcagctcagaataaacttgctattggcctgctgtctataagaaaatgagagcaccaaatagcacagctgccattccacccggtggcactgtcgcttgtgagaatgtgagtgatcttccattccctagctagcaaacacagtgcttattaaatgaggacgagacgatgactctgaagttcccaaactgggtgcttttcaaatggaattgtgccccgcaacccaataattcttgaccattacccttaaaatcctttaattctctttcagaaattttgggaactggccaaacaagtgagtgaatttatgacatggaaacaggtggagtgtccgttcgagcgggaccggaaggtcttacaatacctgctctccgtgcctgtattcagtgaagatggtgagtctttggcttgtacctgccccagatgcccccagatgaatgccggtacttggctgcctctcgtgaatgatgccaggcctctgagctgatccaaccttttccatctgctgcatggacagtcttatagtttacccctaaaatgttttcactttgtaatcagccaaacataggacattagacatctttcctaatgcctgtcctgccaaatgataagcatgctattgggaagctgttaaaaggtatttgaaaaaggtgtggatagtgttgacctgttagaacactggacaatggaagaagaggaaatgcctggctatgtgtaggacaattcctaagtagtccatagaacacttagtagggagattacatacttgttgacgctatctgcagtaatggctggcagacatcttgaattcatattgcctgtttgggggtaggcagctgattgttttcatctctgtaaataagattaacaacaacttttacaaccttgagatgtaaaagctctcaaagatcttttggatttaaacaatctacacgtgatttctgttagtgagccgagggtgccaggaaagaggcatggcccttcctttcagagagaatataaatctgagtgtgcggcgggacagtacagtttgcattttgaaagcttcttgcctcatatattctttattaattaagggccttctcagctcagagccatggggttgcccatggctagtcagaagcagagagctgctctgtgttcttcaggataactcagtgtatctgaagggtgtactggagcataggctcaaagctgagtaggccttttcagcactggggttaatggtatcaggagatggcttcaatcgtaaccctttgtctcctttggttgattgtagcgctctacttggcttcatacgagagtgaaggacccgaaaataatatagagaaggacagatggaagtctttaaggtgagtctcaatgcttcttataattgtgctactttataggaaacattggctttacctcaggaaagccatatgcgtgccttgttgtaggaaggccccaccgacctgtttggcagagtctaaaagcctactttatttagggttcttaagtgtttcaacttcccttctaacccacgaaccagaggtaggggagaaaaatgttaatagggaaagcgtcttgtggacctgtttagaagtagttcctaggggtgattccactctgttgtcagttcagtctaaagagcaaacaccaaacatgaatcagcagtagtggctcaatccagcagaaacagcaaggctctgccgatcagtatgagtcagcagaagcagccagaagcagctggaataccgtgagaagttctttggcaagtttctctctgtgaagtgaagaccaacaaaacattgcaggtgtggcaatgcaagagcatctttttgctgtctgtggggttctccttatactctttccaaatatcactcaccctcttaaacatctgcttcaacaaagcatcctctcacaagacagcttccagaaaaacatcacgtgatatacctgagtttccaaagcaaccaggaatctccacttcagagtcttgccttcaggttacagaatcactgtggcttgggaattcttggtgccttttatttcttctttaccgtggcagataatagcaggattccagttcctccctgatgacgtaatggaatatggaattgaaattaccccattgtatagtacaacaaaacaaacaagtttaaaaaaaatttttttttctttgtttaaaagttcagactggggtgtgaagagatggctcagaggttaagagcactgactgctcttccaaaggttctgagttcaattcctagcagcacatggtggctcacaaccatctgtaatgagatctgataccctcttctgatgtgtctgaagacagttacagtgtaaacatatacattaaataaataaataaatcttttttttttttaaagttcaggctttatttttgaacagtttaaaagctctagtcttaaagctatttgggtgggatcccaacaaaaacactgactaaaattaatatcagttaaagttgggatatcagttaacaatcagaaatcaggtctcctttggtttgagagagagaatctgaacttaaaatataatttgtaggttaaaaaaacaacaaacctttggctattctattagtatttttaaacaaatttgcaagtatttgtattttaagcatgtaagatattttaataggccaaaaagcagccaggacataatataataccagatgatcaagactagttcagacatacaccaaagtcaatgccaatatgggcagtgtggtgaaatagcccagacttatagtctcagcactcaagaagctgatgcaagaggaactgagtttaagaccagcacaagctccagggtcagaccgtatgtcacaaaaacaaaggaaaaatggagtattaactcctttaatttatattttagggtgaactttgcctatcatgtttcttctttgtcatcaccctcttccccccacctccggtccccaaacaagcagggcctttggtaagattcttagtacctgaaaccttgccgtggataagtagacagattggttctgcaagatactcagtatctgaattgctcatggattcctgagttacaaaaacccaagcctacccataatttctttatagttactcagttctggtgtagatcagaagttaggttgcaaatccaaggtttgacaggaaagactgaatagtatagctcaaggctctgtgcactgcatttaatatatgtaaaccaaagactttagcggtgggactagaacatcatgtgagaaaggctgcatcctggctgaatccagacacgcgtccggggatctgtttacagccgtataagctcagggacaatctttttctggccggcgtgtgtttgagagtcgaaagccaggcatgtcggcacacctagacccttaggtcttgggaagctggagcaatagaaccacatgtttgaggctagcctgacctacagagtgcgtctggtctccaggttcctgccctgacttcctttgagggtggcctgtgacgtggaagcgtaagccaaataaacccttccctcccccagttgcccatggttattgcattttatcacagcagttgaggccctaagacgtaagtaagcctgtgaaccagacgcgtgtcacacgtacataaaagttcattgtcattaatgctgtgcactttttgatttaatagaataccactcaaggtagagattaccgtaggcagtgctttggctgtctccattaataactagtaagtgtccagcagtcttgcctgaaggaccattcaggacgtcagtccttgatccctaacccatcatttcaactctgtgaaaacgacacatttaaaaacgtagcagagatgagcactaagagatgaacactaagcaaggcattccgagccaatacaactggacctctgccttaaagtgtttcctttattccacaggtccagccttttgggcagagtttaacatctggaaaatgctgctgctgctgttgctgctgctgctgccactgctgcatcagaggaccctggaggggctggcctttgttttctggcatccagtactagggactgcctcccagaccctgcaagcaagcccagctgtagatcagacgggaaattcatttcccacagctgacagatggacttggatctcttttgagactgaaatcgtcactgaagacacttgagggagaatcttctgaaagccccggctctgcgcatgattcatcttctggaatttccatgtgaatcacagctctgcacctggatggacttttgtttgtgatatatttttttttttggcctgaacatttgctgctaatggaacttacacagagtgcggctctatggaagcccaagtttctttgttaatttaaatgaaaaannnnnnnnnnnnnnnnnnnnnnnnnnnnnnnnnnnnnnnnnnnnnnnnnccaagtttggatcctggacctcagcttgaacagtattccagtgagggcaaagattgggtggggttctactgcagacatccccttacccagtgcggtattgtcaacacccctcccccgtccccctcttcctccaaggctttgagttggctgctggctagcaaactccttcttacccattaagttatttaatataataatgaagcgcaacactgtggtaggaaaatagccactaggggggaaaaaaggcagagattgtcactgtcggactgcccatcctgcaggaagggtcactgtaggattgctcatcctgcgggaagggaccatgttttctttacccttctgagctgtttacagctgaccactgtgtcctatagatgtatttttcagtaggttttgtttttgttgttgttaacttagttttccatgatgctgccccatccccataaatgtaaatgctatgactttaagggtcttggggggaggatccatgacctaaacacagtcgttttttttttttttcctaacttatttttcattattctctggagtcagttggtggctaaacatataaacaaggaatccattaagaaaacttacctcctcgccccgcagcagtgaccaaatgcaaaccaggttgctgataattctgatcaactttaacatctaaattaggtctgtagttgttctgcaggcagccattacgatactctaggagaaactttagagtagtgatcccctgctaatgaaaatgcacaatgccaagttccagccatgttggttaacccttctgacgccatcctgagaatcagcatgtcttaaccgtgcgtcatctcaacaggcttggcctgtctccaagttgtcccttcacaatgtcaatacattttaagctctgcagccaggagttgtggcgtcttcttttgctttctggatggaattgtgggtggagggatgggctcatagccatagccattcaactggttcaaaattcatccactcctgagggaaagaccttaggaatataggcacagatgcgcgtttgttttctacaaagaaatcctaggcaacattcagccactaatatttttcagacacagtctaaggtttgtaggcacagatgcaaacatcgtccttttcacccgtagttattgtcttagttaggtttccattgctgtgaagagacaccatgaccaaggcaactcctataaaggacaacatttaattggggctggcttacagtttcagaggttcagtccattatcatcatggtgggaagcacagcagtatctaggcaggcatggtgctggaaagagagttctacatcttcatctgagggctgccaggaagagactcttccgccctgggtggagcttaaacataggacttcaaagcccaagcccacagtgatacacttcctccaacaaggccatacccattccaacaaaggccacacccactccaacaaaggccacacccaccccaacaaggccacacccaccccaacaaggccacacccactccaacaaggccacacctcctaatagtgccacttcttagggccagggtacagaagaggaaatggatatattttgatggagcccacagacctaatgagaggcacaggattgaagtgggccttttaattcagagcagaagctataaaccaccatggcatctcaagcttttgtgtccttgtggatggcttgaggaatcttgtttccctgcagatttccaacctgcaaatggggcccttgtgatgctgaggtcctggatccagtttaagactccagctaaaaatataattccaaggtggtttgaacgggatttctgtaaccatggttaccatgctcttgttttactatcctgatgtaccggaggttcaaaccctgtgtgagcttttatggaaaccatggtgcatttctgccatctgtgccacgtgtggccttcacggtattttagtagatacaatcgtaaacagctctaggcaatgaaagcagtgatgtttaggcatgcttgccactcatttcaaacccacagggctttaagctggggcctaactggggtctggggtctcagtagaggatggatatagatagataagaggagagattctatgacttgaaataactccttcttttgaggacacagcccagttcactcactagcaggcagcctgttttcaatagctaacaaagatgccacaattaacactctgctgtcacttctgtcattacactttcatcctcctgtgtacctggctggaacctctgctctccccatgtctgcctgtcttcttgctttctcttctggcacagtcctatcccctcgccatgcacctgcctcctgtgtggagactgtcatctcaactgtagcattagaagttgatctgtggattctgactggcccactggattcaccagtgctttttaattaccctgtggttctcaatacaaggcaatgcttgcctgtattccaaaaacagtctcattgttctaagggaaggagaatggcggcctgggaatagaggggttcgggccaattttctgctgtagctaagggttcaaaggaattcttgaatgtgtttcctggacgagagtgtgatcaatgacctggaaactactaactactaactaaactcaaagagaggatagtggtgagtccctgggctttatttacccttagcaagtttgcaaggcaatgctttggccagagttgggcttccagtgatggctggaaaggtggctctgtcctggataattcaggcctaaggattttgttgtagactaaaaattgcctcagttctctgcttcatgtgacttgactgcactcagtgctggcaggcatgttgcctcagttctctgcttcatgtgacttgatccactcagtgctggcaggcatggtggggttggggttggaggtttgtctctaagccttattatgctttagggactgtcattgaaaagtgcaggctggcgctgtgtgaagtagaactgtgccccagtctgtacttaggaatcaaggcctattcacgcccttccttccttccttccttccttccttccttccttcnnnnnnnnnnnnnnnnnnnntccctccctccctccctttctctctccctccttctctcctttctctctctctctttctctctttctttctttctttctttctttctttctttctttctttctttctctctctctttctctctctcttctttctttctttctttctttctttctttctttctttctttctttctttctttctttctttctttctgtggtttcttgctttcttcccctccctcctcctcccccctctttctctctctctctttccttctctctctctctctcttacttaatttagtgaaggaagtcctaggtcgctaattcccattgtagtgctcatgtcttagtaggcctagtgtctgcagtgtgtgagcctctgcttccttctttctatccaagtatgcacagccagtctggacagtatgcagcagctgtcgtagactagtgttaactgtcagcatttgagtgtctaagttgttcaacttagcacttctagaaaaaagtgtgtagatcctaatttagggaactgaaggggacagatactgattagaataaagagtgaaatcatgtgccccctgatgaaacaccaagcaagccttgtacctcctccaaccaacccgctttctcttccttcccacccacgctggcttggggaaatgaaagttagtgtgaactcatttttctcctgatgaatcactgtgggaaagtcagtttagcagaatatgttgtcagtgtagttgaaacaaagtggttagaggaccggcattgggctgttttgttttgtttttcaagtgattacgaatcctaagtgcagatcatcggtggtgctatggagatgtgtacttggagagcacacacgtgctagagacagtcgactgcttatcatcctgtagtcacagatttcatttaaataattggcatatctggttttaggaaattaaataaatcaaagtgattctaatataactattgtgggtggcactgtccctacagagaccagcaaagaacatctaagtcagtgtgttgggtttttttttttcttttttagagttaaattgttaatactcccctgtagctatcagtacatgatggtaatgataacataaatatccagcacagtgactgacatggtttgaggacatgggctacgtttgaaatacgttcctacaaatcactacactccgagtaagaaccagttgctaaacctcactgaactcagtttcctgggacttccaggaagcttctctgggtctgctttgtggtgggcctgtgctaactaaagagaagtggaatgctggggcctaatggtcttcaggattagaattcacttcctcagcttgctgagagtcaaaggtaaattagcaagtgcttgcagcatcctggctgtgggcttccaccttctcttctgccagaatcctttgcgttttgtttaattgtatttgtggagagaaggggtaagaggctaatggctactactctgtagcagatgaaggcctgacagaagctcagttcacccctccagccgtgtgccaggagacaagatcgttcttcatagaaaagagtggttgtcacccagctcagacactgaaaatagacttatgcaagatctgttacataatttcaaaagttctagattgaaaatggataaggaccacacgaagactttgttgtgcagactccatctttgtcatagcagctgttacaattgtgctcgctaatccagatatgtagaaaagatcctaagacgctctttccaccccgccattttcaaaagcctggctgtggcttaccaagatttaaaggcgtgatggatccagggcctgctctgcctttgacggcctccttttggggacacacaatggcccagtttgaaggctgtccagatggaggtgggggtgggctgttgaatatgacaggtgtgctagaccaagtcctgtgccaaaggaaatcagaaaggaaataaagccatcatccttggatgataagagctttccttgtggataaatactcagtgaattgtagccgaggtaggactcagcaatggagaacagatcaaaggtagaaaaagacaagcagagtccccaggatcagagagtgatggttagggctatacaaatagccaggcaaacagctttgggtgaaagagagagcttgagaagaggtgaggctctaaggatctgagcactcaaactcgtttaaaagctaatgaaaaaacaatgagccaagaaacccattccctcgggaacccacatgctcttcactattagattaggtgttaggtaagtgaacggaattggataacttagaggcttattttcagttatagtcacttactgaactaaccctgtgtatgctgtaaaagtgctaagaagtatgttatcagaagctgctctctacctagccaaaaactaacaaggccgctgtgaagagcacaggagagatggaaacagaataagccaagggattcttaggctctgccatttatatgagagtgtatttgagaataacacctttctagggagccaggacctggaaactctggacacccaagccagcaactttcaggttcttatctcctgagttcaagggatgaaatccatagatcacagaaggtgagaataatcttttatagatgcatagctgggagcttaagagggagcaaaagaactgtgatgtttgagttgggcatggacacaaaccagatgatgatgagccaacatttgttgggaaagtggagcttcagagaaagagtagggaagcccagagaacaagaaaaaatataatttggctctgttcagtacctgaaagagacagaagagaagacaaaggggaaagttaagcttttctgattcaggactcagaaagctggacagccccaacagagggaggctcccgaggtctgtgctggtgggcaagagctttggggaagctctcactaaagggctcatgagttctttggtctcttgagcatattttaaggtaaattcaccttcctgagtgggagggcggagtagtcccttggctagatgatggccagctcaactggatcaacctcaagagaggaggcaatgacaggactccatcgagagattttgtttgggaggctgctagtttccctaagacttcaactctactgtgtacatgtataagtgacacacttcctctgacagagtgttgtctgaaaaaaaataaaataactagaaaaatcacagaactgcttattgcatgagctgaactctctaaatatgggtgttttgtaacaggaggaataggttggtaacagacctgcattcctcaatgtaaaactagccttgtgtgtttaaggcttggctcatggggaatggcactattaggaggtgtggccttggagtaggtgtggcagtgttggtgtacacacacacacacacacacacacaccatctgtcactggactagagcactccagtttgcaagcaatacccagagatcttcccctctccatattctggcactaggactacaattacagggcaccatgactttcattttgttggtttggtttttcaaggtagggtttctctgtgtagccctggctgtcctggaattcatgttttagaccaggcaggtctcaaattcacagagacccacctgcctctgccttccaagtgctgggattaaaggtgtgcgtcaccactgcctggctaccatacccatttttaaaatatgggttctagggatcaaatgcaggtccttgtgcttacaggataaacacatttccgatgcaggcaacacctcagccttgtttgtttgtttgtttgtttgtctgtttggttttaatttagttctgcagttctccaatgtgggctttgtaggtgacaatgacatcgcattgcaatgtcaacatgttaggcactctggctaggatgcccacctagtctcaatgagtcacacagatcaatccaatgctgccctgatcccagctacagagtggaatgaatgtgatgttttagctctgccttaagtgttatgaggaatgcaggtctgttgtcaacctattccttcttacagaacacccatatttacagagtccagctcatgcaacaagcagttccttgaattttctagttattgtatttttcagacaacactctgtcaatattctaaacctgtttttattgttacctgtgggaaaataaaattataaaaagatccagtgcattgtaataactagccttagggacatcatagcaaaatttaaagacagacatcagaattagaagttaaaatcacttggcccaccaccagttcctttttttatcagactcctttagtgaagaacagaaacacttacctaccagaggccccagagaaacaatacttacattctgtggtggtttagatagaaatggaccctctcgacttgtgtgttcgaatgcttggcccataggaaatggcactattaggaggtgtggccttgttggagtgggtgtggcattgttggaggaaatgtttctctgcagggttttgaggtctcctatgttcaagctccaccgagtgttgaacccagtccccttctgctgcctgcagctcacaatgtagaactctccctctgttccttcctcagcaccatgtttgcctacatgtcacgatgctttcccgccttgatgataatggactgaacctctgaacctgtaagtcagccccaattaaatgttttcctttataagagttgccttggtcatggtgccttcacagcaatggaaaccctaactaagacatatcccattgtccttttctcttttgtcttctccttcatctcaacccacacaaatggtccacaatagcctgagcattctgtattgcaatcccatgctattcccacttaggtttttactttgaagagtgggtttgtgtcttactttgctttctatggttttgataaaacaccatgaccaaaagcagcttggtaaggagagggttaatttggcatataggttacacatcatcactgagggaagccaaggcaagatcttaggacaggaagctggaggcaccaacagaagagagaccctggaggagttctaactactagcttgctacccagcaaactttcttatatatcccagggccacccgcctagggatagcaccacccacaatgggtggggccctcccagggccctcccacatcaattagcaaccaagataatacccacagacatgcctagagaccaatctgatagaggcaattcctcaatgagattcccttttctcaggcaactccagttaactgccaacatcttttttgtattttaggtctgatttgtcatgttcagttgtatcagatcttaagggaaagtgagtgggaatttgagctggattcacaaatcaatgaatgcagctaaacactcatcttagaaactagtattatctatttactcatcttagtaatgactgttatctattcttgaggaccagcctcctcaggatgaactacagagggtgccaagaaaatggtacatctttgttttgtagccaagcataccgaggtaggtccagaggtaggtatagtggaccatgtgtgtggattgagtttatatgaccagtacatgtgatttgatttagccaattggtgaggggaccagcgctgaagcctgatatcagtactgtcttcttattgtcctgctgaaatgctaatgtcatcctggaactcagtatgtctgatgttcttctccccctccatgatgggatacaaatgttcaaagtcaggaaagcagaaaactgccagtgtggctcattggtggcatgctcgtcttgcacatggggaggactagggtttcagagatgccatcctacatcagttctagggaagggatatggtgacaacaagagccaataggagagcaggcacaaggtaaatggaagagaaaactaattttctcatcaaatgtataccactacctacttaatggcctttgctcattattcatcaatcttaggacattggattcccctagttctcactatgaaggccaggatggcagagactttgcagcaagcctcctgcctctgcctgccagtgttctgggtttataagcatgtgccactatgcacttcttaatcacccagtgtcaacatgcaaatagttcttactccctcgtgtctaggctgagggtagattgttctccttaccctctttgaagtcacacagagctcttgtggttcctttgtcccctgacatgggagagggagtgacttcacttcccagcagaagctttgtaagccagtctccaactctctcagggtctgctgtcgctatgctgtgatagagagagagggccaggactacagcctggacacccttggttcccttggggaatacactgagcagaaaagtcttctaattcaatttgaacatgcagctgagaggggaagagatttgtgtggatgaagctattgaaacacaggggtggcttgttagcataagctcacttgttctgaatgatggacctctcaggtccatgcctcctgtgaactcctcagcttaataaataagtctataaaatcacaaagcttcccttgatcatctttcattgcccaccctgaagaccacatcttcaattatatctagaaaccgagcactgctcaccacatcaacagtgttactaggtcaagacagcattgtcaaattcctatagaagttgcccagactttgatttcttaaggcctactgaccacatagcagtgagggtggtaattcagagcagagttcgtttacattgctcatatcattgttcatgttctgatgatggtttattgctctccaaagtgaggtacgaggtcacatgagatctatgcctgctgcctctctagcctcatcctctctcttgtggtccccctc

SEQ ID NO: 348 - DNA, 1850 bp, Mus musculus
ctggatcggcgggttttccctttcttctggcgttcgacccttcccggtcctgagctcgccttttggggcgcctcggtacggcagccaggaggcagaggctccgagctgtgtgcgggaaagtatgcctcagacgccccccttctcagcaatgtttgacagcagtggctacaaccgaaacctctaccagtccgcagaggacagctgtggaggcttgtactaccatgacaacaacctcctttctgggtctctggaagcccttatccaacacttggtacccaatgtggattactatcctgataggacatacatcttcaccttcctgcttagttctcggttattcatgcatccgtacgagctcatggctaaggtttgccacctgtgtgttgagcaccagcgactgagtgaaggggacggcgataagaaccagatgagaaaaattgcacctaaaatccttcagctcttgacagagtggacagaaacatttccgtatgacttccgggacgagagaatgatgaggaacctcaaggacctggcgcacaggatggccagtggcgaggagcagacgtaccggaagaacgtccagcagatgatgcagtgtctgatccgaaaactcgccgccctcagccagtatgaggaagtcctggccaaactcagctccacagccacggaccggctcacggttctgaagaccaagccccagtccatacagcgggacatcatgaccgtctgcagcgacccttacacattggcccagcagctgacccacatcgagctggagagactcaattacattggcccagaagagtttgttcaggcatttgtgcagaaggatcctttggacaacgataagagttgctacagcgaacggaagaaaacacggaacttggaggcgtacgtagaatggtttaatcgtctaagctacttggttgctacagaaatctgcatgcctgtgaagaagaagcaccgagcgaggatgatcgagtatttcatcgatgtggctcgagagtgtttcaacattggaaacttcaattctttgatggcaatcatctcatcagatggatccatccagcaatttctacaactacagaacggctctccgaggggcagcgcaaagattgtgataccattcttcagtctcttaatcaaagacatttatttcctcaacgagggctgtgtcaaccgtcttccaaatggccatgtcaactttgagaaattttgggaactggccaaacaagtgagtgaatttatgacatggaaacaggtggagtgtccgttcgagcgggaccggaaggtcttacaatacctgctctccgtgcctgtattcagtgaagatgcgctctacttggcttcatacgagagtgaaggacccgaaaataatatagagaaggacagatggaagtctttaaggtccagccttttgggcagagtttaacatctggaaaatgctgctgctgctgttgctgctgctgctgccactgctgcatcagaggaccctggaggggctggcctttgttttctggcatccagtactagggactgcctcccagaccctgcaagcaagcccagctgtagatcagacgggaaattcatttcccacagctgacagatggacttggatctcttttgagactgaaatcgtcactgaagacacttgagggagaatcttctgaaagccccggctctgcgcatgattcatcttctggaatttccatgtgaatcacagctctgcacctggatggacttttgtttgtgatatatttttttttttggcctgaacatttgctgctaatggaacttacacagagtgcggctctatggaagcccaagtttctttgttaatttaaatgaaa

SEQ ID NO: 349 - protein, 470 aa, Mus musculus
WIGGFSLSSGVRPFPVLSSPFGAPRYGSQEAEAPSCVRESMPQTPPFSAMFDSSGYNRNLYQSAEDSCGGYHDNNLLSGSLEALIQHLVPNVDYYPDRTYIFTFLLSSRLFMHPYELMAKVCHLCVEHQRLSEGDGDKNQMRKIAPKILQLLTEWTETFPYDFRDERMMRNLKDLAHRMASGEEQYKNVQQMMQCLIRKLAALSQYEEVLAKLSSTATDRLTVLKTKPQSIQRDIMTVCSDPYTLAQQLTHIELERLNYIGPEEFVQAFVQKDPLDNDKSCERKKTRNLEAYVEWFNRLSYLVATEICMPVKKKHRARMIEYFIDVARECFNIGNFNSLMAIISSDGSIQQFLQLQNGSPRGSAKIVIPFFSLLIKDIYFLNEGCVNRLPNGHVNFEKFWELAKQVSEFMTWKQVECPFERDRKVLQYLLSVPVFSEDALYLASYESEGPENNIEKDRWKSLRSSLLGRV

SEQ ID NO: 350 - DNA, 64125 bp, Homo sapiens
gaaattataaaccacaaatactagtattaaactcgtgtctctgaagaaaactaaacttgtgtctttgagacaaataacatcgctttgcaaaaaaaactggcttctagtttaatttaaatacacatatctattagttttaaacattatttcataagtcccacagtaattgaatgaattttatgaatcgggaaggcaagaggattaaacagagatatacagatttaattcatggcttctccagctgagtgtccttggccagtggcttactctcccgagcctcatttcttcctctcagaaatggaaataatagtacttatctctcagagttttggtgaggattgataatactgcgaataaaaaatagctccctgctaacagggaactattaacagagttacacagatgtggtgaaacactcaacaatggataaacagagtgagcaacaccaacaaatatcaacatggatagatgatcagaagtctaagttgcggggaaaacgagaaacagaatgagacagattgcacaataacatttgtgtaaatacactcatgtgtactcacataagacaataccatcattgttcatgaaaggtggattgaaaagttcacactaaatactgtgtgataaaatctggaattttagatggggaatgaaaggaactaaaacaaaagaaagagggctggacatggattggtcatgatgattgctgtaattttatgcatctgagctacaagaggactggaaaagaaaaaaataatgcttagcacagagcctgccatatagcagaaattctaaatacaggtggctgttttttaatactggagtgagatactacttagcagatttgcatcaatttgattggcattactgagcttactgacatttacagataggagttgagccaatggagtaaaaagatcagaaagaaactgaggaatagagaaaggaaatttttttcatgatagaaaataattcagacatgataataacagcaattcgttgttgagtacttattatgtgctaagcattcatttattcaaccaacatatatttactaagtgcttcttatatgtcagacattgttctagacgttggaaatacagcaggaaaacaacgactacaatgactacaacaacattccctgctgttatggaacttatattctagtgagaggggagatgcaataataagtaaaatatatagtatgttaaatggcaatacgtcctatggaagaaacaacaagaaagcagggaagggttatacggagtgaggggtgactgcaattttaaatagggagtcagggaaggcttctctgagggacattatttcaaactcatttcatgtatgatctcttttagtcttctcaacaccctatgaaaacgttactttgattaaccatgatgctatttttcagatgagtaagctggtccagagtccatcagtaccttttctaaggctttataggtggctctgtgagagagataggattaggggtcaggatgcctagctccagatctgtctctttatttaacactcggcatacagaaagctagaaggaacccagagagatctgccaaaatagggggtgggaatgctgtttggaaagcattgcattaatattatcatggtatccattgtacatcttaagaatctaaaataaacttctttgttgcgggatactttagaaagtaaaactgggcaaaatcttctggtctgatgtccacagccagaggttacaaaggatatgtcagatattctcattaagaaatcctgattttctccaactcctaatgtcttttttattattatactttaagttcgggggtacatgtgcagaacgtgcaggttttttacataggtataaacgtgccatggtggtttgctgcacacattaacttgtcatctaaattaggtatttctcctaatggtatccctcccctagccacccaccccacaacaggccccagtgtgtgatgttcccctcttcatgtccatgtgttctcattgttcaactcccacttatgagtgagaaaatgtggttttggttttctgttcttgcgttagttagctgagaacaatggcttccagcttcatccatgtccttgaaaggacatgaattcatccttttttatggctgcatagtattccatggtgtatatgtgccacattttctttatccagtctaacattgatgggcatttgggttggttccaagtctttgctattgtgaaggatgccgcagtacacatacacatatatgtttctttatagtagaatgatttataatcctttgggtatatacccagtaatgggattgctgggtcaaatggtatttctagttctagatccctgaggaattgccacactatcttcaacaatagttgaactaatttacactcccaccaacagtgtaaaagcattcctatttctccacatcctctccagcatctgttgtttcctaactttttaataattgccattctaactggcatgagatggtatctcattgtggctttgatttgcatttctctaatgaccagtgatgatgagcattgtttcatatgtctgttggctgcataaatgtctttttttgagacgtgtctgttcatattctttgcccactttttgatggggttgttttttttctggtaaatttgtttaagttctttgtagattctggatattatccctttgtcagatggatagattgcaaaaatttcctcccattctgtatgttgcctgtttactctgatgatagtttcttttgctgtgcagaagctctttagtttaattagatcccatttgtcaattttggcttttgttgccattccttttggtgttgtaggcatgaagtctttgcccatgcctatgtcctgaacagtattgcccaggttttcttttaggatttttatggtcctaggtcttatgtttaagtctttgatccatcttcagttgatttttgtgtaaggtgtaaggaaggggtccagtttcagttttctgcatatgactagccagttttcccaacaccatttattaaataggaaatcttttccccattgcttgtttgtgtcacatttgtcaaagatcagatggttgtagatgtgtagggttatttctgaggtctctgttctgttccattgctctatatatctgttttggtaccagtatcatgctgttttggttactgtagccttgtagtatagtttgaagtcaggtagcatgatgcctccagctttgttcttcttgcccaggattgtcttggttatgcgggctcttttttggttccatatgaagattaaagtaggtttttccaattctatgaagaaagtcaatggtagcttgatggggatagcattgaatctataaattgatttgggcagtatggccattttcacaatattgattcttcctatccataagcacggaatatttttccatttgtttgtgtcctctctgatttccttgagcagtgatttgtagttgtccttgaagaggtccttcacatcccttgtaagctgtattcctaggcattttaatctcctagtagcaattgtgaatgtgaattcactcatgatttggctctttgtttatctgtcattagtgtataggaatgcttgtgatttttgcacattgattttgtatcctgagactttgctgaagttgcttatcagcttacagagattttgggctgagatgatggggttttctaaatatacaatcatacaatcatgtcatctgtgaacagagacaatttgactcctctcttcctatttgaataccctttatttattcctcttgcctgattgccctggccagaacttccaatactatgttgaataggagtggtgagagagggcatccttgtcttgtgccgattttccaagggaatgcttccagcttttgcccattcagtatgatactggctgtgggtttttcataaacagttcttattattttgagataagttccatcaacacctagtttattgagagtttttagcatgaaggggtgttgaaggtgttgaaggccttttctgcatctattgagataatcatttggtttttgtcattggttctattcatgtgatggattatgtttattaatttgcgtatgctgaaccagccttgcatcccagggattaagccaacttgatcgtggtggataagctttttgatgtgctgctggatttggtttgccagtattttactgagaattttcacatcgatgttcatcagggatattggcctaaaattttccttttttgttgtgtcctcccaggttttggtatcaggataatgctggcctcataaaatgagttggagagtattccttctttttctattgtttggaatagcttaagaaggaatggtaccagctcatctttgtacctctggtagaatttggctgtgaatccatctggtcctggactttttttggttggtaggctattaattactgcctcaatttcagaacttgttattggtctattcagagattcgacttcttcctggtttggacttgggagggtgtatgtatccaggaatttacccatttcttctagattttctagtgtatttgcgtagaggtatttatattattctctgatggtggtttgtatttctgtgggattggtggtgatatcccctatatcattttttattgtgtctatttgattcttctctgttttcttcttaattaatctggctagcggtttatctattttgttgatcttttcaaaaaaccagctcctgattcattgattttttgaagggttttttatgtctctatctccttcagttttgttctgatcttaattattccttgtcttctgctagcttttgaatttgtttgctgttgcgtctctagttcttttaattttgatgttaaggtgtcaattttagatctttcctgctttctcttgtgggcatttactgctataaatttccctctacacactgctttaagtgggtcccagagattccggtacattgtgtcttcgttctcattggttttctaataacttatttatttctgccttcatttcattatttacccagtagtcattcaggagcaggttgttcagtttccatgtagttgtgcagttttgagtgagtttcttaatcctgagttctaatttgattgcactgtggtctgagagactgttatgatttccgttcttttggatttgctgaggagtgttttacttccaatcatgtggtcaatactagaataagtgcgatgaggtgctgagaagaatgtatattctgttgattcggggtggagagttctataaattctattaggtccacttggtccaagctgagttcaagtcctgaatatccttgttaattttctgtctggttgatctttctaatattgacagtggggtgttaaagtctcccactattattgtgtgggagtctaagtctctttgtaggtctctaagaacttgctttatgaatctgggtgctcctgtattgggtgcatatatatttagaatagtcagttcttctccctgcattgatccgtttaccaatacgttatgcccttctttgtctcttttgatctttgttggtataaagtctgttttatcagagattaggattgcaactcctgctttttctttttgttttccatttgcttgatagatcttcctccatccctttattttgagcctgtgtgtgtctctgcacgtgagatgggtctcctgaatacagtaccctgttgggtcttgactccttttccaatttgccagtctgtgtcttttaatcagggcatgtagcctgtttacatttaaggttaatattgttatgtgtgaatttgatcctgtcattatgatgctggctggttgttttgccctttagttgttgcagtttcttcacagtattggtgttctttacaatttggtatgtttttgcagtggctggtactggttgttcctttccatgtttagtgcttccttcaggagctcttgtaaggcaggcctggagtgacaaaatctctcagcatttgcttgtctatagaggattttatttctccttcgcttatgaagcttagtttggctggatgtgaaattctgggttgaaaattattttctttaagaatgttgaggctgggcacggtggctcacgcctgtaatcccagcactctgggaggctgaggtgggtggatcactggaggtcaggagttcgagaccagcctggccaacatagtgaaaccccatctttactaaaaatacaaaaaaaaattagctgggtgtggtggcacaggcctataatcccagctacctgggaggctgaggcaggagaattgcttgaacctgggaggtggaggctgcagtgagctgagatcatgccactgcactccagcctgggtgacaaagcgagactccatctaaaaaaaaaaaatgttgaatattggtccccactctcttctggcttgtagggtttctgcagagagatctgctgttagtctgatgggcttccctttgtgggtaacccgacctttctctctggttgcccttaacattttttcctttatttcaaccttggtgaatctgataagtatgtgtcttggggttgctcttctcgaggagtatctttgtggtgtctctgtatttcctgaatttgaatgttggcctgccttgctaggttgaggaagttctcctggataatatcctgcagagtgttttccaacttgattccattctcctagtcactttcaggtacaccaatcaaacgtagatttggtcttttcacatagtcccatatttcttggaggctttgtgtgttctttttattcttttttctctaatcttgtcttctctctttatttcattaagttgatctccagtctctgatatcctttcttctacttgatggatttggctattgatacttgtgtatgcttcacaaagttctcatcctgtgtttttcagctctgtcacatcatttatgtttttctctacactggttattctagttagcaattcatctaaccttttctccaggttcttggctttcttgcactgggtcagacgatgctcctttagcacagaggagtttattatccactttctgaagcctacttctgtcaattcgtcaaattcattctccattcagttttgttcccttgctggtgaggagctgtgatcctttggatgagaagaggtgttctggatttggaattttcagccttttttgcactggtttttcctcatctttgtggatttatctacctttggtccttgacgtcggtgatgttcggatggggtttttcagtggacgtgctattcctggtttttagttttccttctgacacgcccctctgctgctggtttgctggagtttgctggaggtccactcccgaccctgtttacctggatatcacagtggaggctgcagaacagcaaagactgatctttcctctggaagctttgtcccagaggggcacctgccagatgccagccagagctctcctgtaggaggtgtctgtcagcccctactgggaggtgtcccccagtcaggatacacgagggtcagggaccctcttgaggaggcagtctgacccttagcagagcttgaacgctgtgctgggagatctgctgttctcttcagagctgtcaggcagacgtttaagactactgaagctgcgcccacaaccgcccctttccccaggtgctctgttccagggaggcgggcgttttatctataagtccctgactggggctgctgccttttttcagagatgccctgcccagagaagggaaatttggcagtctggccacagcaggcttgctgagctgcagtaggctctgcccggttccaacttcccagaggctttgtttacactgtgagtgtaaaactgcctactcaagcctcaacaatggtggatgcccctcctcccaccaagctcgagtgtcctgggttgatctcagactgctgctgtgctggcagtgagaatttcaagccagtggatcttagtttgctgggctccattggggtgggaccggctgagccagaccacttggctccctggcttcagcaaccctttctaggagagtgaacggttctgtctcgctggtgttccaggcgccactggggtatggaaaaaaaaagaactcctgtagctagttcggtgtctgcccaaatggccacccagttttgtgcttgaaacccagggccctggtggggtaggcactggaaggaatctcctggtttgtgggttgcgaaaactggcacaagcacagtatctgtgctggagttcctcaggctcagtccctcatggtttcccttgggtagaggagaaaattccccaaccccttgcacttctcgggtgaggcgatgccccaccgtgcttcagctcactccccgtgggctgcacccactgtccaaccagtcccagtgagatgaactgggtacctcagttggaaatgcagaagtcacatgctttctgtgtgaatctcgctacgagctgcagactggagctgttcctattcagccatcttgccagcaatcccctgcaactcttaatttctggctacaggatcagtaatgtcaagggtgtaagtgactggcccaatgtcatatggctcgtttgttacagaatcgggatgcaaaaactgagcttgaaaaatcaaccaaccagtacaaccacaacagcagggcagggccacccagcctctgtgtttcactctgcatggctggcccaccaagttcccttggccttatggcttctcatttaaactgcagagaagctatggttaagtcaaaggctcaagtaggttagagtgaattactgaatcagaggagtcctatttacacaaaggagggaaggagtatcataaagaggaagaaaagtaaaaggaggcataaatgaagaaaatgaaagaggaatccgctaagaatagacaaagtgagcgtcaaaatgactccaccccaggaaggagagggggagggacccatggagcaggagggaaaaggattcctccccctcagtaatcttaattataacagtataggacaggtatgaatagtgttgttttatatatgagaaaactgaagctcagaaaagctgtatcacttactcaaggaaatacagttggtaagagtctcctaattctgtaaattttttcttttcataggtctctttcttcccttgtttccatcattatttccctctggcctccttttatgtgtacaaagtgaagtacggaggtttttaccttttttctgaaatagttatcaaatatcccatgatggagtgagtacgtggttaccatgacaacacagccctcactgaggactagcctccctgctttgcctccggaatcatgtttcacggaacaggttcctctccgtgcaacttctagcagctgtaattctacattttgtttgggtgattatttgctgaatgtctgtcctccactagactatgtaagtttcacaatggcagagaccagcctactttgccaagtgtgcccccagcgttttgcacagtgcttagcaccaggatctatgtgttatttgctaagcaaatgttctgtggttcctctccgctctcttctgaaagttacatggacagtaacctttagctcacaattatgttaataaatactgtgtaacgagtcgggccggtatttacagatagtatacacgtgaatgaacacacacacacgactgcacaacagcccggggcaggtgcactcaagaggaaacgcgcacagtcggagccagcctgaccaacgctgttaaacaccgctgcgctgggctccgcgggcctctgccgcgtgggagggcacccaggctgacgcgctgcgggagtctggggcccactgggacttgcctgccgggccgggtggcggcggcgtgggcggtgagctgcgcggtgattggcccgcgcctgccggggcggggcggggctggcagcgggaggcaggcgcctgagccaaggggggcgtgcgcggcggcggctgccgtagtttcagtataaacaaggaacccgactggttagacagattttgtttttcttcttcccgcgcgctttagctccctgtcctttggtcgcatttgtgggcgcgcggcacgcagccgggaggccgaggactcggagttcacctgcaggtaggttgttccctggctgggttgttctcccggctgggggaccacagcccggagcgggaactccggaccctactgcgcgctgcgctctccctggagatccctgggccgcgcggggagcgagcggggctcagagacttcaccggctgccgggtgcgctccgaggcggcgggagatcccgaggcgagtgagcgcgaacgcgggcgccaagagccgagttacagcccgggaccgggggagggcccctgcccggccgctgcgggtacctgggactgccgcggccccaacaggtgcgaggccgagccgctgggacccgggcagggccaggcttgggttgggttgggttgtgccttccctctttctccctgatcctgcagccaggccttctgtctcgagataggtggtttttgaggatttgtcttgagttgtaatcgcgtccatcatttttttcatcccttctttccttcgtgtgcatacctaggttgattcttccacttcttgaccagttttgtgtgcgtgtgtgtgtagggggagctgtttatttttgttgtcagtgccatgtaatctaaagtctgactcgtaggaagggacaagggaacagaagtcacatactcgccaccgacaaggtgatgtgctgtcatccttcggtgttcacctggcaaacttgggagacactgagtcgccttgcttttgccagagctcagttgagtcgcctcgggtcacctgcctggggaatctcagatgagctagaggtatctaggagcctcgcgggcagtcagcttaagggaggttctttctaagggagctgtgaaaacaacttaagtgctgcaccagggaaaagggcgagacgggggctggggtgcgcgcgcctttgtgtgtgtgtatggacgtaccatttcaatactgcttgctgtcttgccccaaccaaatcggcgcagttcaggcaaaagcaacgtagcttaatcctctgacactgccgagggtggcacaagtgtggcagataacacaaggagattgtctagacggcgattttctcttcggaatgtagatgtgtccatcctccctgatgaattcggtggatatggtgtatatagatgaatatgcacacaaatttgtgtatgtgtttgggccgaacgcgtctccaaggagtccttcgtcagcaccatgtgacgacggtcaggaactgctggtgtgtgtagatctatatttagctcagatggtctaatggccgaagggagggtctctgaactgggtgcataaaggggaagagtctagggatcagggtggtgcactcttgaatgatgtctggcacagtcacactcagatggggtgaataattgccctttcctcgtgaaaacagtagctagagcttggcatgtgatggctatgccttaatttaaaacatagttggaccatggcgataagcctctgctaagaaacaaggaggtttacagttaagcagcgtatatacctggttggccgtttgggtgaaaataactggtcccatgagatttagaacaaatatagagttgctttctttaataaaaagaaataaaaattatttgctgttgaggttttcataacagaaaaaaagaaggcagcttgttaaaccctatcattaaaggtaattttatttttttaagtgaggggcagtggtggagctagagaggaggaccttagggcacttttgacagatatcagggtttacaaacagcgttatattatgcctctcaagcagattttctggtgaagatgagatcagccactgattaacaagtttcttgttggcattcttccactgcatgtcgggtcaatcctttgttttcttggaggtgggcaacatttctaactactaagcatattggccttgtactttccagttgtctaacgaagtgttacattcttagaatttatttctcctatggtgcattttcagtcttgcttcattttatgtgctccactggatattttatctgatactaacacatctaatacctgggaatcatactgtcttttggagaagagaatcaccagaaagcattcccatgtattgtctcccgctaaccccctacagcttagcatctaatagattatttatatgtgtgtgtgtgtgtgtatatatacacatatatgtacatatacacatatgtatttatatgtataactaaatcaaagtattataataacacatagttcttatataacattttattcttagaacctaaaattaactactagttaatagagtacaatagactatataaaaacaattcaatacacctttctaaggaaaaagacatggtaagaaaattgaaggggaggagctgggatccctagtatgactcaggagtgttgggatcagctttgtcaatatccgcagagtacctggaagaattggacttgggaggaacattgggatagccccaggagagcacctccttggaaaggagatgggtgaaaggaatgtctttttctttgcttgggagaagaatctagaatccttgaagcagggattgggaaacttgattctgatgccacacataataaatgaaaaagctgtgaaaacattttgtgacttcttaaagaggccaattgcactgttaaaaatgctgtttaagatttatgggatttttattagtagtagttgaattcaggtattgccagcccacccccctcactttttcagacctatagttgtcctttttgattctccagttaaaactacaaaaaagatccatgcaacctttgcttatcctaaagtgacagatgttatagcctagtgctgtggcatatttctgccttggaaataaggagacttgggttctggttgatctggagccctaatcagtgatttattttttctctatgcctgcagtgtctataaaacgactgtggggagttgaacagaatgatttatgagtttctttaggtctgtcataactgctttattttgttgtactatcgcttcatgcatttacaccctgtcttagaggtggactaatgaagggacaagtgatttgcagttaggtgttcacctactttctgggtacatggaaatgaagagaggagagtgaaatttcttttttatttatgaattcatgtagaaatttaatattaaactgctttttgctttgtttttctttaggtatgaatattaaaaatgattatcaaaaagattggtgtcagattattttttggcctattaaatcaatattactatccactaaatttttaaatttgtcttcaacaatcattttttcttaggtttatatttattatttcatttcaggatatgcctatgtctggaaatcattcagttgattcaaactttattaggaaaccctgcttagaaaattagtttaacccagagaaagtacaaattagcctggactaccaatatctttctattgatctaaaagagaaaaatgggaagggatgaatatagtttttcaaaaactcacagctggaaaattatcccagtaaccatgttatatactaaaatataaatagaaaactctactttttaataaacatcctcattaggtatcagatcattttcctgagatgaattaggtgtagaaaaataaaacctttcattaaagaatgttctccacatgctattatctaatttgggttgagatctaccttgtataaatgatgattcagctactcatatctgtgctgttcagtatggtagccactagtcatatgggaatatttaaacttaagtttatttaaattaaacaaaatttaaaatttagtttttcagttgcaataagccacattttaagtgctaagtaagtcacttgtggctagtggctgctgtattggattgtgcaaaagaaaaacattttcagtatcccagaaagttctttttgacagcactcaattaggtaatgatgattttgattatccagaagatcatttttattcttccaggaaaatgaaatatttaattctcattatagatgagcacctacaatgtaaggcattatgaccaaatggcattattagccagtacgtcttcacctgtacagtatgagctgtatagttcaataatatgccaagatcacaaataccagtttctcaatatattttccccataactctagttatccttttgcttttctaaaccagcactgttactgctacaaagtgccaactctttgaaagacaaggaacgaggagccatctactgtccggtttaggaactgcatggaagatgtagctaaaaagttaatgcataaagaatgtatgcattacattctttacattcaatatgtcctgggttcagttcccacacagtaaagatttatttcatagaagagttttaattgactctccaggttatgtgccgaaatgtcatttgtggtttaataaactgctaacaacacatccccaagacaaaagatgacaaatcttagctttgtttttcttccaaggaaaccaaagatagtaaactatttgagtcagaatccccttcctccaacaattaggaattagtatgaaatatttaagcagcatctaagacaaatcaagcagaatggaaattaactttttgtatggatgctgataaatcaggaaataatatcactgtttcattgcgagagaaataggatcttccttcctcaaaaatactgatttttttttcctcccttaactgtgaaatctactaagcatgtgggactcactttcaaagaaggtacttatcttggagtcttggagtttctgtctgttcacataccaaagaagtgagttgactctgagttgtcttctctgtgttgtttgccctctcaatacaataccttttttttcttttttttttttttttttaaggaggtaagcagaggtgtagcatttctgcagtttccagagatgctgttagaaatctctgatttaggacgtcttctgactgaggacagaaatgggaagataatctggaaattttctttctttctttctttctttctttctttctttctttctttctttctttctttctttctttttttttttgacatggaggcttgctctgtcgcccaggctggagtgcagtggcgcgttctcagctcactgcaacctctgtcttccaggttcaaacaattctcctgcctcagcctccccagtagctgggactacaggcacccgccaccacgcccagctaattttttgtgtttttagtagagacagggttttaccgtgttagccaggatggtctcgatctgctgactttgtgatctgcccacctcagcctcccaaagagctgggattacaggcgtgagccaccgcgcctggcaatcttgacgttttcaaatttaaaataagtcatgttttaaatagtgtcagaaacttgacttttgcctttcaccctggctcaaatccatagttagatacaccctatgaaggtgcagtcaatctttgtattctagcagggcgaaaggagacaggctgcaagtacttgagataacagctggagtaaagctgaaatacgtgaactcttaattcagatctatgcagcttcaagggagaaaaggaagaaacaagttgttgaagatgaatctcaccaaagggcaaagtttctctggcatctagatgggaattcgggaaccagtaattccgggatattaaattaaacctctccccactaaacaaatatgctttcaaagttcagctgtgatacggaggccttcatctacttaagtgtttttcttttctttaattgggacacatgcccaacatttgaacagaagctaaaatattatggtcaacatcaaggcattggatttattaaatatttcaccaaagcactgtatgtatgatgaaatagggattgaaaaaaataaaccttttttttctctgactcttacattttctgtctctttccaagtgtagaggaaatgctgacttgacattctagtagagatttacaaagcacctattgcagacattgagggatagcttttgattcagttcccatacccatcttttcctcaacctcttttccaatttgaattgtcacctgaaaccaccttatcctggtgcacctgcttcatcataaataacattgtgcaaaagcagtcgctaattcaaacacagtctgctgtttagaaaaaggcagcttttcatctggcactttagtggatttgaaaccattaggcatgcctttcaaatccattcatatcgtaaatcacccagagcttgcttccttgctgctggatcaatgtcaggctgaactttttcagggtccttggaagaacgtgatctatctttgtgaccaaattagctgcctctgtaagatgtcttgtctgtcaactaacttttcaacttcccaaattaattttaagaaagaacattcatcttgtgtacctgggttgggtatatcttaacttcctgttggaagattttccagcataacctgtaatctatatgctaattatggtggctctacactttcttttcgcctgtttcattgttttaaaaccagagtctgttttccattatctccctgcatcttctaatatcctaaagtgctgcctcaatttttgcagaaaagaaaagagaaagcccatttcaatagctgtacccaaaccaaaataattatgattattttattctcttaactcagtttgataggtactacctgaaaatacaagaattccttgatttctttctttctttttttttttttttgagatggagttttgccttttttgcccaggctggaatgcaatggcacgatcttagctcacaacaacctccgcttcccagggtcaagcgattctcccgcctcagcctcccaagtagctgggattacagccatgtgccaccatgcccggctaattttgtatttttagtagagacagggtttcttcatgttggtcaggctggtctcaaactcctgacctcaagtaatccgcccgcctcagcctcccgaagtgctgggattacaggtgtgagccaccgctcctggcctaagagtttcttgatgtctaaggagccagtcttgaaagtgttagaccaaggttactgtcagagccaccatgttcttcttccttggcgtagagaaataatatctaggttctgtgcaggtcagcacatggacttcttaatctggggtctgtaaactccctgaaagtatatgaaaactggtgtgtaaatttctctgggggtggtgatggggagaggtttgtgatctccctaaagagttaagagccactgactgaattgaatatactctgagttgtaaagaactggcttacaaatgcaacttcgtaaggtgagaatagcttttgagattaacctgctctctgctttatgtattattggtaggatttgaataaagtcagcagctttttcttgtgtctcatacaaatctctttttttctgaaggaattagctactttgaagttggactttatggtaaattaatgccagtatttaacttgctgttccatccatatattctaattttggagaagagtcagtttttcctaaacaaaattttttgttagctggtccccattgataggtatattgagttaggcaaaatttttactaacgacagatggcaggcagtggagaggctggttctgaggctgtgttgcaaagtgtaaagaggagtaagttgagagtttataggatctcagagacagaaaatattagttgtggaagatgaaaggagaagatttgctgccaataaggaaggcatgagaactgcctgactgaatgaaataaatggaagttatgggttacgagcaaccttaccctgagcctttcttcccctggagaaattgttaggaagtgattcctggagttaatagtgcccagggataaatacttgcctggattctcatgcccagcactttgaatattggatttattttcttaacaagaactaaaccaatatttaatcttttgggcctcacttttcaattccagaactgaagcagttagaataaaagacccagacatcaagtctgagtaataccgaacaaacagtagctcttggtgtggttaacaagagggaagatactttagagaaaacagactactatgtttgtcttcttaggtattacaattctgttccataaactgtactttctgtaccattctgctgatttttccttgtgattataaaacgcttctattacacaggcagttgatccttccgaaaacagctagactggccactggttagacattgtccagcaatgagtgatgaatactgtgagccatgatttttctcttggtcatttctttcattaaattttttttgccggaaatctataaagtacacacaagcaaatattactatatttcattgagtctaagaggctatccctcgttagatgctctgtcattgcatatatcactttaaaagactgttaagtaaacatgttttcttaccattcaactgtttacatgcatcccagttttgaggatattataattttttttaaagtccatattggaatctctggaatctctatgtcttgatgagaccatgctttgatggcaaaggtcagtagcttaaatactgctgttgacagttgaactttttaataagagtaattaatggtactaatacttctttggagcaaggatttatgtagaacatgtaaaatgtatgaattattctaatagcctacaatttgagacagactgacaggatttttgtttaatgcttaaactttagaagttcaaagaagaccatttgcagcatatcataatgtagtgtaataaattttgaacctggagtctgaagacctaactctgaaaccctaccccacctgtcccttactccatgtctaaccccaagcgagttattacagtttttctgaacctcagcttcttatatagtcaaaaaaaagatggggatgcctgccagatgaggtggttgtagaatccaggaaggcatttgtagtcagtaaacaattacacaaatggagccaatgaaattctcagagccctctgcatcacggatgtcataagagagacctggaatggggattcagagaggtaaaggtctgtgaaatgtgaagacattttccagcacacaatatcccatagtgagaagaattatgactaatgaagggagaagggattaaggaattgaaaagattctgtctggagtatatggggaggtagaaaaataagactattgtgcataataaataatgggctgaagtgacttgaatctcagtagttggttattgctatgtgcaagttcaacaatcaaggtggtttcatgggaaaatgaaatcagctaattagcagcataactttgggcttgttagaaggcagaaaatagcctgtgacataactctgttcttacagttgatttttaagtacaataagccataaaccttattcatttacctcaatttggtttctgtcactatttgcattatattcttttagtgccttgttggagggagttttctaagtattgatattttgcacctcttcagagaaatactgcaagtggtatagttccaaaaaacaatacacaagccttttgccattgctctaatcataatgctctaagaagaaccttgcactaaagaagataagtagttttgttactattttggaagggataagcaaaattggaaataacagatggaaaacatatctggtggtgctgagggtttgaagatttcacagccattaagtgccagaattaggacttcattaaatctgaatctttgtccagatctgagctcttgtctactctgcaggaataaataattaagaagtgcaaatacttggtagcttttggtgctgattccttgaaaacaaaatctgagtgacccatgaccgttttgtgggttggtgcttactgctaattagcctctggccggagagtacttggtgcaggggagttccatccagcaagagtgcagcgatgtgcctcattgctgggtcatcttagcctggtcaccttacccccttgggtctcagaagaggagattggactagattgtgatggcacatgggctgtggctccttccatgactgtctgacagtcattgctaatcacttacaacctacattctcccactgagctacagcttccatattttccttgctcatcctcaggcctttagaccaccactttaattgattgcagttggaaagtgaaaggaaagtgaaatgaaatgttttccagatactgggccaggtgatttctgtggttcctttgaatatttatcattttctgattttttggaattcccaaatcctggccaaccatctcccaaaagcactttgttagaatggttgcgctagcaatgagtaagtgctccaatgaaggaaaatgtgtggttcctgaaagaaaaaaatcccaattccaagggcatgacactcctcatgctgcatgtgaaggacactgtggttataaacatctaaaactttttaaagccagaggcaaccaaatccagacaaagggttctctctcagttatctgaaggaacttttaggtgcctctcatctcacgtccctgcctcctcgtttgagggcactatgagtttctcagggcaaggacagactggctcttattcttgccgccaaggatggccagtttgcaacgattatattgcacaggagtagtactcatagaaacctggcaatttgaggaggaaagaaacataccttgtctattgccttataaaatgttaacattgaataatttatttatttaactgcagttcctacatgtgaggtcttgccaactaagggtgtgtgcagaccatctgtgttaatgttatatcccatagtgcctgaccctttggctgctatgactatgtgctacctaaaggagagacatggggccagtgaccctagtagtgacaaatctctgtgaatagagtggttctcagtcatcaccttcttcccatttgtggctttttcatggatcccgttaaattgtccctcaacactggtttgtggaggggacaaagtactcagaaatgaagttggtttttatctcccatttatttttcttgatgcttcttttatctaattctgttttcacctgccaggttggcttttatgatggatgttttctcttaatgccccacccctggccgccccctgctgaggcacatgcacaggatgtgatgctctgtgtacccatcagctgtagctggaacagatgctcaaggagtgatggatgtgacttagacagggctccacacccctcccacattgagatgcaaatatcttttggcatcttaaaaagaaagattagtccaggttatgtccttctgctgcctccacacaccctgtccctgtcagtccgtagcttggagtatggctccccttcattgtttgccttctgaagcccccagtctctgcagctcttcaatgcctccattgtgcagacgtggtgccagagactgggagtctgttctcagggccgggtgccgtccctaggaattcaagtaataacttaatagcctctggcctctgcagagcaccctctgacaaggcctttgtgaactgcaaagtacacagatggagaggagcaacttatctcaggactgtcacagtgctccttgctcccaaatcaggtgtcttctcagcctgcatgtttattgagaactgaggctttacagataccaccccacagccccaggagaatttaacacaaaggggagaaaatcaacagcatctgatctttcagtgaaaactgaagagtctacatgaaatcttgtgtgtacacatatacatatataaacatgcacagagtatacttcaactctaggcctactttgcaatttagtgttttcagcttcaattttggttgtcttccagtacttcagatagctcttcagtgttaggtaacttttcccaaccaaattttaaggtgtacacatttccaccttaggaaaattgttgactccatgcgataaagcaatagaagttcagttcccttgcccctttcacaatctgatgtgaaggagtgacatctaaatatgacagccagagacttgagtttaagtccaggttgggcccctcagtctaagcattgtatgatatttgattgaatgagagtggtactcaaaagcatgcatacgtgtcgtactcagagagcaatttggttcctgatgggctctgattctgtgtcagaacctgaactactattttaattgcctattctctcgttactattaaatcttagtgcctattaaagcttacctttattttcatactgcatattgctgacattattttttcttcttttttattccttttaggaaagtatgcctcagactcctcccttttcagcaatgtttgacagcagtggttacaatcgaaacctctatcagtctgcagaggacagctgtggagggttgtattaccatgacaacaacctcctctctggatccctggaagcactcatccagcacttagtacctaatgtggattactatccagatgtaggtattcatgtttctctgaaacacatccttggcaatgagtagaaattgcagtacagtaggcagggaccatagataatacagaattatatctaggttgctaagaatttttctaacaagaaattgcatattgattatcaagtgcattgaaatcaaatcgagcctggataaggatcagattttggtatactatgtgtatcaatttcttttcaggttagttacaacattgtagatggtctgataccatctaaatgaagtatctgtagagttgattcatgcatatagcttagtccttaaatagaaatgtcagagaacattggatgctcccagaatatgtaatgccttttttgtttccaagaccatcactatgctaagaaaagtgaatgtaaccaaggaaagtatatggaagagaaaacaagatttatgctcaagatgtaattctttatagatttgacatcagatgacatggttgctttgttttaccttggtaacctacatttatatagctagcactttctaatctagggaatttgttgtatattttctcagtctttacagtaattccaagagggaagagaggagaaaacgattcagagtgttgagtatttgctgatggtcccactcccagcatcagcagtcaaacacaggttttctttctgggacaagtgactttttcccccttccctgtgctgcagctacctctatggaattgagcttagtagtaggagatttgccgagcagctggttattgataaagatctcatgaaaatatctagagactacattcatttgtctttataaatttaatgataaccttggtgtgcaaaggatagttggtgcttgccgcagtaattcaccatagtgtttcttactgagttatctctctgtgtattgttacatggcattttcagatatgttgccacacagggaaaacttgtagtcaaaagtaaaaggaatcccttgttcagccctgtgtttatgagctagtaaaggcgcctaaggaaaaaagaaaaatcccatggaatttctcttttcattgggagtctgaaattattataacaaataagcactacttcattattggcttcttaggagacaatgtggttaaagaaaagtatatagtgttatattgtgctttattaaattgctttgcctttaaacaaataaataggttacttgaaagcctgcctttgaatgttctgacacaaacactttactgtgatgtgctagacacagtggagaattgttgagtgttatgtgcattgggtaggtaggtttttttgttgttattttttatttggtttccactgagttacaaaatatttggacacacaaccatgttttgtatgggtagtatattcaagtaagatttatctctctgggctgaatttcattcttctttactaaagtgagttatgtgtcttggtatcctggctccctgaggaaggatgtgaaaatgtgctctgaataattccaggagccaaacttatcctgtacttctgttatttttagtatggtttcagggaaaacatacatcagaaggtaaaggagaaattaaccttacactgttttactactagtaggcattacttttgaaactgcagcatatgaacttgatcaggagaacttaatgaaataagacatagtataaaggcaagatattaatttcagagagaatgtaacgatgatgacttttttctgttgctgcagagaacatacatatttaccttcctactcagttctcggttatttatgcatccgtatgagctaatggccaaagtttgccacttatgtgttgagcaccagagactaagtgatcctgatagtgataaggtaatggtacattacaatttgttttattaggaatgcttactttatggcttagattttgtgaagttggttccttaagtaaccctggcttatccccaggctgaagtgcataaatggcatcatggctatacaaggggaattgtgaatggtataaagaataaagaacacaggataaatcaaatgcagttcgggtgcactggctcacgcctgtaatcccagcactttgggaggccagggtgggtggatcacctgaggtcaggagttttgagaccagcctggccaacgtgtgaaaccccacctctactgaaaatacaaaaattagctggccctggtggcgcatgcctgtaatcccagctacccaggaggctgaggcaggagaatcgcttgaacctgggaggcaggttgcagtgagctgagattgcaccactgcactccagcctgggagacagagtgagactctgtctcaaaaataaaagacattaaaaatttaaaaattttaaaaaataaattaattaaatgcaatggagaatccctaggtcctgccttaagttggtggcacttggcattgacatggagggaggggggctggagcttcttcttcatccctaaagactttgcactagaagtttctcagtgacgctctttgtaactattgatttgatgtagtccatagtgataaatatcactgaattagatttgctatttctccctagaaccagatgagaaaaattgcacccaaaatccttcaactcctcacggaatggacggaaacatttccctatgattttcgggatgaaagaatgatgagaaacttaaaagatctggctcaccgaatagccagtggcgaagaggttggtaacctgaatttagcgcggctgctggaattcccaggcagagcctgggtgggaaatggtgccgaattatgcatcctaatctccactgcttcctctctgttttgcctttgggcaagccctccacatcacatattggtctatttagtatgtcaagtgagaatgattataccatcccacttcaaagggatatgatctagagttttatgtgattaatttggggctatgttcatgtcaactcatgcacaggatttatgttgcaagtatgttttaattttactttacttttaccttttttcctcccaaaaaggtttgacacagctagttagatgataaatggcatgttagtagacataaacactagtggatacaaagtaaataacattattctattaaccgaggataaatagtagattaataaatcataaatagaaatagacattctgggccatggcagaaagaaaataaatacgctcctgttgagaatgagtagaggaggacaggactgctgtggtatgagtttaagttccaggtaaaagggaaatacagctggtcatgtaatattcactgtcagaaaaggggaagtatagtaattattgagggacttaaatgaaaaatttagaaactttcttctgaagaactttgtatagggtcatagaatgagatcctacaaactgctctttatggtgtttacaacataccttcctggatagaagctgagttcatagattcatgtgtaaattagcaaagataattcttgggggaggagaagactgagaaaatgaggcaagtcttccagtgctcagaagttgatttaaggatagactctagtataggtagagattaaaagtaagtctcttagataggctttcataaatatcacttccctcagttgagcctttgataagcactaactactagctgtgacaaattcaaggttatcctttttgaagcaggaccagagggctggtattctgtgttgagacttgctgggcaaggatgcccttgtagtttccatgttgcaggtcaacttctgggaacaagtcattcaggcacagatacactttcacctggaaaaagtagatgaagcatttggcaatgatgttgcattttattcgtcttaaaatgcattttccattatgaataaccttccttgagaactctttcagtggtgtgctgcaacgtataacttgataccctatcctttttttctgagacagagccttgctctgttcctcaggctagagtgtagagttgcgatcatggctcactgcatccttgacttctctggcttaatcaatcctcccacctcagcttccctagtagctgggactacaggtgcatgcaactgtgcctggctcgttttttctattttttgtagagacaaagcctcactatgttgcccaggctggtctccaacttttgggctcaagcaatccactggccttggcctcccaaagtgctggaattacaggtgtgagtcactgcacccagccgcaattttttgtgagaaaaggggaagtatattaattgttgagggaattaagtgaaaaatttaaaaaccttcatctgaagaactttggggctatgttcatgtcagctcatgcacaggatttatgttgcaagtgtgttttaattttactttacttatacctttttacttccaaaaaggtttgacacagctagttagatgataataagtggcatcttaatagatataaacattttaatgccatttatcccaattttacaaaatcagactaaaattatgtaaggctagcttttgaaaaatttgtatgggctttcctgtattatgttctcatgaaaatgggattaaccattttactgttactttttgacattatattatgatgaacccaagtgctcgagacagccattatttctgccgggccgaatgagtcatttcctgagtcactgtgcaagttatgacggttataatcattttgccagtttgcctcttacaggttctagccaggtatgaattgataggtcccttgcttacaaaggcaaaagttaagcatcatggtgcagttttgtagtaaatcttatgttagaggggttagccgtggagttccttggcagggtcagtgctggctcagtgaccttggtttatgtatctgaagctgctcaaaagatcagtgacatcataagggctttttcttgtatgaaggctgagacctaagtcaaacagttttcatttcagtttggttgtctttagctacttaacattatatgtcagtcatcttatcttccctctattgcctttataacttagttctttccaaaagaaacaccttaaaaatctttttcttttaagataaaatgttggcattttgaaaataccaaatggatggtccttgttgttgcggcagtcaaaggggagatcatttttatttgtgtttacctgatgagaattggtctttttgtttaacagaatcaagccattcgagagctgggtagaacagagagaagggccaaacagccttgtgaccctggcttcttttcaacactcctgggttaataacatattcttgatagaaaccttgcgaagttcagatggttttgagcatgaaaagaggagataagaagacaagccagttctaactgaggaattgattaaactaagggttgagtggagagatgtcacctgccttgatcgggttgggtttcacagggagatgttgtttctttagctgcttctattcagtattcagaattcaaatccacacttgccagctggtttatctgagtgtgttttggctagtcctctaaatccttgctcctttctcatctctataaatcacagaagtaactgccttgtgttaatgccctttcagctctgaaactgtgtgatcgatgtccttcctccagttctttggcttcaggctccttatcagtcacgtgcttaggtggctctcctcagagagaccttcccttggcacccaactatgatcataccccctcccattatgggctttcactgctcttcccttcatagtcattcttagcactctgtgatgagtaatgatagctggccctctctctgtatttgtgggatctgcatccatgggttcaaccaacctcagattgaaaatattcaaaaaatattaagtctgtactgaacacatatagactttttttccttgtcattattccctaaacaatacagtatcacagtgatttacatagcatttacgttgcgttagctattataagtaatgtagagatgatttaaagtatacaggaggatgtgcggatgttgtatgaaaatactgtaccatcttagagcggagacttgaccatctgcagattttagaatcccagggaagtcctggaaccaatctcccgaggatactgagggatgactgtacttgcatttttattgcttgttttcccctctagaccccatgctgtgccctctttgttcaccacggcatccttaactcctagctcagtacctggcacctagtattctctcagtagtgtttgaatgaatgagtcaatcaatgaatgaatgaacaaatgaattactggaatagggaaaaattatttccctctattggaaggaatatgggtctgggttgggatttgttgcttcttgcctgggacttttttttttttttttctccttttggcagtcagtgaatccaggtgtgccgtatatataatttagtcaggttcttctgaatctaccaggacagttctacataatttggcataatatgtttctcccctggggatttgcccaaaatgaagtggtttattaggacttgcctgcaagaaacatgaaatgaaactaatgattgaattacatgacaaatgactgtagtgagtagaatgcaattttctcttccttaaggggctggtctttataataagagcttctatctttatttgccaggtaattactgtcactggcatttgaagttataaaaaagaataagtacatatttagtaattcatgactcagtgaggaaccatgcttaacaacacaaagcttgatttctcaaatggaatcaactggcagcaggaaacttttaaaagaggtcatatacatacactctctcacatgctcacacactagttgttgttgaatagctttcccccatactctattgcatacatttttcccttatattttgatgcagttttttgctaacaacctgattatacattcctctgcctcttcccccagtaaatttttctaaaattgcggaataggctgggtgcggtggctcatgcctgtaatcccagcactttgggaggctgaagcaggcagatcacctgaagtcgggagttcaagaccagcctgaccaccatggagaaaccccatttctaccaaagatacacaattagccaggtgtggtggtgcatgcctataatcccagctacttgggaggctgaggcaggagaattgcttgaacccgggaggcagaaattgtggtgagccaagatcgtgccattgcactccagcctgggcaacaagagtgaaactccgcctcaagaaaaaagaattgcaaaataaaaatctttcagcagatatgctggtaaagcattgcttctcacacttggcttatacaaggatcagctgaggagcatccagagcatgtgacacaagtgcactgcagaccaagtcgatcagaatctctggggtggaacccaggctgcccccattcagcggttctgctcattgcttcccagcaggtacccttgtgtggtaccctgaatagaagtggtaatttcttactaaagtattttctgcagggatcccgggaaggggtgaggagaaggtgcatgatgtaggaatgataacatgcatggaatagcagctgaggcatagaataataaatatttttaaatgagttgttggcttttttaagtgaaaagaactttcttgtgcatgtctcatgcctgtgttatccaaaaaatcccattctgtgggaaaattttaaaacattttatttttaatatatcaagtaatataggaatatattcacttagattttgtttaaaaagaattcatacaaagcaaaagaggccaaaaaactccattcaatccagcttctctcttaaaggtaacaagtgttgtcaattttgtgtgtatccttccggcgctgctcctatgtatacaggtgttcacagaaagtagtgtgtatggcttttgtttccatgtatgtttacctagtattcatcaccctgcttgttttctctgtgttatgtcttggaaacccttccatgtcaatgtaggtagctgtatcttctttcagctgctatacagtagtccagtatgtgattgggccatgtttctttttctttttaaaaactattctattggacacaaacaagttaaatttgtttatactgaaaactcaggcgttttctgagaaagacttagcaaagaagattaagtcccttcttcatatcaaactctgtttagtaaagtagtaacatatagttgtgggttgctcttgtaaacaggctttactgactgtgaaacttcaactttgtaacatgtattttctactctgcacttgatcttagccaaaagggtgagaagcgattctaccctggatagtatatgctgtaattaagtatctccaagaaggtgtttattagccattctgagtaatacactgggaaatatttgcataattattagaagtagtatctaactctcatgtagtcatttgttatgacattttggacaaaggactgaataaaacattttaagttggtagattttgtttgtttgtttgctttgttttttgagacagattctcactttgttacccaggctggagtgctgtggcatgatcagggcttaccatagcgtcaacctccctggctcaagcaatcctcccacctctgttccccccaactaactgggactgcaggtgtccggctaatttttaaatttttgtagaggctgggtacggtggctcatacttaataatcccagcatcttgggaggctgaggtgggcagatcacttgaggtcaggagttcgagaccatccttgctaacatggcaaaaccccatctctactaaaacaaaaacaaaaacaaacaaaaggcatcaacaacaacaacaacaacaaattagctgggtatggtggcacacacttgtaatcccagctattcaggaggctgaggcacgagaatcgcttgaacctgggaggtggaggtggcagtgagctgagatcacaccactacactccagcctgggcaacagagtgagactctgtctcagtcagtcaatcagtcaatcaatatataaataagtttttgtagagacagggtctcactatgttgtctcgatctcctgggctcaagggatcctcttgcctcagcctcccaaagtgctgggattacagatgtgagccactatgcctggccatagatttttactgtaactcaagtttataaaattaaaagaggagggggaaataggaatgagagatttaaaataaccctcaactcatccttgaacagctttgaattccaaaaaaaagacatttcccttgagtgacaaacatattaccaaatagcattttctaaactgataaccttagtgctgtatggaaggtgggatttttgtctgttcaatttttaaatacatagatgtttcattagtgattttagggtgatccatgactatagagaaaaataggggtcatctaatggaccagtttaaagaactcagcagaatatacactaacaaatagagaagaaaaggaaaagaaggctgtgtatgctttttacaccttgactatgcaagagttaaccatttctagatatgttgtcattctcctcataagcaaatatctcttcgtttgggtttttgtaatatactctaataaacaaaattgcctctataaaaaaactatgggtcttatacttgtaggtaaatgccacttaattttcagataattaatctcagcaaatgatattgtggtatttttttaaaagccaatggagccataaacataggcctttctacatctgtaggtttactggggatatcctcctttggagatttaacctaaggaccatgttagcattgaatcagcctgtgtgcctttctctgatacaggcatcataatttacctagaagaatattattttggaaatttttggctagaaaaggaagactgaatggactctgcaacttatatcatagctgtgccctgggattgatggattatgaagtcatttcttgatttaacaaatgttttaaaagtcaggaggttgacagttatctaaactacatgcagtgcttttttaaactagtttctcttaagcatgaggctgtagcataatgaagtagcaaacaaagtggcacctgggagtagtgttgcagggagaattgccatgtggaagagtttggtcgtgaacattaatagtgagtcatgaatgcaaaagaaatgattatgagcccagtggaggtcagatgccagaaatgaatatccactgcttcctcatggtaatgcacattttatgtgtaagtcaagaaggtggtaggccagacgcggtggcttatgcctgtaatccccgcactttgggaggctgaggcaggcggatcacaaggtcaggagttcgagaccagcctggccaacatagtgaaaccccatctctacaaaaatacaaaaattagccaggcatggtggcacatgcctgtaatcccagctactcgggaggctgaggcaggtgaatcgcttgaacctgggaggcggaggttatagtgagacaagatcacgtcactgcactccagcctaggcaacagaatgagactccatctcaaagaaaacaaaacaaaacaaaacaaaagaaggtggttcgagggggtgagttggaagcaatggtatatttctgttaggtagccagactgatgagattgataggactagagaaatcaagaaggtggccctaaagaaaaagccttaggaaaaggatgcattgacttgcgatcaatgtatttcaacccaccagaagtaaactggtaggtatatttctttgctggaacagaggacattcagttatacttagtactcattatactggattccctcaagatgtaatctaaattgtcacgggagtgttttcatggcccaacctgaactgtactctcagtcgcaaccccaaagaagaactaaaccttacaggtttgaaaatgccttatgcatgtgtctcaaactgttagagctagctgaatcttcccgtaactgcccttaaccaagtttattctccaatgtccaggtaaaatcatttgaggacacagtctctgagtttgcctagtggcaaaaccagacacgcagagtacggatgtaattcttcgcttattccctagcagacatacagaaagaatgtccagcaaatgatgcagtgtctgatccgcaagcttgctgcgctcagccagtacgaagaagtcctggcaaaaatcagctccacatccacagatcggctcacagttctcaagaccaagccacagtctatacaaagggatatcattactgtctgcaacgacccttacacgttggcccagcagctgactcatatagagctggtaaggccgttatcatcattgccctttacaaccacagatttgctttgctttggcaaccagacgatatatttgtcagcggtaatgtcacaggagaggtcagaataatccaagtgggaaatcatctgagatagctgaaacatactttgtttatggatttgaatatgaatgcttctgatattctggggattcacttgtaaataaatactaaacaaggctgaagagcaaagagtttattgactttcctcaccttccgcctctaatcagtttttccaaaacctgctcagcctttcactatcttgtggaacattgacccaagcagaaaattgcctccgcacagaccttgaagatgatgaaattatttagggctaaaggtttattttataatcttcattaaaaaatggggggtggtgccaatagtcatagagggagttgacagtccatttcttttcattttctttaatactgttgaccttctgggtttgtgtttcaggagaggctcaattatattgggccagaagaatttgttcaggcgttcgtgcagaaggaccctttggataatgacaaggtaatcagtctacccaaaggtcagcactgaaaccaaaaatgggatttatcagtctatgatagtgggtataaaggacggaagttagaactatattctgttgtagattttaaaatcagaattttttttttccatcagccacgtctgattcatggcagttttcttgagcgaggtctccaagctcctttataatattgccccatcactaacttgtagccttttcttcctccttattgggaaatttagtaagacctttacagcaagtagatgcaggcatttgtggtgatgaaaataggagacgaaagcataatggttttagcagattaagaatctgctaagagagaaggttctgcccataattcaacaatagcaggggcaggaaagacaggatgcacatccagcttgctgagcaaggggcttgactactttgcctcttgttttaaggtgaatctctcatgagaggtttattgcctaggtgcagcccactattaaagaaaataatgctgggcagggactgtcaaatcagtgtacacatataagaaaattttttatctcccagtgacctggaagcattttgaattgttaggcaaagactacaacacacactgctgaaagcccccttctgagagtgggggcaacagctgctttccggccttagaatagtgtctcctaatacaggaagtgaagaatttgttttgcagtagaaggctagtggactctttgtttgtctctttcttttggaaggaaggaaagaggggtgtaattagcctcttcaagctggccttgaacttcaagatgagattaacttttttgcctttgaacaatgtgttactcaccctactaaagaccatgatggtgtagacttctgtttatctacttgggagatacttagtttgttgcaacattatgttctaaaattttgtcctatgcttaattttaagagaaaatgttctactcctctgtactcttagccattttttgctgtatcgattatagcagttggtatttgcactctatctgagtcgggattgttttggaatgcagccagaattcttcctctgaattgtgtttctgaagatacaatccagactaacttagtatcttgggaagaggggtagggacactttttctttggaggccgaatctcactctgccacccacgctagagtgcagtggcacgatcccggttcactacaacctcctcccgggttcaagcgattttcctgcttcagcctcccaagtagctgggattacaggcacctgccaccatgcccagctaattttttgtatatttagtagagacggggtttcaccatgttagccaggctgatctcgaactcctgacctctggtgatccacccacctcagcctcccaaagtgttgggattacaggcgtgagccaccacgcccggcctaaggacacttttataaatgcatcagagtacatttctaggcctcaagtgtttcactggactatcctaaaggactttgatatttctgtaaggataatcaagaatgccagtggttgtctttctctctctctttctgttgttctcaaaagctttcctaatccataaactgagactaaaggctcgtatttcacaaaatgagagtccactacattgtttttttcctctaactcatctgtttactttgttttctctaaagagttgctacagtgaacggaagaaaacacgaaacttagaagcttacgtggaatggtttaatcgcctcagctacttggttgctacagaaatctgtatggtgaggaaatgaattttctgtctcctagttctcaacattattttttcatacttattttagaactgttgggccttcatactggataactgccctctattgtcttttactgtgtagcctgttaagaaaaaacaccgagcaagaatgattgagtatttcattgacgtagctcgggagtgttttaacattggcaacttcaactccttgatggcgataatctgtgagtattttgtggaggatacatgtcgtttatctttacgaatcctgtaaaatgacccacagaaaatgtgcaaatagtatggttttgttagtacagactgtattttttaatccagagttatttgagaatgcccaaaatgctttaaatagccaaatgagtgcaagtatgtgtgtaatctttcttaagtatgcaagaattgttggaatgttttaagttaaccttagctaaatattcatctacaaaggcttatacataagatatttgtctacataaagagttttaaaaagtattttggcagcttgcatatcaagtattatagaaataatgatccaagactaagttatctgattccttggacaagagagtggcctaagaaactggtacattttctaactgttcaggcttctagtacttatcacccacagaccttattactctagtatacaaactcactcctctatatcatggaggttttaacatcagagaccatgtttctttcctttcattctataaatatgtatggtaacaatatgtcttggttgttccaatttatacttgttgtcttgccttaattattgataatagcttttgatagtagctctttcattaaaaagtgtcctagtttgtatgatcaattatatggccatcttataaatttgtaggtgctcaataaacatttgaatagaagaataggctgggcacagtggctcacgcctgtaatcccagcactttgggaggcaaggcgggtggatcacaaagtcaggagatcgagaccaccctggccaacatggtgaaaccctgtatctactaaaaatacaaaaattagctgggcatggtggcacatgcctgtaatcccagccactcaggaggctgaggcaagagaatcgcttgaaccaaggagtcggaggttgcagcgagctgaaatcatgccactgcattctagcctggcgacagagggagactccgtctaaaaaaaaaggaagaagaagaagagagttgaggtcttttcgaaggatcagtttgaagctagagagtctaccaaatttagttcaagaatcttaatctaataaattctcccttccaccaatttatttttccattttgtttacatatcatttcctctttctctccccccataaaaaatactggccaagtctcagcttattatttttctgactaactctgtgaaaatagcaaacagaaagattatctgaatcagggactgaaaggcccacagtctagataatagattacttaatttgcctcttctactagtaagaaaatgtcaaggcaagccatagcatcggagaaaatgtatgtaatacatagagctgacaaataacttgtatccagaatctacaaagaaccctacaaatcaatgaaaagacaaataacccagtaaaaaaaaaggccaaaagactgaaacagatttgtcatgcgagaggatactgtatattaatggctaacgagtatctgaaatggtgttccacatcattagtcatcagagaaatacaaattaaattgcagcaaaatattaataccattgcatacactagaatgactggaattttaaaaactggttacaccaaatagtgttgaagatgtggaacaagtggggctcttattgtacattattggcaggagtataaaatggtactactactttggaaaactgttcagcaatttcttataaggttaaacatatttctaccctgcaatgcagagattgcacacacctacatatttactccatgaaaatgccaacacatgtccacagaaagatttgtaaaagaacacagctttattcataattgcccaagactggaaacaatccaaatgcccatttacaaatgaatggctaaataaattgtggcatgttaatacaatgaaatactgtttggcaataaaaatgaacaattgatacatataagtaacatggattaattttagaatcattatgttgtgcaaaataagacagacacaagagtggatacagtatgatttcattgatacgaagttctaggacagacaaaacgaatctctggttttaggcagccactgttctgatttctgtggtggtggggaggtgaccaaagagggtccaaaggagctttctggggtcatgaaatgtgctactatatcttgattggagtggtaatacatggacttacacattagtcaaaattcatctaattatgtgtttaagatctgtgtattttttgtatgtaaattgtacctcagttaggaagcaatctcccacttctggtccttaaaatatgaatgttggtggcatggaattaatatacgtactcatttaggctggcatgggttccttttctgtacaacagccactgtaatatttttctgaatagttatagtacgtaaagtatcattcaggagaggcagcatggcttgttggaatgagtgtgggttatggtgttagctccatgtgagcttccatctctgttacttgttaactggatatccttgggaaaatttcttactccctggaactttagcatattcttttaagaatgttgaggggatgtatgagatagtacacgcaaagcgtgtttgacacattagtttctaggtcaaaggtcagcaaactatgacccgtgggtcaaatatggtccgtcactggtttctttatgaccagtgagctaagaatggtttttatctttttaaatgattgaaaaaaatgaaaataataatactaacatttctaacatgtgactgtaatataaattcagatttcagtgtacataaacaaagttttactggaacacaaccataaccatttgtttatgtagttatctacataactggatggtggctgtttttgcatgacagtgatagtgtcttgtagtgatgacacagaccatatgggctgaaagcctaaaatgcttactctctttcccttcatagagaaaatgtattcacctctgcacagagtcagtgatagcatttatgctgtttctcaactcagaatttgcaaacaaaaaaagttataaaattggagtttgttacttactaattttagaattctcacttagtaatgaaagtattttagaagtatgtgtttatcgtttttcttatttctctctttcaattttccttttttctccccctccatttcaaatgggaagctggtatgaatatgagcccagtctctcgactaaaaaaaacttgggccaaagtgaagactgcaaaatttgacattcttgaggtatgtgaagctgatgttttgctgttaagtaacactttacacctggaaagtggaattcctttatgtggtcttgcctctccatcagactacgacagaggaaaaagcccatctatctttacagacccagggaaaggaaagtgggtagaattggaggggaaaataaatcaggttatgtactggttgctttataggtagagatgtccattctggggttaattgactggggaaatagtgacctgtcagtcacatcaccttatatgtcagaatggaattttggtcctgagcagttgagagttttacttcactgtgagcctattagcttcatttatcttcagtgtctcaggggaagggttccccatccctacagtaacatttgttcatcatcctttcaacaaatttagctgacctgtgaaaaagcccttcccatacaattctgaggatagtaagaattgtgggccaggcgcagtggctcacgcctgtaatcctaacactttgggaggctgaggcaggaggatcacctgaacccaggagttcaggaccagcctgggcaacatggcgaaaccccacctctataaaaaatacaaaaaattagccaggtgtggtggcatgtgcctgtagtcccagctacttgcagggctgaggcaggaggattgattgagcctggaaggtgggagctgtagtgagccaagatcacaccactgcactacagcctgggtggcaaagtgagaccctgtctcaaaaaaaaaaaaaaaaaaatcgcgtgcaagagtatgtgtatttgaatcatattcatctcagtactaccttggtatatcagtgcttcgaattactatctttggagacaataagaaagtgttctctcccaagttttctcccaaattggaaattaccattatatatataatgttatgatctattcatacaacctaatacatttattttccttcttgcaaaatgatatgcttcaattatttgtgcatgatttgtcactacaaagtgttggatcactatgcatggctaaccatcaacgggcccgttgaccttcagatgcaaacaggaaatttttctgatgctggtgtttgactcttatttgttttacatctaagctcaacaattagcctagaaagaatgcggtttaggtttaacattattgaagctgacatcagctcgcataattacaccaaatctcaggaaagaaaacacttgtgtcatgtgcatttgtgtgtatgagaaggataaatcatattcctactgagtttcctaacttattttgaattttgtatatagctaaatatgtgatcttataaacttcctacagaagtttacaataaataaatagttaatattcttctctcttttatctatagcatcagatggacccttcaagcaatttctataattatcgaacagctcttcgtggggcagcacaaaggtctttaactgctcatagtagtagagaaaaggtatgcacttaaagaagtatctttcttatggtagagttgctgtgttttatgctgaaatgctatgtgaactacgacactgaagtttttttacttgttaagatttaagagagagacatgtgtactctagaaatgataccacttgacacacagagaaggagaatgctaccagaaagtttgttagactggatattgctgtgttactattacattacttaaataattactctgtagtgcctcttaattgtgtttcaagcaatacattaagtcatatgttaagatgactcatagcattagagagtaatttagtttaatggtttaatggaaaatagacatttaagctctgcacaaggtagccgacttaatataaccttttctcttaaaagaattagcttacctcccatggttaagtcatttattttcagaaagtgggttagttgctatagcattaggtgtgctgttactaattggattatgggggtagcagaaaaagtacaggggtcatgtctgagaaattaatggtcctttctcactctaccctactcttaaaacaagttagtaccatcctgcatctaccatattcttgattctgagggtcctttcttggcacattttggtgtcatatttctttacagaggaaggataggctgtttcaacatttggcagtcatgttatttgagaggtgaatacttagttatggtaactgggttaatgaaggttgcttgatggaggttattttcggtttagattccatctgtcttttaacttaaactatatcttccacaaataaaagaaaatgaggtaaaaaacatttcatggcttcccaatcacgtcccctgaaaaaggttcggcctcaatgatctgaaataaaaataaacacaaaaccccacctttaataaatgcgaacttggttctcaatcagatctgaaatatcagttctaacaatgtttgaaggatattgtaaatacttcaaattttttatttaaataaagaaacttataagatcagagggggtatgaagcagagatgacagtcttactgtagcctgacagagtttgccagcttttaagttttacttgctcaatcccagtactcttgtgattagattgagaaaaaaatctaatatgaggtcttttaagcttcaaacagtgagcacatgtgggaggattgcagtacactgaagagtaagtaagcccactgaaggggctgtatgtggcctcattcaccttctctgtgttgcagggcaggcaaggttctctctgcatgggcttcagtgagggcttggtgggctctgccccagggaggaggctgtggagtcatatctgtgagtagggagctgcattgttggccaaagaaattctgaagtgcaatccctccaaaatatctcagttgtggaattctaagtttttttctacaaaaagtcccaagtatttacccttcacatcatttaataaattatgtctgctttagttttgttttgctttaaacaggttctatgtgaacatataaattgtactctgtagttcataaaacaaatgaaatcacagccattcaattattaaaaagtcaagaaacaatagatgctggcgaggctgtggagaaataggaacacatttacactgttgttgggaaagtaaattagttcaacataatttacataattatggaagacagtgtggcaattcgtcaaggatctagaaccagaaataccatttgacccagcaatcccattcctgggtatatactcaaaggaatataaatcattctgctgtaaagacacatgcacacatatgtttactgcagcagtatttacaatagcaaagacatggaacatttgggttggttccaacccaaatgcccatcaatgatagactggataaagaaaatatggtacatatacaccatggaatactatgcagccataaaaaggaatgagatcatgtcctttgtggggacatagatgaagctagaagccatcatcctcagcaaactaacacaggaacagaaaaccaaacactgcatgttctcactcgtaagtgggagttgaacaatgagaacacatggacacagggaggggacaacacataacttgggccagtagggggctgggggggcaaggggagggagagcattaggacaaatacctaatgcatgtggggcttaaaacctagatgacgggttgataggtgcagcaaaccaccatgacacatgtatacctatgtaagaaacctgcacgttgtgcacacgtatcccagaacttaaaatttaaacaaaaaaatcacagccatttaaaaaaatgccatctctttttacagttgggctcaaaggctaggagtgaaagcatttctagttaaatctaccttttattcaagaaaattgggattcttggccgggcgtggtggcccacgcctgtaatcccagcactttgggaggctgaggcgggtggatcacctgaggtcaggagttcgagaccagcctgaccaatatggtgaatcttttgtatccttttaaatctcaagtttgtgtggtcagagtggcacatctctaggtacctaatagagaacaaaccaaatgtgtcttccacacagcagcccttaaatattctttaaatagctgtttgttttttttgtttctgtaggtacctgtgtctccaggtttttaaccatttctcatatgattacatggctttaaatcctcttgccattccaattctgctcctgtgaacttacttggtcctatttatcagcattcatttctaggtgtggaactggcaaaacccttatggtgcagttgctgggtctctgaattaagaatattttgaaaggaaattcgaaaatattattacctgagaagttctcctgctaaaaacatcattgacaagaccttcaggaaaatgaacttttgctttctcctactaataatgtgtacattcacttagctcatggaaatctgaagtccttataatctgattttcactatattagatttgtgtaggggctacagatctgaagggaattatccatgaataaatgagaagttgaagcctgcaaggcttctttcttgcatgcaggcataaggaacagagcagtaaaatatcctaagtaagattatttctatttctatgaaagagtgattgagatagtcaatagtggagcatcttgcaggcacccctgaatgcaaaaatcatgtaaggtaatagcctctgccatctagaatttataatccagctataggcacctggcgtgaatttatgagaagtttaaatatcaataagaaacagtaaatgatcagcactgcatgaatctcacagctcagcaccaaagaatagagcacaaaaataaagttatttttttaaaagctgctacaatatacaaatattacatcttgattataattttattcttatttccctggggctgtcttatgatgatgtatccttattatcctctaagtgcatattcaccttagacacagtagcacagaagacagtatgaagatgaatgaatatggctgtcttccagtaaaactcaatggccactgtcatttgaatttcatataattttcatgcatcttgaaatattattatttttttattttttagctacttaacaaatgtaaaatgtgtgactcctaggcaataaaaaagaggcctgagggccacagtttgccaactcctagcttatagcaccaggaaattctgaagcgaaattttttgctgttgtctggcagcatccaaagtccagcattcccattcacaaatagtctttcagagaagcaaggttcagttgtacttttactattgttactatgctgtttagttctaacataatggaaaatagctaatcacgttagaaggaaaggtaatgagatctttactaatttggctttagagactgtccgagataataacaaatgattaaaagtatatttaggtgagatgtcaaaagagatcaaaacagaagattcattttggttattttcagaaatcaatgaaacaaaaataatcaaaacttgttttttaaatgactttggtgaaaatctgaatttttccttagaagggaattgatacttaatatttttgtgtgtgagcccaaaagtatgttttctgttcactcaatatagaagtaccacctgagtcataagcttagggaacttaaaagatctgactttggggaaacaagataggcccacgatcggtgtttagtggattttttacattgtaggaaatttaggatctttaaaaatatgttgacatttgagagaaaatggaaattactgtatgtgagcctttttctctgtttcttgtaggtttagtatgatttggggtacttactgagagattattgctttaggttaattaattaaataccacctcatcaagccaaagaattcagatgggaaagtatttttaaaggtttattgtttttaaacagctattaattttaatttatacattcatatttcctccttcacctggggcatatttgtctcaaaacatattatgcaaggtacttcttaggtgatttcctatgagagcaggtgctaacttgttcatcatacacaggctaggtttacaatagaaagtttgtagcaactattctaaactgaactctcacattatcttgaggaatgtcttcaagaagaaataaaatgtttatctaaaaaaaaagtttatcttaaatgtagaagtctaaataataagcagtacagcttctagcagggagatgggtcatgcatcttaaaatcttggtacatggctgggcttggtggctcatgcctgtaatctgggcactttgggaggctgagataagaggattgcttgacccccatgagttagagactagcctgggcaacatagtgagactccatctctacacaaaatttttaaaaattaactgggtgtggtggcacgtgcctgtagtcccaggtataggagggtgaggctagaggattgcttgagcctaggagttcaaggctgcagtaagccatgattgcaccaccgtactccagccagggtgacagagaaagacctgtctcttaaaaaaaaaaaaaaaaaaaaaaaggccaggcgcgttggctcacgcctgtaatcccagcactttgggaggccaaggcgggcggatcacaaggtcaggagatcgagaccatcctggctaacacggtgaaaccctgtctctactaaaaaatacaaaaaaaaaaaattagccgggcatgatggtgggttcctgtagtcccagctactcgggaggctgaggcaggagaatggcatgaactggggaggtggagcttgcagtgagcagagatcgcactactgcactccagcctgggtgacagagcgagactccatctcaaaaaaaaaaaaaaaaaaaaaaatcggtgcctgcaatgataggtattctttttttttttttttttttttgagagggagtctcgctctgtcgcccaggccggactgcggactgcagtggcgcaatctcggctcactgcaagctccgcttcccgggttcacgccattctcctgcctcagcctcccgagtagctgggactacaggcgcccgccaccacacctggctaattttttgtatttttagtagagacggggtttcaccttgttagccaggatggtcttgatctcctgacctcatgatccacccgccttggcctcccaaagtgctgggattacaggcgtgagccaccgtgcccggcccaatgataggtattctattaacattttgctaaggggttgctaagtgaaaggcaagagttcttttaggtattttttctttcataatagctagagttttcagattttattgcatactactgcaatgagaaaaataggaaaaattgtaataaaagtactaacctattcacttcccattgctacttgtccttgctgtgctttggttatagcagttgtagtataagcaaaattatgtaagggaagaaattgctgttgtgtaagaaacaaaacactgtaccttaattctttgtggcctttcatataatcaaaagttaatgttgttcattaatcttgtgtatttttatgaaaggctaaatatttgtttgcccagaccaaccagaatcttttgtttcctctagattgtgataccattcttcagtctcttaatcaaagatatttatttcctcaatgagggttgtgccaaccgccttcccaatggccatgtcaattttgaggtgagtgtgataaagtaggatacaaaaatccaagcacaaggagaggggcagcttctccagcaccgcattcctggccaggcagccaaagccaattctgcagtttcagaacaaattatctctttccatattattttgttagaaattaacaataccaagtagaagagaatagctgagccattatgatgatgattattactatctgagggaacttgagaacatttttttacctcacaaatagagttttattaaatgaagaaaactatttaattcagaagattaaataccagaaagtagctgcagtagctcacgcctgtaataccagtgcgttaggaggccaagatgggaggattgcttgaggctaggagtttgaaaccagcgtgggcaacagtgagaccctgtctctgcaaaaaattaaaatattagctagtcgtggtggttcgcacctgtagtccctgctagtagcagggaggctgaggctgaaggattgctcgagcccaggagtttgatgttgcagtgagctatgattgcaccactgcactctagctttggtgacagagtgaaaccctgtctccttaataaaataagaaggaatcatttcaaatggtattgcctctcccaaactcataattatttttttatgatcacctttatattctttttttacttatcttccagaaattttgggaactggccaaacaagtgagtgaatttatgacatggaaacaagtggagtgtccatttgagagggaccggaagatcttgcagtatctgctcacagtaccagtcttcagtgaagatggtaaggccattcaataggagctaccactagcatccccaaatccttcatttaggaaattagtatagaaatgcttggttactcatatagtaatgaggcctgtcctctgatctgttccatgttaagagttttctgtttcacagaaaatgtatgatttgtccctaaaatatttgcacttaatattcacctataaacagtaggtttctgtgtttaagtattctttataataccagatttgcacagctatgggcacaaatggggttattgaagaattttttttttcttgcttgagcttacttgaatagacaaaaggtgttttgtggtatgttgatagtcagtgtaatttggagaaaaataacaaaaacagtaaattgctaccccctgccgtttaaaaaagtactggaacattttgacctgttaaaacattagggaatttgaagcagaaaaagagattagatacagaaaaaaatcatcagaagtgagctcataaaatacttagagatttattttattgatttgttatatcctaatattacaggaattaatagcacctattaacagtttctcatagtagattgatagtatttacaataatgacttttttttttttttttaagacagcaactcactctgtcacccaggctggagcgcagtggcacgatcacagctcactgcagcctcaacctcctgggctcaagcaatcctctcaccttagccttccagatagctgggagtacgggcgtgcaccaccatgcctgattaatttttttctttctttttttttttttttcttgtagagacagggtttttctgtgttgcccaggctggtctccaactattgggtcacatgatctgcccacagcctctcaaactgctgagattatgccaccacacccagccaggagaacatttttaattaatatcacctatgccagaggggatttgtttttaatctctataaagaggactaataacaaacttttgaatttttaaatgaagagtctttctgatttaaaaaggaagaaaaatattagtagaatggaaaattggtctagaaaatttttacctaggctttttacctagtaaagagttttaaaaaaaagaaaaaaggaaaaaacaactcagactaccaggaaagaactcccacccctttctttgtaaagaacattaagtctgagtatacgacagcatcatatggcttacattttataagcttttttttgccttatacattcttaggtaattaagtgcatttttggcttagaagcccttgggttttcattgagatggtcagtcagaggcaaagtgatattctgtgttcttcatgaaacagtgaagcttcttggtcatgacttgatattttgaagagtattttgctatggagtttggctcaagtcgaacaagggtggtggtagataatatatcaggagaaggctttaatgttaatgcactttcttttgtttgattgtagctctctacttggcttcttatgagagtgaaggacctgaaaatcatatagagaaagacagatggaagtctttaaggtgggtctcattcttctcattgctgcacaagtctgaaggaaattggctttccttgaagaaagccacatgcgttctataggaagctgctgtctatctgttccaagtcctctgcactttatctcttgtacaccaaatctttgtggctcagaattctcactaccatcattctgctttattgtctttcattttttttatattggcagatatacagtgactgttctttttctctcccattatttaatagaatgaggaactgagccatagtatgttaaaaaaaatgcattgactttgtctaaaatatcagaagttcagactttatttctgaagagttcttctgacactaaaattttatttaacctgagataaagaaagaagtactagtaggctttataaagttgggtttgccactttccaagtggatctcagtcccctctttgtttgagagagttgggactttaaacataatctggagatttttcagatttacaacttttgatatcctatgagtatgtttgaagaaaactagaatagggttaaatttgtattttaagcatttgagatactttaataggcaaaagcagcccagggtataatataatcaaacttgttatcattatagtcctactgagaaactcagaatgtatacctttttgtactagggtttacaagcacattttctcttatttttgtggtcccataatcatttgagagccttcattatacttgatattaggctagatttcatgaaccaggatatctaagatatacttggttttgtgtggttgtgtttgtttcaaaggaaagcttaggccttctttgtacctcccagtgatgagggataaggtatgaaggcattggaattcttatccttaggatatcatagtaattggtgaaggattggagatgttccttgtatgcccagacacaaacataaagaaggtttggctaatgcctaaagccatgggatataacaggcttgttgggctgatgcctatatatatatgtacagaactaataatgcattgactaattatatatatatatatattatataaaatatatataattttgtgcctggcagtggcacatttcaattaaaattttgtattactctgtgtttgtattaaaatatttcactgtgctatttagtattattcatgtgcaaaacatgagcctcagagtgcatatcttgctggataaaagatttgagaattactccttttagttatccttttttgatacattttgccttccatatgtctcctttttaatccctcctttctgtatttttaaaaacagtaagtttggtggggtctctgggtatagcttagcttttgttacttttcttgtagattattttaaaaattggtaagcagattggctacacataaatgatatctggtatctgcattacctgtggtctccagacattttaaattaatccagacctacctacaaaattattttatagttctttttattttatgacatattaactaatggttagattggaaaggttcataagtcaaaggtttgactttaaaagctaaagattgaactgtataatgtcttcccacgtctgtactgttcacataatatatgacatctaacatttgattgtgaaatgggaaaagttcccttgtgcccctcccagggcatgcgatgggggtgtggtgtggctcccttcttcagtgccctgctgctcaaacctctagaggagcataccagtgggcaggctgtggggctccgaccccacggcagtgtctaggggtgaatgtttatagctcttgaagccccagtgggcctgtattacaaggcgctcccttattttgccatctataggtggcttgcgttaaccggctcaattagaccctctaccttatggcaaggacagagggctttctgtatctcagcattcttgcctcggtgtactggaagaatcgggtcgcacataggcttggaaaatgagtgcaaagctttttgtttgtttgtttgtttgagacgaagtctctctctgtcgcccaggctggagtgcagtgggaggatctcggctcactgcaggctccgcctcccgggttcacgccattctcctgcttcagcctcccaagcagctgggactacaggcgcccgccaccacgcccggctaattttttgtatctttagtacagacggggtttcaccatgttagccaggatagtctcgatctcctgacctcgtgatccgcccgcctcagcctctcaaagtgctgggattacaggcgtgagagtgcaaagttttattgagtggaagtagctctccgcctatgggggagcccaaagggagatgtttttacactggagtggggccactcagtggcccaggctctcctccgactgcgcctgccaaacttcgcctcgtcccgccagtaagtggcctgccagtgtgctggcgtatgtcggtgtgcccatctgccagcgtgctcccctcagtgtcctctcgacgaccagccgctcctcagactgcccctgccaaactccgcctcatcccgccagtctgtcctgcgtgctggcatctttcggtgtgccctgccggcgtgcccttctaccagtgtgctcccctcaatgtcctctcgacgactcgccacttgcgtcttcttcagcagatgtgttcctcaccacgtccagctacttgtgtgtctgtctgccggcggtctcgggtttttataggcccaagatgggggcgtggtgggccagggtggtcttgggaaatgcaacatttgggcaggaaatgtctgtcctcacctaggtccgtgggggttgagccctagccagggacctgcctttctctacccagcacttcccttccccattccgtatcatttaaagggaccgtgctcttcccctcccagcactcccgtatcaattggttgaaatgaaaattatattctttggtataaaagacagtttccacgttaaaattgttttttaaggagctttgaagaacagctctcatctgtgttggtgttcaagccacacactctgccttttccatatcctgtctgttctcatggcccagctccaatgcctcccccgtccctggcccgtttttccctagaaagaatttctccagaactcatacactcaggaggcactcttcctctctcgttaccagccatgtggttttgtgtagtgtttgtggttttctctattgctatgtaagccccttgagggcaagcacagggtcttcccctaatgtctgccccagctctggacacagtgtcttgctctctattactcgtcagcccatgctcctgtagtgtcattgaatggtactgggttatcgcaggtgttggccaaggcatagcaaccacgaagaagttaaaacaaaataaaacaggctattataatttacaaaatacatacgttaagtggatactaagattaagcataatcatcccttggtatttatgggggattggttccaggacctcctgcagataccaaaatctgaggatgctctagtccctggtataataaaatgaaactttctgttgctgttgttttcagaaatattcttttcttgtggccatcagtcttactgattcaataacacataacctgttagggtaaactcaaaataataaatagataatacttgaatatagccatatgcatcctctcttatactttaagtcatctctagattacttataatacctaatataatgtaaatgctatgtaaatagttgttgtaccataaatcatctctagattaatttcaatatctaatataatgtaaatgctatatacatagttgttataccatattacttagggaacaatggcaagaaaaagagtctgtatatattcagtacagacccatattttttgtttcaaatatttttgatctgcagttgattgaatccacaggtgcaaaacccacagatagagagggctgactatattctggaatcattgtacctacctgaaaacttttatacattagctttgaaggcagtaagatatttttacatagatgcttttcttggtggccctagagccattcattgcagacacgtagattcatcagtggcagatacacctctgacggcagacacccttattgtcaactattgtttaaactctcccagtgttcatggaatgtgttgtgaagatgcttatatctaccaagtaaatctatctgtgataacctgtacctaaaagctctttatcattaatgatctttgctttttttgtttttgttataatataaacctacgcaagatatagatttatctgtttaagcttttgccatctccattaataaatgtttgttttttaagtgactggcagttttcccagagagccaataggacttaaaagcttgattttttttttcctggtttaactttgtaaaatcaaacttaaaacacaggaaagataaaattagtattacacaaggcattttcatcctagttcaagtagtctgttacattctgtcttaggttgtgttgtttttattactcaggtcgagcctcttaggcagagtttaacacatgggagctgcctgcctgctgctgctgctgcttcctgcagatcatggaggggctggcctttgttttctggcatctcgtaccacgaacactcatgaagaccctgcagtcattggagcacccgggtcagcaaagcacacaagctcactcaagaccagatggagaacttatttcctgcagctgacagatagactcagattttgtgagactgaaatgttcactgaagacacttgagaaagaatcctctaaaaatcccggctctgcacattattcatctcctggaatttccatgtgaatcacagctctgcacctggatggagttttcttttgtgtgtgtgtgttttttttaatttggttgaacatttgctgctaatgggacttgcccagctgagtgctggctctgaggaagcccacgtttcttttgttaacttaaatgaagaaaggagtggagggaggggatctaaaacccccccgtttagatcccaaaccttagctcaatcagtattgccagagaggggtaagactggttggaagctgactgcagactttgtttccccttagtatgtgctgtgttgtaaatttttctcctccctcctcctacaaggttttgagttggctgctggttagcaaactcctttttacccatataagttatttaatataataatgaagctcaacactgtggtaggaaaatagccactagaaagaaaataaaaagcagagtttgtcattggactgcttaacatgctagaaggactttttttttttttttttttttttttttttgctcttctgagctgtttacaactgaccactgtgttccacagatgtatttttcaatagctttttgttacttagttttccatgatgcctgttatttttctcttgtaaatttaaatgagctgactttaaggatcttgggaaaacccatggcataattacaattttctttttaatcgacttttcattacttttgggagtctgttggtaactaaagatgtcaacaaagaataaattggagaagttacctgtccccactatagcagtaaacaaaacagatgaaaaacaccttgctgttaactcaatggttgatctaattgtgaaatcgttcaccttgttaaacatctaagtaagtctgtagtcgctctgcaaacagccattatatttatttactctagaagaaactgtagagtagtaattcgtgctaatgagaaaaacaaaataccatgttcaaaacagatgtatttgaaaacttaatgacatggttccaaaaactagagcatgtatgtatgctgtgcatcatctcagcagacctaaaatatccccaagttgtccctttacagccatcaatatattttacactctgcggccaggagttgtggcgtctttcttttcttttatgggtggaattgttgggggcgggcatgggctataatcacagtggatcagttcaagagactggctaagaatgtatctgaggaagttatcttaacagtttgtgcatgggcatttattttttaaaaaagaatgatagtattatttgccaggcattttctaagtgtttagcatagattcatctctacctattaggggtggaaataataataacttgtacaaggccacatagctaatgagaggcacagatacttgaaatgggccttctaattccagacctcaagctttaaaccacaccaccacagcatctcaaacttcaatatccttgcaaattacccgggaatcttttttacatgcagatgcagattctgtcggtctgggatgaggctcagggaatgctgatgctgctggtcctgggatcccgctcagagtaggaagacacttctgcctcatgatacctgttgagattttaatttatgggggtagctgagtgatgacacacagaggccagtgccactgaaagctttatattattcaatttccccagagaaagggcacatgccatgccatgcagggccacaggggaagcaccggtgtcggtcgggggcagaagcaggagcaagaagaaagcataggctttgactgaggtttctgcagggaggcaaggcagagcaaggccaacagtttccaattggcaagtctgaataattccagcaggctctgggctggaggggcggtctccatttgcttggtacctagcccctggggtgagttagggcaatttctatattggcttggtgtgtgaaagttagataaaggggaaggttgcggctatgttcttgacaatagttagatatgctcagggctcagtcctttgctgtctccaagaattagctagtcctgggagtctcttccctgccagcaaaatttataagataccagaacatcataagatacagaaaaaaaaccgtgatgaatgcaacttcacaatattgcctcctttttccttgcactgcctttccctgatccctctaccactttggttattgtgacagcaacaagattcatctttcaaccatctacaccaggggtcagcaaactatgggctgatggccagatctagccagctgcttgttttgtatggcccacaaggtaacaatgctagaaaaaaaaaaagaagatctcatgatgtgaaaattatctgaaattcaaatttcagtgtccttaagtaaagttctattggaacatggccacacatttatttatatatcttcttgtggctgttttctgctacagctgcagcgtcttatactaaacagactgtatggcccataaagcctcaaatatttactttatgggactcgatggaaactttactgacccctgatctcagtgtttcttttaagcattgcaaagatagtttgcaaaaatgctatgagagctctatgatggcattagatacctaaatgtagcagctgaaaaaaatttcctaaagtggtattaggcctaaaaaaaagtgattctagggctacttaaacaagaagtttttacagcaagagttacatcctctactcattttaatgtctaggtaagccagagctttaaatcctgtattaatttacctgtgaaaatatttcatattctcccttttgtgccgtgtgtgcgttggattccccagtgggtgtatagatgaatttataatttatgtggctggatggaagcctgggtaaatacaagcataaacaacatcaggcaatgccagtcgatagactgcgattccaggatgtgttctgtccaggcctgccgttcattccaaaggcctgcatttcaaagctgcaggcttggagctgggactgctgggaaggtggggggcagggttcagaactggttgggcttaggaaggtaccaggagagtgcaccttctagtacttgaaatgtccctccattttgaggacacaggagtggcctacctttcatctaacaaagacaagagaattgaacgctgattgtctttgtctttgaagggtttattgctttacctcttcacttcacctggctttggcacctctgtcatttcttcatttactgttttttctagcatacttttaacttctttctgtactttctctttccaactgctgtccacatgccacctgtgtatagaatcccaagaaaacataacccaccattagaattttagttgctaaactatataagaactttgagctgtagattaacatcctctaccttcctttggtgccatttgtttacccctttttccgaacaaaaaacaatacctgcccctgttccaaaggtgtcttactattccaataaagaatgcatgcctgggaataaaaagaagcttagactactgttccaatggagctaagtgttcaaagaaattcctgaattcatttcctgggggaaaaaatgtggttagtgacctggaaactactaacaacttataaaactcaatactctgatggcgactctgttcgctttacccctaagacatcttgaaaggaaagacttttgtcagagttgggcttctaaagttttaataggaaattgaggcactttctgtataattcaagccaaagatttttttttttctgggtttgaatgattggataattgcctcaattctctgttccatgtaattgagatcacttgactcttcttagtgctaataaagagatgttgggattcacggtttattaaccaaacttttcagtttgtggacctgtcattcaaaactgcaaacaaggctgatcccatgcaaaatagactactgcctttatgctgtactaagaatcagtccctcttaaaggatgcatttataacctttatgcaatgaggaaatttccaggtagccaattttctttatagtgctaccagccttcagcaagcttaaactctgccctgcaagcctgaaaccctgcttctctaagattctacataacaggagattaaacatccaaatgtgtataatcgcattctggacagtatgaagaagctgtcttggaatattgttaactattagaatacttaaagtgtgcacatcacccaatttaggatttcttggtaatagtagcctatactttagaaaattaaagaggaggaaggggccgggcacagcggctcacacctataatcccagcactttgggaggccgaggtgggcagatcacttgaggtcaggagtttgagaccagcttggccaacatggagaaacgccatctctactaaaaatacaacaaataattagccaggtgtggtggcctgtgcctgtaatcccagctactttggaggctgaggcagggaatcgcttgaacctgggaagcggaggttgcagtgagccaagattgcaccactgcactccagctagggtgacagagtgtgaccctgtctccaaaaaaaaaaaaaaaaaaggaaactgatgtttctgagaataaaaaggaaaattactccttgatggatgtcaaaccagtgggttttctacaatgaaacaaagtttgcttgctttctttccacccacactgcttggagaaaatgaaagttagcaaaaatcacctttctccagatgaatcgttgtgggaaagtaagtttagcagaatgtgctgtcaacttggttgagataaggcagttggaggactggcattattaaattttctgtggtgcaattaggggtcctcctaagtgcaggtgagctgtggtgaggagttaatgtatgctcagtaaatatgtgctgaatgcatgagcaaggcagttattaatctggttatcattggggattcacaaatttcactttatatcttgtaacaaatctcaaattgtgcccctgaaacatctggattttgaaaagtgattccaatccattgtcatgggtggcactattcccagaaatcaacaaaggaaatccaagccactgagggtttttaaaaaattttgagtattaactagactgttatactcttctgtgtttatatgtagtaccaataatcaagacaataaatccatctttaacaataatataaaaagtcatcattaaaaacaaactaggaccaacatggtttaggatcttgggagaaatctgaaatccctcccgtgagaattcttgtctcagaatgtgaaaacgaagtgctaaacctcactctccccagatttctaggattttgtggaagctttcccgcctttctgaacttctgtcctcatctgtgagtaatgggtctggactaattgagatggaatgggccttcaggggtctgtggtttgggaaagcactttctcagtttgctggattaaaaggtagattagcaagtaaatgcagcatcctacatatgggcctccaacctcttcctgtctgactcttttgttctttaattgtacttgaagagggaagggataagaggctaattgctactcgctaggacacaatgcagtgataaaggcttcactcacccctacccctccagttgcaggcggtcacacaactatatacagttcttcatggtaaagagtgattattacccagaccaggaattagaaaataccctttgtgaaaggtcagttgtatgatttcaaaggtgctagattaagaaagcatagtctaaagactgcaaaaatagctgtgttgtgtagactacatctttgtcatagcagctgttgtaattgcgcttgttgacatagataacatataacttgcctggtcacacctagtcatttgcaaatgagtcacttcttggctcaaaggaccaagacttagagaagtgatagtcagagccaacttccgcattttgtcaacgttcactccttaggccagagtggggacctccttgaaggctgtcctgccagggtaagctgaagaatttgacatacatgttagggaaagtcctccagtgaaagaaaccagggcatatatcagtcccaagtgggtgaataccttctttccttgggctataaatactctctgaatcctactccaagtaggcctcttctgcaaaagaggaatgatcaaaggaaaaagacaaaaactagtaagaggaagaaaaatgttgaggagatgtaaataacaaattaaatagcttttgacaagggagagtttaagaagaggtatgacagtagtatctttcatgcgcgtccgtgtgaagagaccaccaaacaggctttgtgtgagcaataaagcttttaatcacctgggtgcaggcgggctgaatccgaaaagagagtcagcaaagggagatggggtggggccattttataagatttgggtaaggaaaggaaaattatagtcaaaggggggttgttctctggcgggcaggagtgggggtcgcaaggtgctcagtgggggagctttttgagccaggatgagccaggaaaaggactttcacaaggtaatgtcatcacttaaggcacggaccggccattttcacttctttcggggtggaatgtcatcagttaaggtggggcagggcatattcacttcttttgtggttcttcagttacttcaggccatctgggcgtatacgtgcaagtcaccggggaagcgatggcttggtttgggctcagaggcctgacagtgtccaagcatctgaagcatttgaactcatttaaaatctaataagaaaacaatgaagctaggaaatatattctcttgggagatcacaaattatttgctaataaaatatatattaggtaaatgaactgaactagataattagggggattattttcaattacagtaactcactgaactgactcaataaaatcaatttcataaaattctggaagctaggtatcaccaacacctttctacctattcaaaaattagcatggcctttgtgaagggcaaagaggaactagatggagtgcttgctctctcagtttagacttagaacaaagaataacctaagaggttcttagcatctcccccaaaaggctccggaattgtaaaatgctgtttcctttaggatatttttacaaaatttgtcttaaagattaatccaacctataatggcccaggtttatagtggaataagtgtgatcccttagctctactcttatatttaataagagcagatgagagtgcaggtctattactaaattttataagaaggtgagagtgcaggtctattaccaaaatagtcttactagtaggacttgtgtgttcagagagttcacagcacggtgaaggcagttctttggtttttctcctcaaggttgacgctgccaatcttgaatgagcctgaaggggtctttactctgctttcctgcaggcccaggtgtaggctgtggaccttcaatttccagcaggtgtaggctgtggaccttcaatttccaggctctttttctgctcaatggaactagcagtactatggttctacaagaggtgaaaggaatgaaggaggagagttctgctgattggctacccattacagcatgactcccaagtgatatgatatctagagagcctctcttttctttgccttaacgaagggtcctatctattatccttgcttcctgggtctgggccccaggaggtcagtgggcaggtacccatcctcatctgcagaggattgggggatgaagagagaaaagtcagccctgctaataactgacgacaccatttccaatgaggctggtaagttcccagctctcatcctacttcctaacatgctctatgttttgaaacttcccgtcagtcttctctccaaattgagacgtctgtttcttcatggtctacccatcttagcaaggaatttgaaaaaattggtggtttaaaattgttaatctaattcatactgtaatgtgattgactgagaatcctttcatgtcagctttctagctgctagagttttagggcatataatagaaggaaatttaaaaattcaggcagcaaggggagaaatgtgtatggaaggaccttgtaaagccttgtaaaactctgagaggtttaaagatattaccaagtgattgattcacttagccatcgagctggttggtaactggcctgggactagaaccacaatctaggactactctgctgcactaagcagattccctacaaagtaggccagcctgcctgggattctgtccagtttcactctcctaagcaattcttagtgttttcagctattctagcacttttaaattcacaggttctctaattgtcaagaaaaaaaatggaatttgtttgaggttgactgagtacctacatatcccacatatgatgcatagcgtcagagctattgagatgtgatgaacacccagctcctgtgttgaaggagctcaccttctcctgaggaaatggcccttgcagtgcagcaggtgttcagaatcaatctctccttcatgctgctgttgaatcctctaatcttagcttcctcagcttagaaggtcagggatttctcatggtggatgcaaacctgagacttcacaaatgttttcctggggaactccttctgcatgtgagtacagggccaggcagccacatgttggcatgttgttttatcctgcacaaggtggaggaggctgactagggactgaaatccaaccagtcccccagtcctccagctgtgtactgagcctgcaccaaggcagcctccaccagagggaaggctacttgattgtaattcatcctccctgaggaggttccttttcctaattggcacaaaggcttttgatatgctagcaacagccctgcaaaaggacactaccaaaatgctctatttaaagaactacctcgtgtttgtgatggctgaaaacagggtaaagttgaggcttaacaggtggttaggagccagatttggactctatgctgaggaactgcactttattttaaagatcaatgtaaaaccactcaaggatttttagcagtgaagtggcaaagtcagaggtccattttagcaagatagcactggctgaccagtagagagtgagtggtagttggggaaggagggtcatggaataagttagagggactggataggagagtcttgtcttagaccagacaataaactaggaggctttgagctaaagcagggaggatgaagaggaggaaatggatttgcaaaatgttaagacagtagagataaaagccctgggtgaaggaccgtgtgggcacccttgtggacaaagaggaattgaggctgggcagcagccattgtaggtaggtttgtgttgtagggcagaaagcaggtgatctcttccctccccaccacaagagccacaactgacacccccataacaaagacaggttaacaagggaaaagcatagcaaatttacctgattatagtttcacatgacacaggagccttcagaatgaagacccaaaggtacaggggaagcttgtgattttacgcttcagttcgatgaagcagggagagtggtgtagaaatgtgattggatgaaagggaaggatctaatagactggccgggaagccagcaaagcctgtctgtttaggttcttctcgcctctctgtgcaaggtttcttcctctcaggtatggggtaggacctctctgaaatgagggtctgaatgtctttacggtcagctgttgcacagaaaggcaaggggaaggttagagtagtttttttaggttttatga

SEQ ID NO: 351 - DNA, 1543 bp, Homo sapiens
cgactggttagacagattttgtttttcttcttcccgcgcgctttagctccctgtcctttggtcgcatttgtgggcgcgcggcacgcagccgggaggccgaggactcggagttcacctgcaggaaagtatgcctcagactcctcccttttcagcaatgtttgacagcagtggttacaatcgaaacctctatcagtctgcagaggacagctgtggagggttgtattaccatgacaacaacctcctctctggatccctggaagcactcatccagcacttagtacctaatgtggattactatccagatagaacatacatatttaccttcctactcagttctcggttatttatgcatccgtatgagctaatggccaaagtttgccacttatgtgttgagcaccagagactaagtgatcctgatagtgataagaaccagatgagaaaaattgcacccaaaatccttcaactcctcacggaatggacggaaacatttccctatgattttcgggatgaaagaatgatgagaaacttaaaagatctggctcaccgaatagccagtggcgaagagcagacatacagaaagaatgtccagcaaatgatgcagtgtctgatccgcaagcttgctgcgctcagccagtacgaagaagtcctggcaaaaatcagctccacatccacagatcggctcacagttctcaagaccaagccacagtctatacaaagggatatcattactgtctgcaacgacccttacacgttggcccagcagctgactcatatagagctggagaggctcaattatattgggccagaagaatttgttcaggcgttcgtgcagaaggaccctttggataatgacaagagttgctacagtgaacggaagaaaacacgaaacttagaagcttacgtggaatggtttaatcgcctcagctacttggttgctacagaaatctgtatgcctgttaagaaaaaacaccgagcaagaatgattgagtatttcattgacgtagctcgggagtgttttaacattggcaacttcaactccttgatggcgataatctctggtatgaatatgagcccagtctctcgactaaaaaaaacttgggccaaagtgaagactgcaaaatttgacattcttgagcatcagatggacccttcaagcaatttctataattatcgaacagctcttcgtggggcagcacaaaggtctttaactgctcatagtagtagagaaaagattgtgataccattcttcagtctcttaatcaaagatatttatttcctcaatgagggttgtgccaaccgccttcccaatggccatgtcaattttgagaaattttgggaactggccaaacaagtgagtgaatttatgacatggaaacaagtggagtgtccatttgagagggaccggaagatcttgcagtatctgctcacagtaccagtcttcagtgaagatgctctctacttggcttcttatgagagtgaaggacctgaaaatcatatagagaaagacagatggaagtctttaagcctcttaggcagagtttaa

SEQ ID NO: 352 - protein, 463 aa, Homo sapiens
MPQTPPFSAMFDSSGYNRNLYQSAEDSCGGYHDNNLLSGSLEALIQHLVPNVDYYPDRTYIFTFLLSSRLFMHPYELMAKVCHLCVEHQRLSDPDSDKNQMRKIAPKILQLLTEWTETFPYDFRDERMMRNLKDLAHRIASGEEQYKNVQQMMQCLIRKLAALSQYEEVLAKISSTSTDRLTVLKTKPQSIQRDIITVCNDPYTLAQQLTHIELERLNYIGPEEFVQAFVQKDPLDNDKSCERKKTRNLEAYVEWFNRLSYLVATEICMPVKKKHRARMIEYFIDVARECFNIGNFNSLMAIISGMNMSPVSRLKKTWAKVKTAKFDIHQMDPSSNFYNYRTALRGAAQRSLTAHSSREKIVIPFFSLLIKDIYFLNEGCANRLPNGHVNFEKFWELAKQVSEFMTWKQVECPFERDRKILQYLLTVPVFSEDALYLASYESEGPENHIEKDRWKSLSLLGRV

SEQ ID NO: 353 - DNA, 46137 bp, Mus musculus
  misc_feature (1)...(46137): n = A,T,C or G
gtatcctagcacccgggttcgcatccagcccttgctgctacagcttatcttcccacaggttgtagccgcggtcgttcggagaagatgccaaaaggtgggttgtgtgtgtccacatagtctgaccctggccttagccggtgtgcaaatgcaggaattctgcccacctaccctgcccacccattccgttggcccgtactgtggagccatggcgccccctgccggcgaatgccttccgtcagcagcctgttttcagggcggactcaagatactcggctcggaagggcgaccccaaacatgacaagtcgcaaatgtgacaagccgagagccctagttgagaatatctggaccttccgtaaactttggaaacggataatccttgtcgctaccaataagtgttctggtgtccggtctttcaccccaggagctccactctcatccccattcaaattgctagtactcccagaactactagcagtacagctggctcatatcactgcgacccatgcttttcctgttactgtgtgccgcgagtccacctccaaaatcaggccagtggtcaagcggtaggaccccaggagactgccagcagtaggcagatcctgagggtgaatataattctactagaggagttcatttcttcaaagcagtgttggcaaagctcttgtcctgggcctcacaatggggagtcttgattttcaagttctcagcaaacatcaagaaaattttactctgtggagtaactaccaacctcactccttgtttccccgcctcctcccccattgcgccaggagacgcaatacacggctccaccaccagaggacagcagcgaccgcccgtgaaaacgcaaagacaacagggtgggtggaaacctgaaccaatctccagctgttagggagaagcccctcttgtcactggatcaaccgcccatagacaaatgttcagcaactcactcattcctttttttgcaacttgtttattgagaaacaaccatgttcctgcctgtgaggagctcagtctagaggaggcagtattgacggagttcccgggaccagtgagatcaatttcgagactacagctgaggggccaggaaggttgtgtttgttatattgggtacagctgtatagagggcgagccaatagaagctggaggggtgcccaacttgggcaaatgtaccgcagctggaaaaccaccttcaggttttcagtggtgatgagggagacaggcccaagtggttgtcaaggtaacgggctaaatcagggagggcctaagtgctggctgaagggggggggggaggaggagggctgcaaagagacgagacaggactcaatggagtgagtcctgtcaaaaccaggcaggagaggaggagctagggctatctcttagtggccagtgagggtggcaaaaaataaaaaataaataaaaataaataaaaagggaaggacaatttccattgatgtgccagaggtgaggttcctcagaagcacagagcaggtgactccagtgtggaatagcaatcacacagagagagggggattgagagtgggctgggacccacttacctttgcaggaccccaggtttcttctctcagacatcttttggcttggctctcgacccaggaggctggctggctgcagtttgccaaggggagaattcacttctaagaaaaaaaacttgttctactacatataaccaagagagggctcctggcttcccacaaactcccccagacctgtgtggaggaagagcaagtctgcagggaggaaatgaccaaaagcgaccagctctggggagggttcagacagcacacggccaccccacccgttccagcctgcctactcacccagccctacctcagcaggaggctggcaaagtcccagcactacccggcctagagtgttggatttggactcaactctggtggtgatggtggggctggatctgtaactaaaaataaccaggaatctagccagctgctggtgagagcctcctcagaggtcgggccgggccagctgaggagataggcgcgcgcgcgcgcactcacacccacccagggtggctttactccctcatcagcaagatgttcagggggcctggggcactctccattgtccaggaattcctagagagcagaggaaagcaagaaattgcttctgtgggttcttgcctcaaacccccctcagggagctgtcaggtggtcactgcagagactaaagctcagatccaggggggcagaggagaacagactgcagcctttaaggacaaagtacaaatttgggtgggggaggctaaggccaccactcccctattcagaggccccataaatcaattattgagctatccaaatgcagatggaacggataagaggggggagataaagactctagcagaggggtgaagccaggctatcttatctacctggttaggcagcctgaccgctccaagtctcagctacttaacagctccagggaacaagcagaggatgggcttagtgatttctggaagccaggcggaaaaccagcgaacgttggtacaaagggatatacctagggtcctaacctgtcactaggactagcccggacacagcaagaccctcctccatcacgcgacaatttaatagctctgaaggtttttgttcaactttccctcctggttcccattggcacggaacaatccgagaaaacactgggggccgtggagagcggggatggcgggtcctccgacccacctcggttgcagagagtctaaaaaggtcatattccaaacttgggctcggggccaggtggaggagccggaaggggcggggacactggaatctcgtgtagtaaatcgagtacagccacctcccagttcaggcaagccttctgctggcgtggccctctctctgcaggccagagcggctccgccccacgctccgtgggtgaccaggaggcggggcacccctcggggccaggaacaacagcaggacaaactgccccaccctacagcccaggaggtgataaggggccaaagaaaggagagagagagagagaggtggaaaagacctgaagtagagagcaagccacaagttggtcccggtcacttccatcttcccctttcaagcaccacgtcacagcttagcgcctaattgctccctaaagcctgtagccctccagggtacagctgacacagcgcgacttaaatcaattagtgggaggctggaggagataaagaccccagccagatccaaggactctaaccagagcctttagggttgatcagttgtgttccaaggcttaccaggtatctaaagtatgaacgagaccaacctagcaaagcgctcttctccccgccccccttctcaataggggtgaggagttcagccttcccagcagaaagccagctcatcgacggacttgatgcctggccctctgcaccagcgggagccacgggaccattgtggagccttgctataccagacagctctctctggcagtgataaaggcagacagctggcacgggagggagcctaaaataacccagacagctgggcaagggggtgtcacgggcccaggttctgggctgaaaatcaagacacctggaaccctgtccaggctctgctccgtggtggcctcataaccttgggtgagacatttcttctcttggggctattggtgggtggcccttaaatcccgacccaaccacaggacagcctacggagccccgggaacagcctggactcaaacactagaagaaaaacagggctggctgccttcccaagcaaagccagttttctttctcctttgcctggaggctccagcacgtgcttcaggaagtgggctggcggggaggagccctggagacagcccagcccccaccggcgcaggcagcaaccactcccagcaacaatccttatcacaatggaggccaactggttgtgaggtcagagcaggagtctggccctcttaatctcacttaatcctcccaccaaccttttccagcaggtattgtggtctttttaacccggggagggggaagagaggcaatggtccaaggtcactagctaggtccacatctaacctacagctgccagactagaagcaccctgattaggcaccaatctgcctccagcaacaactcagggaagccttccaggctccccgactcacacgtcagcactcactgtaggggtgaggagaaaagagaagactagaggctggaagctgaggcccaaataggggaagccagcaggagccgcggcacctgaggccaaatggcttatcaaagtaacaaaacgagaaacacactagggggccaggggtcagggatcaagggccacaccagtttcagcagcaaagcttcctgcctaggaggagggcaagccaactgctagccaccaagctgggtgacatcccaggtgccacctactagagagagtctagaaacttggtgctacctggaaccttgtaagaagagcaagttcttagatgtaactgcctaagagggaaactcgagaaatgggcacagtcgggtttaatgggtccaaccactgacttctgatgccggtgcagctggggagaccctgctcagagactaagcacagacctcattgactctgtaagatcactacagacaggtgaagggccagcctccgtttgtgtcacgttctagaagccaggctaccgacacctggccttgttgagagctcggatccaggaaaaggagaagccaaggaaatcttttctctcgggaagctggctaccacttcacatcttttgcttctttgtctatccagcaaggcagacatcagaagggggctcagctggtccccctaatggggttcaggaacaatgtctgaagcaccactgggaaacctggcagcagtcaccgtcttcagaagtttccagggccctcccagccaccataaaccacaccactgggaaatacttggtagtccttgctctagtaagctgctaaattcggcatgagaatcgcccgccctaaacgccccacagcagaagctgacaggcggggctggatggacccagcaggccgcccatttcacacacacaaccgccacatcagcgtgggggaggggctgcagaaccagcccagcaggtttggggatcccaagccgcccttcgaaggctgcaggtcaaagcccggcaacagttctctgaacttggggaaagggctcttacctaccttagtgggggaaggctctcagtcaaattgggcctgctccagatgtccagaggaagcaaggattgtctacagtggggataacacagacatggctccggtctccggccaagacctgtaaattcggacgttctgttagggcaattccacagtttgtaggttcagagagaatggattggccaaatgcaataccaacagggtctactagatagaaagggagtcacagaaatgctgtgtcccccccccctttcccagctgacaaggcggccctcactgtggaatgggtgggggtggggtgagggtggctgagtcactaaagttcaacccaggagaccagcagcgggagacgactcatctgcatttccaaagacccgccctgtccacatcccctcccccagggaaggccaggatctaaggctttaccctcgggcactatcgcggcggggggnnnnnnnnnnnnnnnnnnnnnnnnnnnnnnnnnnnnnnnnnnnnnnnnnnnnnnnnnnnnnnnnnnnnnnnnnnnnnnnnnnnnnnnnnnnnnnnnnnnnnnnnnnnnncttggctaactactggctcctgttccgagcagaacggcaggcagtgcaagccagagcgaggcctcgtgcccgtgtgggccttgggaggccggggctgccacggagatcggggtccctcacccgcctccaggggctcgccctacccggcctcggctccccccgcggccgccactgcccgaaccgcgcctggggggaggggctcggggggatcgagtgcggagaattagggtgcgcgacgccccccggggcctaaggccccccgagacccgtcaccaggatcgcgggcgccgtgcctggcaggctgttagggcccggggctgcctctcggctcccagcgacaaccagggaaaagcaggatggcggaaggaaggaggaaagccggccgccattagccagagagcagtattgaatggcccggcggcttcagccttggctccaacccgacccagccctcggctcggctcaaaaacctgaaaataaaactcgtgtttgagagggaggagcgagcgcggcccggaggacaagcagcgccaggctgcaggcgggagagagatgctgcgtcatgatgccaacatggacgccggccttttgtcctttttctctttggaagagcaggcgagccccggagccccgaaaagctggcttccgggggacagaaacccccacaatcaatcaggaacgagactttaagatgggtgggaaggtttcctcgcttttttcagcccctccatctccaaaacacttcgatttcttctctgccactaaggtgcaaacctgaggcgagccaaagggactagcgcaggcggctccatggatgccccagggtactggggacaggctctcttcgcctttgggtgcaaaagaggcagaggggtctggagagccctagtcccctcacccacccactgcaatcggctgccaagctcaagctcaagaaatcccagctcccaatcatctgcagcccatggcctgctcaatcgagagttcctcgaagggggaaaaagacacttgaaaacaaatttttttagtctagttttttacttacccactcagcccggcgccatggcgtctagaagaaaaagctggccggcgcttttggagatattataaaaataacaggtctttttttgggaggtgggggatgtttggttgtttagttggggggaaacctggggttctggtgtccctttgttaccttctttgtaagttacactcgtggtatttctgctccttccacgactgcaaactttccagggttgggctggcaaaaaggcggcttcgctgagggctgtttagtgctctggatttaccaatggtgtgatcgtcattaagaaacaaaaggcgaaaacacaagtcaaatcaaaacaaaaggcaaaaccagccatcccaaccgccacagaaaataccaccgactcaacgtaggtgtttggcttgaaccggctaagggcttgttttccagttttaatctagttttcagaggcggctttcagtctttttttatacaaaaggtcttcctttctcttaccctccaccaccccacacccagttcgagaaaaacagctgtttttcttcaaatagatcgattttcaaagagtgtacgagctactgggaagaaatctgaatagcaactatggctgtaaacatttttttttttccaaaaagctcgaagctaaaaaatcgtagctttatagaagcaaaaacgtctaaaagcattttaactgacttacatcagacaaagacaaagacatacatgcagatgaagcttccgaaaattcaggacatctcaggcgacagtaacacgagaacggcagtgcagttaaggacagaatggattgggtacttacaatgtaaaaggtttttagaaaatttaacagtaacaacagctcacagtttttttgttattgttgccgtttcgctacaactatacatttaaaacattaccttgttaaaaaatagaattaataagatggtcaggcttaagtgtttaatagaggaaactatatttaaaaatttattgttcagtcaagagaatacagattaagacagctccaagctctcccacccacccacccgagaaaaaaaaaaaaggaaaaaaattaaatatgtcatttacttaggtttttttgaattcaaaactgttaactgctgacattaatagtgtgctatgacctagttatacaagacaaagatggattccaagtcataaggaaaaatccagatctttttaaaaggtcttcattcttccaagtgtgagtcctttggcaaatgttaaacacattcaggcgtcctgaactggatggtggagtcaaaggaaaagcattccccatttgcaacaaaggaaaaacccacttggccatttaattccattgcagaaaaatggctccctcatctgttggcctctccttggagtctgatgaaggatgttttgagatcagcgtctaataactcaagccctatagaagccgcgcgctgattggctgccgcaccctgccgccctgctccagccaattacctacccacggccaaattacaaaccccgaaaagagccccaatatgaaatacaccaccacgaagccccggcgaggcggctgcttcgcctcggcagcccgagaagagagaccgagggcgtctgcaaccagatccacgcgaaaagccggggaagcctacgagttgaactcacaaaatggaagccgagcgctgattggccgccgccactcccggacctttaataaagaaaggggaaggaaaatgataaatgcaaaaaaggggactctctgtcgctggtggctggaggaaggagggagggagaagcatgtgttcaagacaattactgggcgctcccctccaaaaataaaaacagaaaggcaaaaaataaaaacgaaaaaataaagagaaagagctatcttccccgtccaggcgagggttgtatcctcccaggaatgtgaaggctagtgtggttccaaaccttggtttcccttccccagcacagctcctgggagggagggggcgtgcgggccaaagaggaagcgggatcggagatacctcgattgcaaactcgtttggggtcgacgtctgcctcccctccaggcttctagtagtcatacacacgatcaccccccactcgaaacccagcccttttcgccgagactccacgcgtccaccaccggcctgggcagtttggaaacagtttgggaggccctgggggcgcacaccgtggagtcttccgtagctggaagggtagccccagccgcggggggagatagaagccgtggagacccccctctcccccgtcagccaagccccccacctcagtcccagcagaataaataaattaaaaggccttccccccggggaaggggggggaggcagtgtgggagcgcgcgagtgaggggtggggggccgctggggcccggggctttggcggcgcagctgccgccgccgggagagtgcctggggaagcggcgaggaaggcgaggggaggaggaagaggaggaggaggaggaagaggaggagggtgagcactcgggtcggnnnnnnnnnnnnnnnnnnnnnnnnnnnnnnnnnnnnnnnnnnnnnnnnnnnnnnnnnnnnnnnnnnnnnnnnnnnnnnnnnnnnnnnnnnnnnnnnnnnnnnnnnnnnnnnnnnnnnnnnnnnnnnnnnnnnnnnnnnnnnnnnnnnnnnnnnnnnnnnnnnnnnnnnnnnnnnnnnnnnnnnnnnnnnnnnnnnnnnnnnnnnnnnnnnnnnnnnnnnnnnnnnnnnnnnnnnnnnnnnnnnnnnnnnnnnnnnnnnnnnnnnnnnnnnnnnnnnnnnnnnnnnnnnnnnnnnnnnnnnnnnnnnnnnnnnnnnnnnnnnnnnnnnnnnnnnnnnnnnnnnnnnnnnnnnnnnnnnnnnnnnnnnnnnnnnnnnnnnnnnnnnnnnnnnnnnnnnnnnnnnnnnnnnnnnnnnnnnnnnnnnnnnnnnnnnnnnnnnnnnnnnnnnnnnnnnnnnnnnnnnnnnnnnnnnnnnnnnnnnnnnnnnnnnnnnnnnnnnnnnnnnnnnnnnnnnnnnnnnnnnnnnnnnnnnnnnnnnnnnnnnnnnnnnnnnnnnnnnnnnnnnnnnnnnnnnnnnnnnnnnnnnnnnnnnnnnnnnnnnnnnnnnnnnnnnnnnnnnnnnnnnnnnnnnnnnnnnnnnnnnnnnnnnnnnnnnnnnnnnnnnnnnnnnnnnnnnnnnnnnnnnnnnnnnnnnnnnnnnnnnnnnnnnnnnggtttcaggttgggttaacggcatggagaacagtcacccccaccaccaccaccagcagcccccgccgcagcccggcccttcgggcgagaggaggaaccaccattggagaagttacaagttgatgattgacccggctctgaaaaaggggcaccataaactgtaccgctacgatgggcagcatttcagcctggccgtgagtagccggcgcgccttcccgccacccccacccacccccggtggagcccccagacaagaggcgaacggagggggacccctcttccagctacctgggccaactgtcagccaggactccctcccctcagcctggagtgggactggtgccttgaggggggggggtctgcccctgcccctggggagggtgccagcccttctatactgaaccccctgtctctgcccacagatgtccagcaaccgcccggtggagatcgtggaagatccccgggtggtcggaatctggaccaaaaacaaggagctggagctgtctgtgcccaaattcaaggtaggacccctcctctctgtcttatggtccctccccccctccttccccgagttcgaaaataacgccagtcctgaccaagcccagccggattcttagttcccgccgtccaggactgggaagttttggcggggaggggggagaggggtgtcccctccgggccactgtaaacaaaataacactcggagaaactgtaacgagggcactgagactgtatcatgccggcagagctgggggctcccggtccccacctgggtccttgcgcacccagggccctggctcagggacccgcccccctcccaaccctttggctttaaaggggacaacttcctagaccagagggtcgtctgggatccagcagcaaggataggaggccagaataggggggtggggaaagagaaactgtttctttttcccctttcctttcgaacccagaggacttccaggttccaaacgatttaatcctctgcttcctaggcccgcccgcatgctttttttgttttcttttttctttttctttcttttttttaactgnnnnnnnnnnnnnnnnnnnnnnnnnnnnnnnnnnnnnnnnnnnnnnnnnnnnnnnnnnnnnnnnnnnnnnnnnnnnnnnnnnnnnnnnnnnnnnnnnnnnnnnnnnnnnnnnnnnnnnnnnnnnnnnnnnnnnnnnnnnnnnnnnnnnnnnnnnnnnnnnnnnnnnnnnnnnnnnnnnnnnnnnnnnnnnnnnnnnnnnnnnnnnnnnnnnnnnnnnnnnnnnnnnnnnnnnnnnnnnnnnnnnnnnnnnnnnnnnnnnnnnnnnnnnnnnnnnnnnnnnnnnnnnnnnnnnnnnnnnnnnnnnnnnnnnnnnnnnnnnnnngccgcggcccctggcagatcgatgagttctacgtgggccctgtgcctccaaagcaggtgacatttgccaagctgaatgacaacgtccgtgaaaacttcctaagggacatgtgcaaaaagtatggggaggtggaggaggtggagatcttgtataacccgaagaccaagaaacacctgggcattgccaaggtggtctttgccacagtcaggggcgccaaggaggccgtccaacacctgcacagcacttctgtcatgggcaacattatccacgtggagctggacaccaaaggttagtggtggcccggccggttggtggcctgtgggggaggagctggaaggccacctgtcagtctcaccctcatcttggaaacccctttatcgttccttgtctcttctttgggattccccaccaccaccaccaccatttattttttgtcccctccggagggcagagtcacatggagccaaatgtgttgtctgttgctaggagacagactataatttaccaaatgtgccagtccttggccactgcacccttagggaccacccagaggcttcccccacctatgacacccctgtgggcccctctctgagcccctgtggcctgcgtttagacagtccctagtgttgctgcctgtgttaggggagatgggaggggtttgtttatttgttgggggcagaagaagaaccgtgtgcctttaaattcataaaagtcattccttaaagatctagggtgcccgtgccccttcaccccctaccggtgccccttccctgaaccaatctgagccgaggagtgtttcattgataatgttctgatagcattgatagtggatcttgggggcgggctgctctgggtgctcatgggttgacacttgtcttccctcctctctcttaaagagaccgcagcacctctgtttgctcaggcaggctggggagccacacctcctacctccagagctgttgactctcctccacccccacccccacccccgcatcctggctcaggtgaaaaggcctgacaagacacagagggcatcccccctaagtttacctgcgtcctttctaagacatccctgccagtctgcgggcaagtgcagggggctttgggaccaggtggtcccgtgatcctaatgtcaagtccgggggttggaggaggggcgtggcactgttgaaccctgcctgggaggactccaggggtgaacaccagggatttttctttttgagtttctgagcacacaccaaaggcaagacagaaaaacttaactttgttttgcttttaatgatggcgacatgcagtctctaagacctaagaccgcgctgggtgttgtcgcaaagggttgtggtttgtggtaattttgagtggatttggcaattttgagtggatttggttaccccccaacccccgcttgcaaagcctagtcatttctgtccagtcgacagctttccttctcatttcccagttcctcgagccctagtaaatgacccccaaccccacccctgtcgccatgcacttgtgtgtgtgtgtgtgtgtgtgtgtgtgaacagactattaaatctactacctagcctcacattaagctgaagttcaatttcccccatgactgaagcctgcagtccccctctcccatcacctgcccacatcttaagcagcagctaagcctcactacaatttcatttctgggggacctggaggggtggagagggaaagaaaagaaaggaaaagacacaatcctcagatactaccacttattttgagatttgtaattgtatttcaagaaagagtccagtaaagtgtggctcacctcctttgcatatgtaagcagctgcctctaaggctctaaataccaataatcggggcctggttgatcaaaatctctctctggtgggtagagaggtaggcagagggctccaggtagtccccgggcagactctgggtactcctggggcttaagctggtggagagcagcctgcgattggctcacagtagtatgtatgtgtttgacaggcttagattgtcttttggccccagatagttaagtcacctctgtccccagacttcctctgcccttgttacaagccgtgactattctgtggtgaaagaatgtgggggatggggtggtaatagctccttttgggggggaactatagtctaaggaatggaaagaactttccatttaggatggcatttgggggttttggggttttttttggggggggtgcagtggggggagaagctctgtcccacaaaggcattaaccttagaatctcaggatcagaaagatcagagttttgcagcctggttggacagatgagaatctggaatgaggtgagaaagggtagagacctaatcaggggacacacaggatccccgggcctgtggtcgcaggcacaagggatccctgaccgtgctaataagtgagttggaatccccaggggatgtgtctggtggagcttccatggnnnnnnnnnnnnnnnnnnnnccggtacaccccttcagaccctcccctgttggtgagctggatgctatttctccgattgtgagcgagaccctgcaggtaggttcttcccctgcagctgctccctccgcttcagcacctcttggctttagagacctgaccacacctgctgttggttcccagctgatctaaaaaccctgttttcccaagatctgctgcaccagttctccgctgggattggcccagcatccctgagtccctcctctggttccacccaccctccacccatactgggattcccacagatgcaggctgtttttctatatgaatgtcaaaacatcgctacgtttgggtcttagtgtctggtatccgggcaccctctgtacgtatttccagaaagcagagttcagatcctcttccagaacagactggctcctccacccacggtataccaggacactcacctagctgattccattcagccacagtatgaactgaggtgtccccccctcccagaggactgaagtctgtttgcctgctgatcaggaggcatgggggaggggctgtcacaccttttaaatatctagaatttgtaaggacagtccatcaaacccaagaccacagtcattggtcacatctctgtgtcacaccctttaatgtcagatggcctgaggcttgggaaggaaatagcagcctataccaaaacatcagggtcttctctttgtgctgccagtattagggacaatcctctatgtgtgcagagggtaaacatctatacttagggatagggaaaaacaacaacaacaaaaagaaacaaaaaaacccctgcgcacttccaggcactccagttctttccttgtgatgggaggtcatgggctccacactccctagcagccaaagttttagcgggaagcagctcaattgcctggttcagctcggtcctccctccacacccacaacacccatgatctcttctctctccagctatcagatgctctgaagcgcctcaaagatggcagcctgtctgcaggctgcggctctggctcctcgtcagtcacccccaatagcggtgggacccccttctcccaagacacagcttactccagctgccgcctggacacacccaactcctatggacaaggcaccccaatcacgcctcgcctgggcacccctttctcccaggattccagctactccagccgtcagcccacaccctcctatctcttcagccaggaccccacagccacattcaaggcgaggcggcacgagagcaagttcacagatgcctacaaccgccgccacgaacatcattatgtccacaactcagcggtggctggagccacagctcctttccgaggctcctcggacctctcttttgggacagttggcagcagcgggactcccttcaaggctcagtcgcaggatgccaccacgtttgcccatactccacctcctgcccaaacagccacggcttctggattcaaatcggctttctctccatatcagactccagcaccccccttcccgccacnnnnnnnnnnnnnnnnnnnnnnnnnnnnnnnnnnnnnnnnnnnnnnnnnnnnnnnnnnnnnnnnnnnnnnnnnnnnnnnnnnnnnnnnnnnnnnnnnnnnnnnnnnnnnnnnnnnnnnnnnnnnnnnnnnnnnnnnnnnnnnnnnnnnnnnnnnnnnnnnnnnnnnnnnnnnnnnnnnnnnnnnnnnnnnnnnnnnnnnnnnnnnnnnnnnnnnnnnnnnnnnnnnnnnnnnnnnnnnnnnnnnnncagcaccccccttcccgccaccccctgaggagcccaccgccacagcagcctttgggagccgcgacagtggggagttccggagggcacctgcgcccccgcccctgccacccgctgagcctccagccaaggagaagccaggcacccctcctggtcccccgccccctgacagcaacagcatggagctgggtggtcggcctacctttggctggagtcctgagccctgtgacagccctggcacccctactctggagtcctctccagccgggccagagaagccccatgacagcctggactcccgcattgagatgctgctgaaggagcaacgcaccaagctgcccttccttcgtgagcaggactcagacaccgagatacagatggaaggcagccccatctcctcctcctcctcccaactctccccgctcagccactttggcactaactcgcagcccggcttccgcggtccctcgccaccctcctcgcgcccctccagcacaggtctagaggacatcagtcccacaccactgcctgactctgatgaagatgaggacttgggcctgggcctggggcctcggcccccacctgagccaggccccccagaccctatgggtctgctaggccagacagccgaggtggatttggacctggcaggagacaggacccccacctcagagcggatggatgaggtaccaccatgcctgtctgtctgtctgggattgattttgtctgtcttgtgttctactcctgatacattttactagctaagatgcgggagcaacgggaccctgtaacgctcctccctggacgcaggctaagttctgagctctggcggggttttcggagagaccctaggctgtgctcatggtcccaggtcattgtctctgttaatggcgctgtgtgaggctggctcaacaaacactcccaggtgttctttctcagagcctggtgccctgaagagaggagaaagcatgcaggtggagcggtccagcagtccatctgtccatctgtcttccttttcttggtggctaatttaggatctaacgtttagggggaaggggttagggttagctttggaggggaacagagtgtaaatcagatgaaggtgtctgccccctactccttcctttcttccctctatctcattacccagacctcctgtctcaagaagtttcgaagctgggatggtgaaggttccactgtccaggttttctaggggagaggatcattgtgtcatctttctaagctcaaccctgggtccttgtactagggggcccagcacgcattaacaagtagacgctcagataagagacccatgcacctgtggacacagatttgcgtgtcctccattagccccctctggctgcctgcaaaggaactttgggagtcaggggaggaggtggggccgcagatggctgaggctcctgggagcctgctagcagttctggggaagtggttttctggcttcaagggtcaaggcagagggaactgacaggtgtacttgagctaactaactaggctgtaggcccttcccccatccctcttaggcagcctaggtttggcggatgtttatcatgccagccacctggtccagggttgagtcgctggaggtcacaggccgccctaacactctctcccttcctccctccttccctccctccctgggcataagaagaggaaagctgaggctgggaaggctggagtctggactgctccaggacagaattatggagatgcttcagagtagagctaagcatcaggtcggccctccggcgccccctgctggaggtcgggagagcagtacttaggttctgctgtctggtagtgcttggtgtctgtaagagctcttgccccgacaaggctgaggtagagaggacccgtgggaagggacaggataggcagaggctggtgagtttaaaaaaaaaaaaaaaaaggtttcagccccagagccttaattagctgccttgtcacacggactatgtgacctctatagaggaaggtcttttctctctctagtctcagtttcctcatctgttgagtgggtctgtatgagtcctgcctcaccatctccatggaaacaaggtgtcccttcagtttgcctgaactacaggcactgcggccaactggttcccacccgctgtggccagggagggagggggcagagccagtttgcctgcgcccctgtgattggctgactatagcagccgggagttaaccctctgagcgctgctccacggtgatgctgggtgctgtccggagctgacgttagggcattctttctcttcttgctcagcttgcctggcctgccctcccaagggtaccttgagagtgtgctctcaagatgtgttgtgttgtgtgtacagggggagatgagagtctagacactcctttccccagcagatgactcctctgaggcccttctcatcaggtggtgtgtgacctctgacctcctgccttctcagccttccaaagcacctactgtcacttaagctttgttttcttaatattttcacccagggtgagatgtgtgtgtttgggaggggggggcggggcgtctgacccacagagtcccttgcggaaccggaactcatttttctcaccttccctccagctcccacctctaaaccatagcaactcagggcctctctccagttcccaggctcagatgctaacatctcaaaagacccagatctcaatagactcctcccacatcaagtttggcccaggttgtcctttgatcccgcccctttccaccccccttgcagtcttagcggaagctcttcctggggcaggtgtctggtgtgtgtgtgccctagcccggcttcttgaggtctgttgtgggatgcgaccacgcatgtctgtagctctcagccttgccagcctgttctaaaagccaaggagacttaagtgagaagattgaactggcccagtgggagtgagctggcccagctctggagctgtagagcactgacctagcagcatgtcagctagggctcagtccctagcacaaaaacaaacagaaaccccttctaattgatgggtccttaaggcggctgcctacccccacccaggctgccagcacttcctcgcagcgggtaccttttgcactaagccctgctggccacagtggctgaaccccaggctggggagccacttcctgtttcaaatcccccggctgtggctcttattggttgcatggtctccaggaagttactaaagcctttacatgtcctgagttcctccttagtaacagtggagagaacagacccctccgcccagagttgttctaagaactggccaatgcatgtaaattttcctggcacgtgggaagcatcactgagtgttaactctttcctgtgatctttcagactctctcagacctctgcggggttctccccacaccctgttcccttctctcggcctttccccttccccatgctgagatttctcattccgcttacgtttcacctccaccattttttagaagttcagctccatacaaatcaagacttgtggctgtctcggtcactttcggcttctccgcatctagaacagtacctggcacacaggtgccgcagagggaatggctatttggatgccccttgtaccaaaggagaaaagtatcgtttggaatggttgactgatgtgcccgaggtctggccagcacgctgggagtcccccacactgatcccctgatcccctgatcccaagactctgactccttggtgcttggaaaatgcttacagaaccctcactgctctcttccagggccagcagtcctcaggagaggacatggaaatctcagatgatgagatgccctcggcccccatcaccagcgctgactgccccaagcccatggtggtgaccccaggggccggggctgtggcagcccccaacgtgctggctccaannnnnnnnnnnnnnnnnnnnnnnnnnnnnnnnnnnnnnnnnnnnnnnnnnnnnnnnnnnnnnnnnnnnnnnnnnnnnnnnnnnnnnnnnnnnnnnnnnnnnnnnnnnnnnnnnnnnnnnnnnnnnnnnnnnnnnnnnnnnnnnnnnnnnnnnnnnnnnnnnnnnnnnnnnnnnnnnnnnnnnnnnnnnnnnnnnnnnnnnnnnnnnnnnnnnnnnnnnnnnnnnnnnncacccccaccacaacctggcttccccatgcccccacctctgcctccaccaccaccaccaccaccaccagcccatcctgcagtgacagtgcccccgccacccttgccagcgcccccgggtgtcccgcccccacccatccttccgccgctacctcccttcccaccgggactgtttcctgtgatgcaggtggacatgagccatgtgctgggtggccagtggggtggcatgcccatgtccttccagatgcaaacacagatgttaagccggctcatgacaggccagggggcttgtccctacccacctttcatggccgctgcggctgccgccgcttctgctggactgcagtttgtcaacttgcccccctaccggagcccattctccctgagcaacagtggcccaggacgtggacagcattggccgcccctgcccaagtttgacccctccgtgccaccaccaggctacataccacgtcaggaggacccgcacaaggccacggtggatggggtcttgctggtagtgctcaaggaacttaaggccatcatgaagcgtgatctcaaccgcaagatggtagaggtggtggccttccgggcctttgacgaatggtgggacaagaaggagcggatggccaaggtatgtaggtggatgctcaggaagcccgttagggtcacgagagggccggcaggaactggcctaggcatccctttctctgaagatgtgttactggatgggtggttgcttctacagccagcctgagacaactttaagaagtgccaacaagcagggtgttggtggcacatgccctttatcacagcgcttgggaggcaggggcaggtggatctctgagtttcaggctagcctggtctacagagtcagttcagacagggctacacagagacaccctgtcttgaaaaacataggtaggtaggtaggtaggtaggtagatagataagctgactaagcagactgaacccatggccactggctgcatgtggctcttcccctttaaattcttcccctttaactaagaggagacagtagcatcagacacagttcctcattggcccactctgagcttcaggagctcaacaacttcctgcccggtggcagctgccaatccaggtggtccctcagctgagacctctgggacctgattcacctcccttttctctcctgatacattgggcacaaagtctgaccttgtggggacctctgcctgcccttttccctggaggtttgcctatccagaccctcacaaatgatccctaactaactgccctttccctacacaacggagaggagggacaacgtcctgaagccttttcctttaagaggtggagtctcagtctgtgctatgaaagctcaaggatgctcctgcctcagccatggtagctacaaggacaggcacttacctggttttagtgttttttgtttttttttgtttttttgtttttttttagtttttcgagatcgggtttctctgtatagccttggctgtcctggcactcactttgtagaccaggctggcctcgaactcagaaatccgcctgcctctgcctcccgagtgctgggattaaaggtgtgcgccaccacgcccggccgttttagtgtttttaagtcctctcaaataagcagagagtcctggctcacacctttaactccagcactgggggcggggtgggagtgggggaggcaaatgctgcaggagctctgtgagttcaaggccagccagggttacatagtgagaccccccccaaacccggtctcacaaaagcaaatgatcaactaactaaaaggaaggcctcagtggctgtcccttgcccctagtccactctgctcctcaccccacccgcagaggagggcgtccaccagttttgctgtctctccctgcactgcactgtagggagctctgtgactagaaacttgttctctgcagggtaggtaagtgcggcctgtcaggactcatattacggggtcataaaaccagagaactacccgacacacagttctttatcatccattacttgaattgtgttggcccccctgggatgtgtaacagtcagagctatctgaagctatgtcgtctgtaacttaaagcgccagagctttgagggtggctccttttgtccagttcacctccgtcctttcaacccaatatgtcagatccttgagccaccaccttggggtgaacactgaagtaatagcgatgcaggcatatttgctttttgttgtgttttgttgttgttattgttgttttgttttgttttagtttttctttttcttttttttttttttccaagacagggtttctctgtgtagccctggctgtcctggaactcactctgtagaccaggctggcctcgagctcagaaatcagcctgcctctgcctcccgagtactgggactaaaggcgtgtgccaccacacccagcttgttttagtttttcaagacagggtttccctgactagccttggctacctggagctcattcgatagaccaggctggccttgctagcctagaattcatagagatccgcctgcctctgccttccaagcactggggttaaaggtgtgcgccaccacgcccggcggtggtggtttttaagacagggtctcactatgttgccttggctgtctgttacttgctgtgaagaccaggctagcttccaactcagagatccacctgcctctgcctcctgagtcctggctttaaagatgtgtgattacctcacctcgctctcacatactgtagacagtctcattttaattacagctatatctggtttttgcttaagtaaaatacttactgaaaccaggtgaagcacacctttcattttggtactcagaatggagaggaagatggaatctctgtgggttcaaggccagcctggtctacatagcaagttccaggacaacctaggctacatagagaaaccctgtctccaaaacacaaacaaacacacacaaaacccagagcctctaacccaggctgacctcagattctctttgtagcagagaatgattctgaactgggaatttttgtttccatcgctggaggggttaggatcccgagtaagccccgccacacacagtttaacagtctctgggaatggaaccaaaggcttcatgcccgctaggcaaacactcttctagctgagatgtatccccaactgtgaaagaaaaacttatctattttgtatatgtgaacacagtgtcactgtcttcagacacaccagatgagggcatcagatcccattacagatggttgtgagccaccatgtggttgctgggaattgaactcaggacctctggaagagcaatcagtgctcttaaccactgagccatctctccagccctctgaataaattctttaagctatgggcagtgcctgagccagaagtgaaacccccccacccacccccaactccgtcatcccgcacatgggaagtacccccacaacccttgctgggaatgtcaggaatttgaggccagcctaagctacacagttccatgcataaaccaacataagtgggctagaaagatgtctcagcagttaataagcactgcaactgcatggcaggccaaagctgtctgtcaatccagttctgggaatccagcgccctcttctggccttcataggtaccaggcatccatagcacacagacagacatgaagaccaagcagctgtacacataaaataaaaataaactttggccgggcagtggtggctcacgcctttaatcccagcactcaggaggtagaggcaggcggatttctgagttcgaggccagcctggtctacagagtgagttccagacagccagggctacacagagaaaccctgtctcaaaaacaaacaaacaaacaaacttctaaaggaacttatataacagattcaaaaggctaggaacttgggtttgtttgtttgttttttgttttttgtttttttttaattttgaactagggtcttctaaaactaaggttggcttcaattttgctatggagccaaacaagttgtccttaaatactcccatctgccgagtgtgtgccaccagtcccagctctgttgttgttagcggtgtttagttggttggtggtggtattttatgtaataggtgtttttgcctctatgtatgtaagtgcagcgagtgcctgcctgtgttccacagaggcaggcatcgaatgcccagaaactggagttacagacggttgcgagctgccatatagctgctgggactagaacccaggtcctctataaaggcagccagtgctcttaacccctgagccgtctctccacccctccccctccccattctgtttggtattggttttgcttctttggtttttcaagacagcatttctctgtagccctggctgttctggtactggctacgtagaccaggctggccttgaactcagatccacctgcctctgcctcccaagttatgggattaaaggcatgcaactcccatggctggccttttttctatttcttttcttttctttatcttttttttttttttttcagcaatagctcaagagataaaattggtttcaattaatttctgaaagaagaactccattccttttgttccgggtatattgggtccactgtgtagacactgtgactgtttgtaataccctgggaccacacagcacagggaaattggaccttggtgcctgtggtagtgatgtagatatgttcttgcagcgcacagctctcattcctgtgccccccatgtggaggccatgctccaaaaactgcagctgtggtagtgttgttggtgaagcggtggtggaagggcagtgtggggctctagaaccctagaaagagagggaggttgtggcccagtgtatgggaaaaaagtgtgccattaactaaggctgcctgcagggggcagcagcaatgcctcggactctggtcactgtccccttctctcccatcccaggcctcactgacccccgtgaagtccggtgagcacaaggacgaggacaggccaaagcccaaagaccgaatcgcctcctgtctgctggagtcgtggggcaagggtgagggcctgggttacgagggcctaggcctgggcattggactgcggggcgccattcgcttgccctccttcaaggtcaagaggaaggagccaccggacacagcctcttctggtgaccagaagcggctacggccttcaacctctgtggatgaggaagatgaaggtcagtgctttctgctgctggctggctgttggtttccccctcctccccatcactgcgtccccgctcataactccttctgttcccacagagtcagagcgggagcgggaccgggacatagctgatgctccctgcgaactcaccaagcgggaccccaaaagcgtgggtgtgcgacgccggccaggacggcccctggagctggacagcggcggggaggaggatgagaaggagtccttgtcagcgtcctcctcttcctcagcatcctcatcctctggatcttctaccacctcaccctcatcctccgcctcagacaaggaagaggaggaccgagaaagcaccgaggaggaggaggaggaggaagaggaggaggaagcagaggaagaggaggaggaaggccccaggagccgcatatcctcaccctcatcctcctcaagctccgacaaggtctggatcagagcctcccgggtgctgggtgttcggacacgggcctccagctcacctgtgtccctctgtccctgtgccccaggatgatgaagatgacaacgaagccgacagcgatggccagattgattcagacatcgacgatcagggtgcacccctgtcggaggccagcgagaaagacaatggagattctgaggagggtaagcagggaagtggttgtcccggccccgccccccacccccagcctgtgctctcaagatgggacatcacactgatattgggggaccaatatcttaatgcttttgagagatgtgcttcttaaagcacgtacctccccctgtgttaggattccagactgggtgagtctagaggcccagaaaatagatcagtgggtacttgagccactggtgggggaggggtgctgggggggagggctgctgaaaggagtagcttctgactgttgatgggagtgcttaagaactaagtggaggggatggccgctttgggagcctgtggggtgccaagattgttcacttccaaatgtacagtcttatgttaatttcacctggagcctatttatattgaggagtagtttcctcctggtcagcatttgaaggctgtgtttaaagggcttcctgttgaaggccttttggggaaatacttagcatggggcaggagcagcccgggctgtgaagtaacccgcccaacttgtgtccctcacccagaggagacagagagcatcaccacctcaaaggccccagctgagtcgtcctcatcctccagtgaaagttctggatcttctgagtttgaatccagttccgagtccgagtcttcatcttcatcctcagaggacgaggaggagatgaccgtacctggggtggaggaagaagaggaggaggaggaagaggaggagaaagagactgcaatggctgcagccacggtagtggctatggcagaagagagcatgcctccagcgggtggccaggactttgagcaggacagggcagaagtgcctctgggcccacgaggccccatgagggagtccttgggcacagaggaggaagtggacattgaggctgaggacgaagtccctgagatgcaggctcctgagctggaggagcctccattgcccatgggtgctcggaagctggaagggagcccagagcccccagaagagccaggccccaacacacaaggggacatgctgctctctccagagctccctgcccgggagacggaggaggctcaactcccatcaccgcctgaacatggtccaggtaattcttcagcctcctgggtgggagtcgggtagggcatgtggcaaaaagctgggtagtgtctttttccatcagaaccagtcaccagtcttctggaagggcctcagcagacccccttctttgggttgagagtacctgcaatggcagaaacggtgtctccgccagacacagtgttgccactgagcgccacctctggggaatcagtacctttagttaattataattcattttaacactttagaatattcaacatagtcgaatgtggttagactgtacctttatgagatcgggggaaaagccaactgtagattttgtgtaatgtatcgcttctgactgacaggaccacagctctttaaacggtaactcaatgagaggattcttgtggctccagcaccgttttagtcgttgttaatacagtagtagatcaaatggacaaagatacctattctcatgaaagcacatattactaggtcagagagacaggttacagcaaatgcactggggaaaattagatcccaagagagtggaggcaaacgccaggagaagtccgttcagactgtctgggactcagatgagacttggattttgttccaccatgaagcctgtgggcctcagggacaaagtagtgtttccttctctggagtccagacccaagaccttgtggatacatgccaggcgggtactgtatcaccaagctgtgctctagccccaagaacatagcttggcagacatggggaaagctagcattgcccttcttggcacttacggaaaccctttctgggtccctgaccctgggctggttactgaagagccttgcatagtagtatctgtgtggtaaacacatagaaggtcagtaaagagagaaggctctccgagagacttgtgaatgaaatgacaatatcctggttttgcttccctctccacagagtcagacctggacatggagcccgagccccctcctatgctctccttgcccttgcagccgccattgccgccccctcgactgctccggccacccagcccaccgcctgagcctgagaccccagagccccccaaacctcccgtccccctggagcctcccccagaagaccaccctccacgtaccccaggcctctgtggcagtctggccaagtcacagagcacagagacagtgccagccaccccaggcggggagcccccactgtcagggggcagcagtggcctgtccctgagctccccgcaggtgcctggcagcccgttctcctatccatccccgtcccccggcttgagcagtgggggacttccacggacacctggtcgggacttcagcttcacacctactttccctgagcccagtggacccttgcttctgcctgtctgtcccctcccaaccggtcggcgagatgagcgtaccggccccctggcctccccagtgctcctggaaactggcctgcccctcccacttcccctgcccctgcccttacctctggcattgcctgtcccggttctgagggcccagcctcggccacctccccagctgcctcccctactgcccgctaccctagctccctgcccaacccccatcaagaggaagccaggccggccccggagatccccaccgtccatgctgtccttggatgggcctttggtccggccaccgccaggacctgcccttgggagggaccttctcctcctgccaggccagccaccggcccccattttccccagcgcacatgaccctcgggctgtgaccttggacttccggaacacgggatcccggcccccccaccgnnnnnnnnnnnnnnnnnnnnnnnnnnnnnnnnncctccacccccaccacccgttgaatccaccaagctacccttcaaggagctggacaaccagtggccctctgaagctatccccccaggacctcgccgagatgaggtcactgaagagtacgtggacctggccaaggtgcggggaccgtggcggcggccacccaagaagcggcacgaagacctggtggccccatcggcctcacctgaaccctcaccaccccagcctctcttccggccccgctcagagtttgaggagatgaccatcttgtacgacatctggaacggtggcatcgacgaggaggacatccgcttcctgtgcgtcacctacgagcgcctgctgcagcaggacaatggcatggactggctgaatgacacactctgggtctaccatccctatatcctgccagatgtgggatcggcatccctcaggagcaggaggcccctctaggcatcccatcttgtgggaagttacagtcatggtcccagggaggcagtagtagggtcatagtcacctatcaagtggttgccgtgccaggcctgcctcactcccggaggtagctgagctggtctcaggtccaaacataagcaaaaacataaccagagactgagctgatctcccagcatggctctgcctggctgaactgaatcaatcctcggtaatatacagggtagttagtagtctcctttaacacagggagaaactgataactcagagaggctaagtgatctgcccaaagtcacacagcatttgctgcctcaggcgctctgtcagagtactctgtccatagattcctcattggccctatcttccagggaggaacaggaagtagtaagaaacatggctagtgccaggcatctaagtgcagatcatcagaactggccgggtggcatggaggtgggtggtggacctgggcatccttaccctagagagggatctgaggctggggaggccaggcagagggaccaggaggggggaatctctgagaacgtccatgttgcccttgacccacacccacccaccagcctctcctcagccaagaaaaagaaacgggaggacggtatccgtgagcacgtgacaggctgcgcccgaagcgagggcttctacaccatcgacaagaaggacaagctgagatacctcaacagcagccgtgccagcacagacgagccccccatggacacccaggtaccgtgtgagcagggcctgtgtaaatctggactcagagtcaggcagggcagggctcagacagcatccttctggcctgtaagaggggaaaggcagggctcagcttctagggaagtctgggctacgtaggtaggtagacactatcgcagaattcttaaaaaggctgccttttattctatgggtagtggagagtcccaaatgttttgtttttgtttttgtttttaaatatttatttaacgtatgtgagtacactgtcactgtcttcagacacaccagaagagggcatcagacccgtaagccaccatgtggttgctgggaattgaactcaggacctctggaagagcaatcagtgctctaaaccgctgagccatttccctagccccgtcccaaattgttttaaccttggacataaatacattcccaaaaagttggcttccaccccaccccggatgcgcccagtctcacttcagcacacacttatggcgtactgggcatcaatgaataaaacagctattttctcatggggtggtgcgtggggggggggggtgtgagggaacattcaagcaaacacagggtcaggagcaaatgctgtggataagagggaggttggtgagtccaaggggggttcagagaaagtcatgctggatcagagggaggagggaggaagccacatagaacaataggaagagaccacagagaatagaaaggatcttgataagagggggggggtgggaggcttgggggagggctcagttgtgagaaaaataaaagcacttcaaggtgctgataggaggtgggtggtggcagtgcatttttttttttaagatttatttatttattttgtttatataagtacagtgtagctgtcctgagacacaccagaagggggcgtcagatcccattacaaatgattgtgagccaccatctggttgctggaaatttaatttaggaagagcagtcagtgctcttaaccactgagccatctctccaacccagagacggcatagttctttaacactcaggaggcagaggcaggcctggtctacagaaagagttccaggacagccagggctacagagaaaccttaaaccttgcctccaagaaaccaaaacaaacaaaggagactgataggaagacagatgctctaagcctcctgaagccaggaggcgggggcagatccagagagggtgtgacagggccttgtctgtccctttttgacttgtcatcccccgttgtgccagcagggtatgagtatcccagcccagccccatgcctctactcgggcaggctcagagcggcggtctgagcagaggcgcctcttgtcctccttcaccggcagctgtgacagcgacctgctcaagttcaaccagctcaaggtgaggctagacctcctccggggcagccaggtcagtgtgggacctgagtcctcacaaatcctgtccctccctcccgtgtcccctagtttcgaaagaagaagctcaaattctgtaagagccacattcacgactggggcctgtttgccatggagccaattgctgctgacgagatggtcatcgagtacgtgggccaaaacatccgccaggtaggtgctgcccagggcgctggtgaggggtggcaggggcacggagcaggcccagacttaaggctctttctaccaccaggtgattgcggacatgagggagaaacggtatgaggatgaaggcatcggtagcagctacatgttcagagtagaccatgacaccatcatcgacgccaccaagtgcggcaactttgcacgcttcattaaccacagctgcaatgtaagtgcccagtgagggaccggggtgtccccacctctgtactgaggaccccaggaactcaggcactgcaatcgtgttcagtctcctttccaggcttcatttgacccacaggtgacagggagggagagaggagatgagaagcctgaataaggggcttttctcttgagctcagttgttatgtctgtacaatgggcgcagtaggaattctggagtcatatgaaagacggaaggtgtccaagaggtgggctgaggccaggtgtgatggtgcgcacctttaaacccagcatttaggtgatggaggcaggtgaatttctgcgagctagcctggtcaacatagtgagctctgaactagccaagataacacaagatggtaattggtctcattgctcggtaaattggttttgcaagtctcttgcaagcacagagacttgagttcagcccccagaacccacataaaaggggtgtggtggggtacccgtgctggggaggtgggaacagaattctccgagcgaatctagggagctgcaggctagggagacagtgttgtagcactgatgccaaccaggtgagtgatagtgacagaagtagggacatgatggggaggagccagagccagctagaagggagacttggggagagggaggacttggggaggattttggcttcaggctcctagtgaagtgagcttgctgatctctgtagtaactatttaccttgctctccacaagtgatagaccaatgaaaaacagcaagactgtgccaataaaactttatttactaaagcaggcaagtagggcctaccatttatagaccccttatcgagggctcagaaatgacacttgagtagaagtaaagattcaggcctctcttgcagtatgtctgatgaggaagaattgtggtccttcttaaagacttagttgttttttaaacgtgtgtggatgttttactagtatgtatgtatgtatgtatgtacatacactgcatgtgttcctggtacccagaggagcctgaagagggcacctgactgaggagttaggggatagttgtgagccaccccatggaggatgggaaccaaacttaggtcctctgcaagaattgcaagtcttcttaacttctgagccatctctctctctctctggcctccgcatcttttttatttggtactggtcatgggaggagctagccggagagccattcgtggagctgatacccacgagttggcttctataactccatggcgaggattgggttggggctcccgaccccgtcttttttttttttttttagcttttaaaaggaagatttatttgacaaggttcacttagcgcaatacacctaaaaagaaatcacaatacaatgaaagacttaaatcaaggcctcagaatttcatacaaacactaagaccaaaaatcctaaaaaataatggtattgtctcttaaaacttctccattaacttaaaaataaaaaaaagagctttaaactcacgtgccttacaggttatcaaatgaatttagaattaacaaacatgccaaatgtatcactttaattgtagacgcagctcctatagttttacaaaaaagcatgttttttcaacatgcatcaacagtgttcaatgtatgtataagagcaacatttaacataattcaactgctttaacctaaatacacttactgcttacgtacatcctacagtaactagagaaaagctaggaattaagtttaacagttccagttcactcggctttgctctatcatcctagatgactgctatgttcaacattgaaccttctttgagcgatgccaatgttcacttaagagcaggcataaaaccacaaggctggatggattgcaaaatctgttaaactgaggggttttaaaaaaaatttctttttgaccaagatcccgaccccgtcttaaccgcatcaccaccctgtcttgcagcccaactgctacgccaaggtgatcacggtggagtcccagaagaagatcgtcatctactctaagcagcacatcaacgtcaacgaggagatcacgtacgactacaagttcccgatcgaagacgtcaagatcccctgcctctgtggctccgagaactgccgggggaccctcaattagtccccgcgtgccaaaggccgaggatgtcagccgtagcccaggagaaccctcgctcgccctgggccaggctccacacacacccccacccacttcaggtgctgtccttatccccagcagccgcactagggcctggcgcccccaacactatcccaggacccacccgcagccccagccccgcagcgggaaagggcttctctgtctctccacctgcgtctttccgtttttatagatgctcttcgcacgcaggctttgtatccttatgtatctggctttccattctccctccgtccgtctgtccgtccgtccgtctgtcttccctccctggctctggcctcagtcatttcccccacccctgagaatgctgctctgtggtgttgtgtctcctctttattttcttccttgtccgaagaaaagacatttttttttaaccgttgaaaatgtgaaggcagaatcagaggtggagccctgtggggaatccggaggcctcagtgaaactgggtgtgggcccagggtccaggctgaccttggactaggtgctgcaggaggagggggcctcccgcggcctcaacctcagaacactacagacccgcaaggcccctacctgcccgtcgatgcagcgagcagaccccacagtttctcccggcctgttccccagtccctgacccccaccccccgtggttgagggtgcccctttccctttggtagaccctgggggagccaagctggtcccagacaggaacttcctccttggggactcccagctgccctacctactcccccccccccacccccccaatccttgggttcaatgtttactttctcattcggatgccagcaacgatggagcctcccagggtgtccccagtgcggtgggggcgctgggaagggtgtttccactctcggcagccttggccctgcccaggtgtagagggtgacagggccctgagggcctcccccaagccctgccattacgggtttgtccgaccgtacgcatgtgacattttttgttgttgataagcttcgccccattaccctaacccccacacccatgtcaccctgctggaggcccccacccaggaggccagggcgtatttatttccatagcgagcaggttgtttctcctagagaaaggaagatggtcttggaaatgatattaaaattcagatctccatcttggacagctcctgcccccaccccaccccatcctcttcagggttaatttccatgaattttttttttctcgtgtataaaatcaaactgaagggaagaaaattattattttggcgttccgaaccaatccctgtagatagactgccataacagactacttttttcttgggaactttgtttcttgtagaaacaagtgggaagactttttttttccttctctcatttctttgtacttaaaaaaaaaaaaaaaaaaaagcaaaccaacaacaacaaaaagacacacacagtaacagcaagtcccattccccccccccaaccccccagaaagcaaagcagacatgtaaatatttctggaccgtgactgttgtgacccagagtcctcaccaagatgaagtgctccgggtgggactgacctcacccgtggaccaggtggcaggagcctcttggtacctcagcttgtgtcaagctttcttatcatgtaaattctgtacaaagaattgttttttccctttctctctctctctctctctttccctttctctctctctctctctttctctctctctctctctctctctctctctctctctctctgtcgttggtggttttgttgtggtttttctctttttttttttccccttttttaattttccacaggccctctgtgtttgagactgtgcccactagtctgaaggttgagaggattatttcgattggcaattaagacacaaggggcacctggtgggcacagcgcccacctactcttccatatgcagttgtctgcataattgtgcaaatgagaaaaaaaagatttatttttcacaagaagaaatgtgtagcgtgtagagatggcttaatttgagttcctcgggcaggccggctcgctgggggctttcttcatcttccctactgacccccatcacaaagggatgaagatgcccagatgccagggaagggctgcttggtccctggcagggcctcactgagccccgtcacgggatccgcatgcattaaccttgacttgagtttagggtgaggtgttgagctaacccttccccaagcccctggcttctccacccccacccccagcatcccaggaagggtatgcaatactcctgatctgtgggcccatttttctttgaaagcttttgttttcattgagtagatctcttgcttttgaagggtcaggggtttctgatttttttttttcctccctctccctgcccctgcaaagaagagaaccaataaattttagggttgtctgtgcgtatagactctgtcatctgtatgtaacttgtttttgaagagaaatgtttccgttgtgggtgtgtcttgctgtaaatatttgttcatacttttgtgaattcaatactatgtaccattgtattatagtaacttttataaagcaaaccataaatatactgacttttcttacagctacgccgtctctcttgctctcccccccagcccccacccctggccccttctctgtggtgaaaatgcaccctagtcatgagggtggattggccaagctcaggaactggaggggaaggggagctagaccactcagaacattgggggtttgtttgcttttgagattgttttattccctagcccaggctggcctagaatttctgtctcctggcctctgcctcctaaagtgcaggggctgtaatcaagagctaccacgccagactgcccatttggtctccacttgattttgccctaagtctcagggttagaggttggttgtaaattctgaccctgtcagtgagttctgaactgagacagactatagtcaagctagacgccccaccagttttggttggtttggtttggcttggtttggtttttttcgagacagggtttctctgtgtagccctggctgtcctggaactcgctctgtagaccaggctagccttgaactcagaaatccctctgcctctgcctccgcctcccacatgctgggattataggcgtgtgccaccatgcctggcttattttgttttgtttttttaagagaaaaattttttctagataatttttcttaagcactttcttaggtatctggagcagctgatgctctgtaattaagcaaaaatcggtgtcataggcctgtcattccagtgactccagaggtgtcataggcctgtcattccagtgactccagaggctgaggcaggaagatcacaagttcaaagcatgagctatgaacctaagcaacttagtgagatgctgcctcaagataaacagtatcaaagcaggctgggaagttggcaagatgagacagcgggtaaaggtgtgttccaccaaacctcctgacttgagtgtgattccctagaactcaggtgtcggaaggagagaattgactcctgcaaattgtcttctgacctccccaggtatgctgtggcctgttctgggtaatggggttggtctccagggcgggggtgggggtgtctctgagaagacaaacccagaacgaggctgggcacggtggcacagacagagccagtgagctagatcaagaacagtcaagctggatgtgacctgagcttagttctcagagcaaaaggggagggcaggctcccgagagttaccctctagtcttaaaatgcacagcggtgtgtgcctacccatccacatcacacacaataataaaaattaaaaacccagaccaacctgggcataaagccaagcgaggtgattcgtgcctgtgatcctagcacctggggatgcagaagaggcaggaagatttttgagtttcaaggccagcctaggctacaaatttaagcctaattcatgtgacatagtaatggccaatgttttaagtgtgttcggtgtgaaagcaggagagagagagagagagagagagagagagagagagagagagagagagagagcaagcaggctctgctaggagacccgtattttctccattcattagatgtggccacaggcactgagggtaatcagtctgtccagccagggtcaccagggtcatctagctagcaggtagctggtgtgggatgtggcccagacaactgcagggtgaaaggtgtgtgcgaaggtgcccatgtcttagcaccaagggcaaggccacagacaagggtgtctttgtaagaaccaaaacccccaagtgtgtctgtgaaatggctcagctctctaaaatgctagctcaagtacagcatgacggcacatgcgtgtaactctagcatccgcaaggcgggatccagtgggatttagctactgagctgcctggtctacatagagcgttctgaactggccaaccggggcttcacggctgtctcaaaacaaccaaaaccaaaacaacaacaacaacaaatactgactctctggtttaaagtcatacagacaaaatatgtccagatgtggcccacaagctgcgggctgcaaccttctaggttagagaaatgtttttgcatgagtcatggaaatagggaggtgtttttgcatcggctgcagcctgatctgcttcattttctcccacattctttgtttttgttttgttttgttttgaatctcagcacgtcacagagactgtcttcaaacatctgatcctcctgcctcatcctctggagtgctgagatcccaagcatgcaccaccctacctagcttatttccccggtttcttagttcatgatctttgaagccctgacttttcctctatttggaaacaaaacaaaacaaaccagaatagaaaccatctggattctcccccatgataccgataccactttggatatatatatatttttttccttacagagatcaaagtgtgcctagttttgccatggcgtgataccaaacacctttgagtcccagccctctgggagatggagacagaggcaagccgaactagagttacaggttagcctgatctacatagcaaggccagcctgggcaacacacttagccctcaccccaccccacccccaatctcaaaaataaagtgagcctaactttaaattgactgcggctcagggaagagtgttagattaaaacaaaaggaaaagggagcaaagccccgctctgtccctggtgctgatgatgatagaccctcttgggtggtaaggtatgctcagtctctggccattaacactcttcccggttgccttatgtttttgttgttttgttttgtttttcaagcaagtatgcacaaggcgtgaggaaacgcagctgtgaggtttgggggttagggggactggtgattgccacactcaggatgcagggcaggagaggctcagaaccactcgggtctgggctctatcatacacaccaggaacaacaatgccttgagattgctgaggaaggacaccaaccctaaagtcctttgacctcttccatgtgttccgagtgatgccattaaggagggctcatctttaaaggttttaaagccatcagatgaaacgctgccacactccaacccaccgcaggacccagtttgttgtttttgtctttctaggatggatcatacgggcagggtcccacttagtaaaagttcttgcaccctgcacctgcatcccccataggggcctcagtcagcttagcggtcttggtctccccctggcggctaagtgacgccactgctccttgcggggcccaaacacaagacacaaacttggacctgggagggtagctttactcagcagggaggactcaggcaaggcggactcttgtaatagagggggtgtggccatgacgtgggtggagccctgaggttcagcctttcagccagttggagatgactgatgtgtccagcactttgcgtggtccatgtgtggataggggcttacattccagacctcacaccattgggctccaggtcagtgaggttgccccgtagggcttgctcctcctcgaacgccttgaacagagagttgaagttgcccgctccaaagccctgtggcgttgagagaaggcgcgtgtgagctgggtaagatttcgcaggcagctgatgctatcctctgggtgcaagccgtacctggtggttgtgacgttgaatgacttccaggaagagtgtgggccggtcctgcatgggcttggtgaagatctgtaggaggtagcctttctcgtcatagtcgactaggatatgcagctcctgggagggagacagtgggctctgttaaaggaaggtaaactggaccttgtggaatccttgtgggagccttggaaagtgtaaaggctactgcaccaccaaagccaataaaagactcctttctccagctttctccaaatatgccctcagtctaacccacccccacggccattccagcttagggtctggcctttctcctagagcccccctccccccattagatggcacgtaagtggaaacccggacttttttctttgttgctgaggagagtgtaaaaaaaaaaaaagcccgctgcatctagtttggaaaaacagcccgggagtttctccgaatgttaaaacgtgtcgtccactccagaaatggctcagtgggtaagagcacttgctgctctcacagagagtttgactgtgggttcacacacacacacacacacacacacacacacacacacacacacacccagcagctcacagccatttgtaacagctggaggggctctatactctcctctggcctcctccagcacgtggcctgtgtacacacagagacacacactcatgtacactttgttgacccaggccagcctggtctacaaagtgattcctggccagccagggcgagtatacagtgagaccctgtctcacaaattttaaaaaagttaacgtattccacgtggcttctgtgctagtaaaagctgtcccaaataaagccaaggctgggagacggctcagtggttgaagcaggtgtgagatcagagctccaagccctggaccccgtgtaagtgtgaggctgctgtggtgacccctctgtaagtctagcttcagaaagcagagatgggggaggggccactggagagaaggcctagcagttaagaacacttgctactcttccagaggacccaagtttggttcccaacacccacgtcaggcagcttttttacaaccacctgtaattccaagtgtagaggatctgatgcctctggcctctgtggccactggcacgcatgtgcaaacatccacacatagacacactcacaaatattttaagaagaaagaaaggaaggaaggaaggaaggaaggaaggaaggaaggaagccaagattggtcacatcagtaagctctgggtttgattgggggtgaccctgcctcggtgaataagttggaagatcaaggatgatttcgaacaccagcattgggcctccacaggcagacagacagacatacacactcagactcatatgtgtgcacatacatatacataccacagagagaaagagagaaagaaaaattaaaaatttaaaaattaagaaaacaaaaacagccaggtgtggtagcattcgcctttaatcccagcactcgggaggcagaggcaggcggatttctgagttccaggccagccctgtctacagagtgagttccaggacagccagggctacacagagaaaccctgcttcaaacaaaataaaacaaaacaaaaatacaaaacaaaaactcaattaaataaatgataaaatgagatgaagaaacctcccaatggtttctagccaaagaagagaaatggccagaattataaatagctgtaagaataattggccttgggggctggagagatggctcagcggttaagagcactgactgctcttctgagtggccctgagttcaattcccagcaaccacatggtggctcacaaccatccgtaatgagatctgacgccctcttctggtgtgtctgaagacagcgacagtgtgcttacatataataaataaatctttaaaaacaaaaaaaattggcctcagacaagctgcctggcctctgtcacacttgagatgtgtccgtctttctgtctctcgcatacttgaaggctgtgcctgcctcagggccttagcacagtttactctcttctcctatagatttcagttaaagccacccatcagcctttatctgttcctctctgcaaagcggcctcaagtggtctgctgtaactctccgcatggtaccaactctgtgtgtggcccagtgaacccggggttcttgttcttctagttaagcattgagctgagcctcacctccaggacgtccatgctctctttcacctggatcttggctgacttgagattctcccgaagcagtttgtagtaagaagatggggcggccaagaactccgtgcctcgctccctcaagtggcggatctgtcatggagcagggtcaaggtcagcttgttcaactgctgtcaccaggaggagcaacaagggcaggaggtagcagagtccctatccacgttctgtcaggataccttctccctatttgtctctacttcacagactactagtgatggctctcacttatagaatgtacactgtgtgcctgcctttctgtgcgctgctggggaaactgaggcaggcatcgatctatgtctgtctcagtacagaagccggagtgacattaaatcaagtgtgcctcttctctgcctagcccaggatgatgtcacacatcagtgtcaaaatttaaggtcccatccatggccttgaccacttgctcccgttcccacttcttcctgtccctttcccttactctgtctgagctacacccttcctgtctctgtaaccttcctggctttctcatctttgtcttggtggtcatcccttctgcctggggaactctccccatttatgtatatatctctcctcaaatgccttctctttcatgtggccctctgtccccgttagatttaggtcaacttgacacaggcttggagtcattatagaagagggaacctcaaccgagagaacacctcccttagatgagaccgtaagcaagcctgtagggtgttttcataattagtgattgatgggagagggccccgcccactgtgggtgatgccatcctgggctgcaggtcctgaggtgtagaaaaaagcaggctgagcaagccagggagagcaagccagtaagcagcatccctccatggcctctgcatccacttgtgtctccaggttcctgccctgtttgagttcctgtcctgacttcctttgatgatgaacagtgattggatgcctaaaccaaataaaccctttcctctcctagttgctttgctccccgtgtttcttcacagcaatagaaaccctgactaagacgacaccctcctgatcagccttcttctccatcctctctcacttcccagcttttgccccaactcgttgtctctctttcagaccaggactgaattagccttcctgaaggctgcatccatagggaaggcatgtttaatctggccaaaaggacatacgtagtagtcttgtagtctaatcttatttttagagaaaggttcactgaagcccagagaaggcactgagttccctggggcacacagcaaaataccagcggagcctggaccagacctcaggcttgcttgcccttgggactggattgttctgcagaatgagcttccccagcatggtggggggtaactgtgtgagtttgtgggagaggaaagggacgccccatcatccttccagggggactgccaccacccgctactctcatcggcagagactgtccctgcggctaataaaccagagggcacttgggccagacacagggttcttactgctgtgatgatgtcttccgtcttgagagcgatgtgctggaccccagcacccccattatagtccacatattcctgggaggaggggaaacaaagaaggagaccactatcatttatccatctgaccgtttatcattgatcgctcagacctatgctctctcagagcccgcaagcctccctccccgttgttgtctcctaccccacctggatctgagacttcttcctgcccggagctggctcgttgatgggcattttgatggattcctcgtagttggtcaccacaatggagcgcagagagctgtactccgtgtgcacctgcgtgtcgtccacggaccagaaccggtggaactgcaggtttttcaggtacctgcagagtggccaggggcacaccccctgagtgcctgcggagaccttcccaccctcttcccatctccaccattgagcatacacccgttacacaggatcctcaaaaaagtgacatcatgcacaccacagatttgtacttttgacgattttaagcggaagggaagtgttttgtaacaaaatgtaggttgcaacccgatgcttcgtgcgacagtcgggtgtttgcttctgatttagatgagggcgatgtcgctgtgattctaactcaaatgtgctcctgagctctttttaaatgccactgtgatattttgaaaagctaggattcccctctcccccaaaaggctgggctttagctcagtggtagaccgcttttgtagctggctctgctgtgccaagttcatgtcccaggttaacaaggttaatgtggtgcaaggagtgggctttgccgggtgcgagtgggttagttctcaatcgttgggtaattctcatgagtcttctcggggattaggtttgctctcaggggatttgctataaaacctcattagggtgacaggtgtggcagtgcacacttttagtcccagtacttgggaggcagaggcaggcagatttctgtgagttcgaagtcagcctggtctacagagtgagttccaggacagcaaggaaaccttgtctcaaaggatggacagatggatagacagacagatagatagataaataggatagatagatagataaatagatagacagatgggatagatagatatgataaataaatagatatgatagacagacagacaagtgtgtttgactgtatctttctcacgagcaggtctgtttattctcagtggccttgtgcaatactaaactgactcgcgtaggttgcaggactccttgatgagggtaggtgagcgtttcacagtgaataagggaatctgtaacctcaggttagcctcccaccccttgtacctatcttcctcttcagtttaagagctggggagatgggggtgggggtggcggtggctggtgagggcattaggtggagagaggtgcttgccaccaaacctgatgacctgggtccatccccaggacccgtgtggtagacccaagaagcaactcttgccaatggttctctggcctcccaacatgtgctgtggggtgggaagtgcatgaccgccatataataagcacacagccaaaccaaaccaaaccaaaaacaaacaaggagatcagacaagagagtctgtctctgcagcagagaggggcagactggggactcaccattctgaggcagactgcatttcttggtcgggttggttgcctacaatgtggtcaatgatctcaaggttacatctgggtctagaagagggaaggagttggaaggtgacatggctagcccccaaagctctctgttcccatgaaccctttacctatactagtagctcagatggcgtattaggccctgatgtgcatcagccgtggttaactgaacagctgttatgaacagtctcttgttcttgttctttgtttttttcaagacaggatctcactatgtagaccaggctggcctccaactcacagagattggggtgcctctgccttccaaagtgctgggattaaaggcatgcagcaccactcctggctaccatccccctcttatgataagacaaaggcacgaagtggagccgcctgcacaaggttgaacggttaggaaatgacggagctgcctgtgaacccaggcagtctggctggaggccccagccttcatcttctgtgcctcttcctggtgcctgtctcacctcccgaagtttcccaccagatgcttacatatacagatattccagtctcccagagaagcccatgccacagagtgagaaagaggccatagctttctaccactcccacatcaagggacactcacagttttggaagcagggtatccttgtatgttggggcctcgaatccaggtaagaaacggccagtgtagttgatcttctccaccagggtgtgtgtggtatctccatactgggggtgagaagcagctggttagggagaagccctccccccaccaatcctagcaaagcccccactcttctctaagcaccaccacagccatgagtcccaccatgaagctgaccctaactcagtagaagatcctttctggaatgttcgactacctgccgttttgctcggtagtaggatgggagactgtgatgcaaggatgctctttctgtcctcatggctttatttatgttcaagattgagtctatgttcatggagatcctcctgcctcagcttcccaagtgctgagactgcagccatggtttaccatgcctggcttttgcttttcataagta

SEQ ID NO: 354 - DNA, 5369 bp, Mus musculus
atggagaacagtcacccccaccaccaccaccagcagcccccgccgcagcccggcccttcgggcgagaggaggaaccaccattggagaagttacaagttgatgattgacccggctctgaaaaaggggcaccataaactgtaccgctacgatgggcagcatttcagcctggccatgtccagcaaccgcccggtggagatcgtggaagatccccgggtggtcggaatctggaccaaaaacaaggagctggagctgtctgtgcccaaattcaagatcgatgagttctacgtgggccctgtgcctccaaagcaggtgacatttgccaagctgaatgacaacgtccgtgaaaacttcctaagggacatgtgcaaaaagtatggggaggtggaggaggtggagatcttgtataacccgaagaccaagaaacacctgggcattgccaaggtggtctttgccacagtcaggggcgccaaggaggccgtccaacacctgcacagcacttctgtcatgggcaacattatccacgtggagctggacaccaaagatgctctgaagcgcctcaaagatggcagcctgtctgcaggctgcggctctggctcctcgtcagtcacccccaatagcggtgggacccccttctcccaagacacagcttactccagctgccgcctggacacacccaactcctatggacaaggcaccccaatcacgcctcgcctgggcacccctttctcccaggattccagctactccagccgtcagcccacaccctcctatctcttcagccaggaccccacagccacattcaaggcgaggcggcacgagagcaagttcacagatgcctacaaccgccgccacgaacatcattatgtccacaactcagcggtggctggagccacagctcctttccgaggctcctcggacctctcttttgggacagttggcagcagcgggactcccttcaaggctcagtcgcaggatgccaccactgaaagttctggatcttctgagtttgaatccagttccgagtccgagtcttcatcttcatcctcagaggacgaggaggagatgaccgtacctggggacagggcagaagtgcctctgggcccacgaggccccatgagggagtccttgggcacagaggaggaagtggacattgaggctgaggacgaagtccctgagatgcaggctcctgagctggaggagcctccattgcccatgggtgctcggaagctggaagggagcccagagcccccagaagagccaggccccaacacacaaggggacatgctgctctctccagagctccctgcccgggagacggaggaggctcaactcccatcaccgcctgaacatggtccagagtcagacctggacatggagcccgagccccctcctatgctctccttgcccttgcagccgccattgccgccccctcgactgctccggccacccagcccaccgcctgagcctgagaccccagagccccccaaacctcccgtccccctggagcctcccccagaagaccaccctccacgtaccccaggcctctgtggcagtctggccaagtcacagagcacagagacagtgccagccaccccaggcggggagcccccactgtcagggggcagcagtggcctgtccctgagctccccgcagctacccttcaaggagctggacaaccagtggccctctgaagctatccccccaggacctcgccgagatgaggtcactgaagagtacgtggacctggccaaggtgcggggaccgtggcggcggccacccaagaagcggcacgaagacctggtggccccatcggcctcacctgaaccctcaccaccccagcctctcttccggccccgctcagagtttgaggagatgaccatcttgtacgacatctggaacggtggcatcgacgaggaggacatccgcttcctgtgcgtcacctacgagcgcctgctgcagcaggacaatggcatggactggctgaatgacacactctgggtctaccatccctatatcctgccagataaaaagaaacgggaggacggtatccgtgagcacgtgacaggctgcgcccgaagcgagggcttctacaccatcgacaagaaggacaagctgagatacctcaacagcagccgtgccagcacagacgagccccccatggacacccagggtatgagtatcccagcccagccccatgcctctactcgggcaggctcagagcggcggtctgagcagaggcgcctcttgtcctccttcaccggcagctgtgacagcgacctgctcaagttcaaccagctcaaggtgaggctagacctcctccggggcagccagtttcgaaagaagaagctcaaattctgtaagagccacattcacgactggggcctgtttgccatggagccaattgctgctgacgagatggtcatcgagtacgtgggccaaaacatccgccaggtgattgcggacatgagggagaaacggtatgaggatgaaggcatcggtagcagctacatgttcagagtagaccatgacaccatcatcgacgccaccaagtgcggcaactttgcacgcttcattaaccacagctgcaatcccaactgctacgccaaggtgatcacggtggagtcccagaagaagatcgtcatctactctaagcagcacatcaacgtcaacgaggagatcacgtacgactacaagttcccgatcgaagacgtcaagatcccctgcctctgtggctccgagaactgccgggggaccctcaattagtccccgcgtgccaaaggccgaggatgtcagccgtagcccaggagaaccctcgctcgccctgggccaggctccacacacacccccacccacttcaggtgctgtccttatccccagcagccgcactagggcctggcgcccccaacactatcccaggacccacccgcagccccagccccgcagcgggaaagggcttctctgtctctccacctgcgtctttccgtttttatagatgctcttcgcacgcaggctttgtatccttatgtatctggctttccattctccctccgtccgtctgtccgtccgtccgtctgtcttccctccctggctctggcctcagtcatttcccccacccctgagaatgctgctctgtggtgttgtgtctcctctttattttcttccttgtccgaagaaaagacatttttttttaaccgttgaaaatgtgaaggcagaatcagaggtggagccctgtggggaatccggaggcctcagtgaaactgggtgtgggcccagggtccaggctgaccttggactaggtgctgcaggaggagggggcctcccgcggcctcaacctcagaacactacagacccgcaaggcccctacctgcccgtcgatgcagcgagcagaccccacagtttctcccggcctgttccccagtccctgacccccaccccccgtggttgagggtgcccctttccctttggtagaccctgggggagccaagctggtcccagacaggaacttcctccttggggactcccagctgccctacctactcccccccccccacccccccaatccttgggttcaatgtttactttctcattcggatgccagcaacgatggagcctcccagggtgtccccagtgcggtgggggcgctgggaagggtgtttccactctcggcagccttggccctgcccaggtgtagagggtgacagggccctgagggcctcccccaagccctgccattacgggtttgtccgaccgtacgcatgtgacattttttgttgttgataagcttcgccccattaccctaacccccacacccatgtcaccctgctggaggcccccacccaggaggccagggcgtatttatttccatagcgagcaggttgtttctcctagagaaaggaagatggtcttggaaatgatattaaaattcagatctccatcttggacagctcctgcccccaccccaccccatcctcttcagggttaatttccatgaattttttttttctcgtgtataaaatcaaactgaagggaagaaaattattattttggcgttccgaaccaatccctgtagatagactgccataacagactacttttttcttgggaactttgtttcttgtagaaacaagtgggaagactttttttttccttctctcatttctttgtacttaaaaaaaaaaaaaaaaaaaagcaaaccaacaacaacaaaaagacacacacagtaacagcaagtcccattccccccccccaaccccccagaaagcaaagcagacatgtaaatatttctggaccgtgactgttgtgacccagagtcctcaccaagatgaagtgctccgggtgggactgacctcacccgtggaccaggtggcaggagcctcttggtacctcagcttgtgtcaagctttcttatcatgtaaattctgtacaaagaattgttttttccctttctctctctctctctctctttccctttctctctctctctctctttctctctctctctctctctctctctctctctctctctctgtcgttggtggttttgttgtggtttttctctttttttttttccccttttttaattttccacaggccctctgtgtttgagactgtgcccactagtctgaaggttgagaggattatttcgattggcaattaagacacaaggggcacctggtgggcacagcgcccacctactcttccatatgcagttgtctgcataattgtgcaaatgagaaaaaaaagatttatttttcacaagaagaaatgtgtagcgtgtagagatggcttaatttgagttcctcgggcaggccggctcgctgggggctttcttcatcttccctactgacccccatcacaaagggatgaagatgcccagatgccagggaagggctgcttggtccctggcagggcctcactgagccccgtcacgggatccgcatgcattaaccttgacttgagtttagggtgaggtgttgagctaacccttccccaagcccctggcttctccacccccacccccagcatcccaggaagggtatgcaatactcctgatctgtgggcccatttttctttgaaagcttttgttttcattgagtagatctcttgcttttgaagggtcaggggtttctgatttttttttttcctccctctccctgcccctgcaaagaagagaaccaataaattttagggttgtctgtgcgtatagactctgtcatctgtatgtaacttgtttttgaagagaaatgtttccgttgtgggtgtgtcttgctgtaaatatttgttcatacttttgtgaattcaatactatgtaccattgtattatagtaacttttataaagcaaaccataaatatactgacttttcttaca

SEQ ID NO: 355 - protein, 916 aa, Mus musculus
MENSHPHHHHQQPPPQPGPSGERRNHHWRSYKLMIDPALKKGHHKLYRYDGQHFSLAMSSNRPVEIVEDPRVVGIWTKNKELELSVPKFKIDEFYVGPVPPKQVTFAKLNDNVRENFLRDMCKKYGEVEEVEILYNPKTKKHLGIAKVVFATVRGAKEAVQHLHSTSVMGNIIHVELDTKDALKRLKDGSLSAGCGSGSSSVTPNSGGTPFSQDTAYSSCRLDTPNSYGQGTPITPRLGTPFSQDSSYSSRQPTPSYLFSQDPTATFKARRHESKFTDAYNRRHEHHYVHNSAVAGATAPFRGSSDLSFGTVGSSGTPFKAQSQDATTESSGSSEFESSSESESSSSSSEDEEEMTVPGDRAEVPLGPRGPMRESLGTEEEVDIEAEDEVPEMQAPELEEPPLPMGARKLEGSPEPPEEPGPNTQGDMLLSPELPARETEEAQLPSPPEHGPESDLDMEPEPPPMLSLPLQPPLPPPRLLRPPSPPPEPETPEPPKPPVPLEPPPEDHPPRTPGLCGSLAKSQSTETVPATPGGEPPLSGGSSGLSLSSPQLPFKELDNQWPSEAIPPGPRRDEVTEEYVDLAKVRGPWRRPPKKRHEDLVAPSDEPSPPQPLFRPRSEFEEMTILYDIWNGGIDEEDIRFLCVTYERLLQQDNGMDWLNDTLWVYHPYILPDKKKREDGIREHVTGCARSEGFYTIDKKDKLRYLNSSRASTDEPPMDTQGMSIPAQPHASTRAGSRSEQRRLLSSFTGSCDSDLLKFNQLKVRLDLLRGSQFRKKKLKFCKSHIHDWGLFAMEPIAADEMVIEYVGQNIRQVIADMREKRYEDEGIGSSYMFRVDHDTIIDATKCGNFARFINHSCNPNCYAKVITVESQKKIVIYSKQHINVNEEITYDYKFPIEDVKIPCLCGSENCRGTLN

SEQ ID NO: 356 - DNA, 35623 bp, Homo sapiens
tgcagcttccaggaattttgtgagcatggcgttcagggacaactgggacacaccaaacccaaggcaggaaaatcagaacttttctttttttgcgtttaatgattaaaatgtattgaccgagctctaagccggtgccggggggtggtggcggttattccacgcacacttgccgagcctgtgcccggttctgttcctcctctcagggcacagccctctttttctgtccagtccacagtccctcccacccctttccctagcttctcagtctctgggggttgggggggcagtgaggaccttgggtggctgcagcacgatttctccctgataattgaattgaacatggtaacccctttcctatcacgtgcccacattttaaggagcagccaggtctcaacaaaatttcatttctgtaaaaaaaaaaaaaaaaagaaaagaaaagaaaagaaaaaaaacacaaaagccctcagagactgccaactaagtttgtatttcaagaaagagaccagtaaagtgtagctccaggaacgtgtcttttttgcatatgtaagcagctgcctctgaggctctataaatatcgataacccctgggccctggtctataaaagcctccttctgctgaggggtggagggttcaagcccaaggtagtccccaggccaccctggggccctcagcctggtcagggcctgtggagttcacagtaatgtgctactagagcgtgttgcaaactctgctgctcacctggccccagatatttaacaaactctggcttctgtgtcacgggcttcccttcctcttactgcaagcccctgggtattgagcagaaaggggaagacctggctctgtgggtgccatggcccaggtaatgcaggggtgggggggggctgggcgtcgcgggtggcacctctgggtttgggtttgggggagtctcagccccaggagacatgagcttctggatctcaggatcagaaaaatggtgcagctcagcagctttgttgaagaggtggggaccctgagcgaggtgcagaggggtgggaactcagggccacacagcctccctaggactggggtctcgggcacaagggacccaccagggtgccacacaggttggaatccttgtgggggctgccccatcctggaacctcactgagttccccctttcctgcccatctacaggggaaacccgaatgcggttctatgaactgttggtcactggccgatacaccccccagaccctcccagtgggcgagctggacgctgtctctccaatcgtgaatgagaccctgcaggtgggtttatggccgtcagtctgccccatcgccagctctttgatgtgccccccacctctggaaagcctcaccaactctcttatgggacccccagcctacccccacctcactccagctttggagaccaaggcctaggagggtgtgaagcctggccacgccccccacaattgggagcagggcctagagccccattttcccaagtgctcctgcagtagggctccatgggattggttctgtttcctgtggcttctcccctccccagcacaggctgtgattcccacagacccagagcctgccctggcccgcttttccacgttgatgccaaacattgctgtttccggggtccttagtgtctggtgtcctgggcatgccactacccctaaacccagaaaccagagttcatgccctgccttccagagcaaggctgactccttccaaaccactgccttccaggacacagggacaactctcgcgtggggcgagtctcatgccagctcctccctggcatcaggctgactagctgccactggcctgttcatcactttttttttgttttatttatttttttgagacagagtctcagtctgtccccaggctggagtgcagtggtgcgatctcagctcactgcaagctccacctcctgggctcaagtgattctcttgcctcagcctcctgagtagctgggattacaggcacacgccaccacacctggctaatttttatatttttggttagtagaggtggggtttcaccatgttgtccaggctggtcttgaactcctgacctcaagtgatccacctgcctcggcttcccaaagtgctggggttacagtcatgagccaccacgcctggcctctgtttatcactttaaatcctaaagcactgggtgactaggaggacaaagcccttggccatcctctcgtgcacaagattgtagttcttggtcataatcctgcctggaaggtctttgatttctgacagcctgaggcagaaagaaaatcccagcctaaaccaagatgttacagtcttcttttttctctgcctcctctggaattaggaatgaccctcaaggttccctgaacatatttggctacccctaagattagagaaaaagttagtaccatcctgacactcctcctcaatctcccccacttccattccttatgctgcagttctagagcagtttggctctgagcttcccagcagccagagtgagaagggaaaatagccctgttccattgcatgttttcccccagtggtctgacatctctgtctctccttagctgtcagatgccctgaagcgcctcaaggatggaggcctgtctgcaggctgtggctccggctcctcctctgtcacccccaatagcggtgggacacccttctcccaggacacagcttattccagctgccgcctggacacacccaactcctatggacagggcaccccgctcacaccgcgcctgggcacccctttctcacaggactccagctactccagccgccagcccacaccctcatacctcttcagccaggaccctgcagtgaccttcaaggcccggcgccacgagagcaagttcacggacgcctacaaccgccgccacgaacatcattatgtacacaattctcccgcggtcactgcggtggccggggccacagccgctttccggggttcctcggacctcccgttcggagcagtcggcggcactgggggcagcagcggtcccccgttcaaggctcaaccacaggattcagccacatttgcccacactccaccacccgcccaagcaacccctgctcctggattcaagtctgctttctctccgtatcagaccccagtggcccacttccctccacccccggaagagcccaccgccacagccgcttttggggcccgcgacagtggggagttccggagggcaccggcgcccccacccctgccacctgctgagcctctggccaaggagaagccaggcacgccacccggcccgccgccccccgacaccaacagcatggagctgggcggccggcccaccttcggctggagtcctgagccctgtgacagccctggcacgcccacgctggagtcgtcccctgcagggccagagaaaccccacgacagcctggactcgcgcatcgagatgctgctgaaggagcagcgcaccaagctgctcttcctgagggagccggactcggacaccgagctgcagatggagggcagccccatctcctcctcctcctcccagctctccccactggccccctttggcaccaactcccagccaggcttccggggccccacgcccccctcgtcacgcccctccagcaccggcctggaggatatcagcccaacacccctgccagactccgacgaggacgaggagctcgacctgggccttgggcctcggcctccacctgagccaggccccccggaccctgctgggcttctgagccagacagctgaggtggccttggacctggttggagacagaaccccgacctcagagaagatggatgaggtaccaccgtgtctgtccatctgtctgggactggttttgtctatcttgtatctccctttcccccttcaagcatttagcatgactagctaagatgcggaagcaatggggctaggaaagccaatataacaggtggaacttacagaataaaaaggggatgcagaaaacaccaggggctgtgattgagcaattggtttggcaatgagctccctagcagccgtggagagaaggaaagcatggcctagttctgatgctctccttgttaggtaagaagtcagcttttcctagggataaattctggcctgagctgctttggtaggcgtttgctgagagttcagagagtatgagctgtggggatggctcttggtccccttgtctgttgcgtggcttgggaatgatcagggagagtcctggccctcaggcagaggggaggagagagattggccagaatactgtgctgggctaagtggggtgaagccccggagcattgtctcctagagcctggtgccctctgaagagggggaaaccatggcagacagggagggtgctggtttcccttcttctcccactggctccagggatgaaggagttaagagctaacttggggtgggggtggggtgccatgtagccagaaaaaggcaaagttgaccatcccccaccctctcctcaggtcatggggtctcgttgcctaaacctccagcctcaggaagtcccgcccaggggttgggggtgagggtgccacgtgccaggttcccctgggagggtgttgggtcatcttccttggctccactcctccttctcggtccaggcacctgccttggagccgtagtcccggtgggcatgggcagtcaggggcttagacagagctctgcgtccctgtgggcggaggggaggaggactgcccccttcttgggccctttgattaggcgggtctggctgcatcagggaggaacgagaggaacttggcttgcctgggagggtgctgcaggtggctggggctccagggggcctccaagcagttctggggaagtggtttctggcatcaaggggtccaggcagggggccttggcagggggcgttgacaggtgtgcagctgtaggggggccgccggccctggcacccgtctcctccgctccgtctaggctgcctggggtgaggagtgtttaccatgctgaccacggtccagggctgagaggcccgcagtggctggagcgaaaggcaggctgaggccccgggagcgagggtctgggactgcccggccgccagcgcagggagtcgccgagtgccgggaagctccgggccggcccgcgggcgccccctgctggcgccggggaatagcgcctgggctttctgcggccgcgcgcagtgcggggagctggaccccgtcccatcctaggtgggggagcggcgcaggcggggccagccgagggtgcagggggggcttttcttctaaacagtggctggtcgttaaaagttcaggctcaagttcttgagtcctgccaagtcacttactggttatgtgaccctggaaaaggcacttttgcctttctgagtctcagtttcgtcatctgccaaatgggcctgtgagagtccctgcagcacaggacctcagcttaagtgaggtgccgcacaggatgctcccggcaccgccaggcctgctggactcccagttctcagcaaattcctgccgcttctcaccccgagactgctgggcagagggaggggcagggccggccggggctggagcgcaggatctgcctccctgtgattggctggcggcggcggcccgggttaaccctctgtgtgccgcggcgcgctgtgctcggctctgtccaggactgatctggggagtgctctctgaggatccacccgagcccgtctgtctcttcttgatgtgcatggggatcctgagaaggagagtgtgtgcgtgcgtgcgtgtgtgtgtgtgtatgtgtgcacagaggggacctggtaaagtccagagcttcctgccgctgccttagtttgggtagtctccgtcctcctaccccgctacctgcagttttcctctgaggccttcctcacctgtagtctgacctctgatcttgcaacttgcacagactccacctccacccccactccccctcagccttcaaaggtccccccaccccaagtccagacctgtccactcggctccctaaagccccacgcccatccttgacacctcccacatttacccctcaccaccgccctggatcccagctgcagccccgcactgggcaggtcctgggctccagaccttcttctgactggctgtgccgcggggccacggctgaggctctgagtgtgtttattaactgtcaaatgggtcggagcagagccccccgccctgtgaggttatctttcggataaaaaatgaggcagccgtctgcagcgcttagccccacgcgggcccacactgattgtgcagtcacgagactaggtgaaaagagtaatcaaggaaaaataaataacaacacacttcctgtttatgggccttagtgctgctaaacccccgctccaatgtcacctttcctgcctggccgtctgccgcagagtgaggacagcagggtgactgagagcacaggctgcagaaccacttcctggttcaaatcccggctccatctcttcttggctgtgtggccttgggcaggttacttaaattctctgtgccccagtttcctcgtggggcaaaaatggagttgaaaatagggctgttctgaggattagctgagttaataaatgtggagcgtttagaaaggccctggcacataagagacactatggaagtggcaactatttctgcacacaagttgcaacagaatctctgaaattgcaacagtttcatcctctgtgccccacccgtctccctgccttctttctctccctcacgtttcccgtattcaccctcatcatccttttgccttttcctgctggctccgctccacaagagtaagatgtttgcctgcctcttcaactttgtgtccccagcacctagaccagtgcctggcacacaggtactgagcaaatgtttgttgaattggaatgaatgaatgaattctagtggtaactccatgaggcagggactatgatgcccattttgcaaatgaagacgctgaggcttggagaggctgaatggcttgcactgggtcacacagctgggagtgccactgattgctagtcttgcagaggggactccgagagccccttggccttccagactcacctcactgtctctccctgctctctctgcagggccagcagtcctcaggcgaggacatggagatctcggatgacgagatgccctcggcccccatcaccagcgctgactgccccaagcccatggtggtgaccccaggagcggcagccgtggcagccccttctgtgctagccccaaccctgccgctgcccccgccacctggcttccccccgctgccccccccaccaccaccacccccaccgcagcctggcttccccatgcccccaccgctgcccccaccgccgcccccaccccctccagcccaccctgctgtgacagtgcccccaccacccttgccagcgccgcctggagtcccgcccccacccatcctgccaccactgcccccctttccgccgggcctgttccctgtgatgcaggtggacatgagccacgtgctgggtggccagtggggcggcatgcccatgtccttccagatgcaaacgcaggtgctcagccggctgatgacgggccagggcgcctgcccctacccgcccttcatggccgctgcggccgccgctgcctcagctgggctccagtttgtcaacctgccgccctaccggggccccttctccctgagcaactccggcccaggccgcgggcagcactggccaccactgcccaagtttgacccgtcagtgcctccaccaggctacatgccacgccaggaggacccacacaaagccacggtggatggcgtcctgctggtggtcctcaaagaactcaaggccatcatgaagcgtgacctgaaccgcaagatggtggaagtggtggctttccgggcctttgacgagtggtgggacaagaaggagcggatggccaaggtgggtgggtgggtgcagggctctgcagggtggctgtggaggggggcaggtccccagccgggcacctcctctttccctgagactgttaactggaaacgctgccgtggaccccactatgggagctccatttcatgtggccactttcaaagttccgcaaactgtgctccacttcagcagccactagatgcacacggctctttgaatttaaatgagtggccaggcatggtggcgtacacctttaatcccagcactttgggaggctgaggtgggaggattgcttgagcctaggagttcaagatcagcctgagcagtatagcaagagcccatctctaaaaataaatgtgcaaattaacttaaatgaattaaaacagagtaaaattaaaactcctcctttgtacatgccacatttcaagtgctcgggagccacaggtgcctagtggtagtacacaggatagctggtgcagactgcccccccccgcccattgcagacagctcacagctgcgactccctttgaacttgactcccctcacctcccctcatgccgccttttacacggagccctgtcttggaccacttttttcctttttttgtttttttgagacagggtctcgctgtatcgtccaggctggagtgtagtggcgcaatcatagctcactgcaccctcaacctccctgtgctcaagggatcctctcacctcagcctccaagtagctgggactacaggcatgtaccaccacacccagctaatttgtgtgtttttctgtaaagacagagtttcaccacgttgcccaggctggtcttgaactcctaggctcaagtgatcctctgccttttgggctgggattatatgcgtcagccaccgctcctggcctacttactattttcttttctttcttttttttttttttttttttcggagatggagtctcactctgtcaccctggctggagtgcaatggcgtgatctcagccctctgcagcctccacctcctgggttcaagcgattctcctgcctcagtgtcctaagtagctgggactataggcacccactaccatgcctggctgatttttgtatttttagtagagatggggtttcaccttgttggccaggctggtctcgaactcctgacctcaagtgatccacctgcttcagcctaccaaagtgctgggattacagatgtgagccactatgcctggtctcttttttcctttttaacatattatttgcctgtttgcaatcttacaggtaatctaaaattacttattttctccataagagagaactttttcttgaatactttaaactccccttaatccctcccctccaccccattcccccctgctcccctccctcgaccgtggttatgagtttgagtgtcccctggagcctgctttgggaaatgcttgctttctgccacagaggtaagcagcacttgtcagagcctgtttgtcatccgtttaactgggcagtaaaattagaatgaaccgtctgaaatcactgatacacagctctttatggttcagccaaattatactgaccctacagtaacagctaatagctattccattcacaatttgaataaaaagagccaccaggcctcatgtgccctgcaccttgcaaagctcttcatgtggctcgttttgttaattctcacagcatccctttgaaggcagagcatttcagaaccacaggggcaaccccttagtgagcagtgaaataaagccagtaggtcctgtttttaatgcatgggaagagaagagaaaatgggatagtgtaaatcttaccttgtgaaggtggtgttgcacagatgtgtccctatggtgtagtttttggattgtctgcaaagtgcaaaggccactgttgtaaggaaggcaggtacagtagtcctattctacaggggaggacattgagatctatgaggcagagcggtgctctagagcctcgtgggtaacggcatagtgtggccaggtgtgtagggaatgaggatgcagttacctgtggtggctgttactgccgagtggaaggcaggtagcctggggagggctccctgcaagggttggtggtgccagaagcggtgacggtcccctcctgtctccaccccaggcctcgctgaccccggtgaagtcgggcgagcacaaggacgaggacaggccgaagcccaaggaccgcatcgcctcgtgcctgctggagtcatggggcaagggcgagggcctgggctacgagggcctgggcctgggcattgggctgcgtggggccattcgcctgccctccttcaaggtcaagaggaaggagccaccagacaccacctcatctggcgaccagaagcggctgcggccctcgacctctgtggatgaggaagatgaaggttcgtgctctgggtgctggggtccccttcttccgcatccccccagcccagctctgactccctcccttcctgcagagtccgagcgagagcgagaccgggatatggcagacaccccctgtgagctcgccaagcgggaccccaagggcgtgggtgtgcggcggcggccggcgcggcctctggagctggacagtggtggggaggaggacgagaaggagtcattgtcggcgtcctcgtcctcatccgcgtcatcatcctcggggtcctcaaccacctcaccctcgtcctcggcctccgacaaggaggaggaacaggagagcaccgaggaggaagaggaggcggaggaggaggaggaggaggaagtccccaggagccagctctcctcctcctcaacctcatccacatcagataaggtgcctagcaggccaggaagcctcagggggccgggccaggcgacgagggccagacccttcggctcacctgtccccactcttccttctcccccaggatgacgacgatgacgacagtgatgaccgggacgagtctgagaacgatgacgaggacacagccctgtcagaggcgagtgagaaggacgaaggggactcggatgaaggtgagcagggaggccgtggctgcctggccctcccggagtccctctttccccggggcagagcctgagcaattgtcagaaatacttctgagccaaaatgttgtgcttttgagacgttaccttgttaaaacacacacacagggtggcgtacggttccatcttcagggagtgccgtgaacataatggcatgtccatagaaatagaaagcaggtctgtggtccttagggctggggagcccggtgttcaggggggcttgctcagcctacatggcttccttttcaactgataaaaatacttagggaccagatcgaggtggtggttgtgcaacattacaaatgtactaaatgctgctggaattatcactttgtaacgagcagttggccggacgcagtggcttacacctgtaatcccagcactttgagaggcctaggcgagtggatcacctgaggttaggagttcgagaccagcctggccaacatggtgaaaccccgtctctactaaaaatgcaaaaaatagccaggcgtggtggtgggcacctgtaatcccagctacttgggaggctgaggcaggagaattgcttgaatccaggaggcagaggttgcagtgagctgagatcatgccactgcactccagcctgggtgacagagtgacactccacctcaaaaaaaataataaataaaattttttttacaaagtgagcagtttttggctgggcgcagtggctcacgcctgtaatcccagcactttgggaggccaaggcaagtggatcacgaggtcaacagatcgagaccatcctggctaacacggtgaaaccccgtctctaataaaaatacaaaaaattagccgggcatggtggcaggtgcctgtagtcctagctactcaggaggctgaggcaggagaatggcgtgaacccaggaggcggagcttgcagtgagccgggatcgccccactgcactccaccctgggcgacagagcgagactccgtctcaaaaaaaaaaaaaaaaagtgagcagttttctgttatgttaattttacctcagtttttaaaagcgactactagcggccgggtgtggtggctcactcctttaatcccagcactttgggaggctgaggcaagtggatcacctgaggtcaggagtttgaaaccagcctggctaacatggtgaaaccctgtctctactaaaagtacaaaattagccgggcgtggtggtgcatgcctgtaatcccagctacttgggaggctgaggcaggagaatcgcttgaacccaggaagtggaggttgcagtgagccgagatcgtgccactgcactccagtctgggcaacaagagcaaaactcaaaaaaaagaaaaaaaagactcctagtgaacacatgccccacacacatatctgagggccgtgttcagcctgggtgccaccagtttgaggccattggtgaggggtctggtgggggctggggcacagcgggtcctcaggcagcccctcgtctgtgtcccccatccagaggagacagtgagcattgtaacctccaaggccgaagccacgtcgtccagtgagagttccgagtcttctgagtttgagtcaagctccgagtcctcgccctcatcctcggaggatgaggaggaggtagtggccagggaagaggaggaagaagaggaggaggaggagatggtggccgaggaaagcatggcttctgcaggccctgaggactttgagcaggacggggaggaagcggctctggccccgggggcacctgcagtggactcgttgggcatggaagaggaggtggacatcgagactgaggctgtggcccctgaggagcggccctccatgctggacgagccccccttgcctgtgggtgttgaagagccagcggactccagggagccgcctgaggaaccaggcctgagccaggaaggggccatgttgctgtctccagagccccctgccaaggaggtggaggctcgacccccattgtcccctgagcgagctccaggtaacacctgcaaccccctgggagggtggtgggagggaggcaggaagtcctcactgtcagaatcagcccgggcttcctggggtagatcgctgaccgtccccagcctcagtttcccgtgtaaaacgagatcagccggttgtgcctccctcgagcgagatgaggtgttgggtgccagcactgagcctggcactgcatggatcaacccaaaggggaacgactgctatttttcagtcctcactgccagcgtttccctggtggcttggtccttggaccatcagtcccatgagatgctccccaaaaggaggatgggtgtccatggtcacttgagtgacaagtcggtggggtaggccctggggtgctgggccaggtgagggctgcaggcattgccccctccggcatcgtgatgctgctgcacagagcatatgagaactctaactgcatggccagtagaactttccacagtgatggcagcgttctcaggctgtgctgtccagcactgtagccttcagacacaatgttgctaccaaactcttgaaacgtggccagtggcacagtggaactgaatttataatagtgttcaatttattttggcttacatagatagctgcatgtggttagcacctacctctttttttatttttatttttattttttttgagacatagtcccgctctgtcacccaggctggagtgcagtggcacgatctcggctcaccgcaagctccgcctcccaggttcacgccattctcctgcctcagcctccagagtagctgggactacaggcactcgccaccacacccgactaattttttgtatttttagtagagatggggtttctccgcgttagccaggatggtctcgatctcctgacctcatgatccacccacctcggcctcccaaagtgctgggattacaggcgtgagccaccatgcccggtcctagcacctacctttaataagtccttcaggaaaggattacagctgcccctgtacattgaacacatggctagggcccacggacatgcagttttcaaccaaatatggacggaaaagaccggtgggatgcgaaacccactgtatatggagggcgatcgcctatacgtgggttctgcaaggcagactacaagctttgagtatgtgcagatttaggtataccagggagtgttagaaccaattctctgtgtgtattgagggacgactgtgttttgtttaatgtaatgtattttgttttgtttattccaccattaaccacagtctttgaacattgactcaatactaagcctctattgtgtccctgctattattttaggcagtagcaatgcaacagtggaccaaacagacaaaaatatctgctcccacggagcaggggaacagatgacaacagatcaattagaaaatgaaaaacaggtggcaggctcctgtaatcccagctacttgggaggctgaggcaggagaattgcttgaacccgggtggcagaggttgcagcgagccgagatcgtgccacactgcactccagcctgggcgatagagtgagactgtcttaaaaaaaaaaaaaaagaaagaaaaagaaatgtgccgggcgcggtggctcacacctgtaatcccagcactgtgggaagccgaggtaggcagatcaactgaggtcaggagtttgagaccagccaggccagcatgacgaaaccccatctctactaaaagtacaaaaaattagcagggcgtggtggcacgtgcctgtaatcccagcggcttgggaggctgaggaaggagaattgcttgaacctgggaggaggaggttgcagtgagctgagattgtgccattgcactccagcctgggtgacagagtgagactgtctcgaaaaaataaaaataaaataatgtaaaaatagaaaatgaaaaagatgtattctgtggtcgggcatggtggctcacatctgtaattccagcactttgggaggccaaggctggcggatcacttgaggccaggagttcaagaccagcctaggcaacatagagcccatctctacaaaacatttaaagattagctgggcgtggtggcacattcctgtagtcccacctactcaggagccttaggcaggaggatcccttgagccctggcggtctaggctgcagtgaccgtgatcatgccactgcattccacccgtctcaaaaataaaaaaataagtaaattcattaaaaaattaagaagtgtatcctgtgacagtggagataagtgctaggaaaaaaatccttgaaggctccgacaagtcctgcagaaaagagacttgttgaattttattcagtcatagagcagattttcttgggccacagggactttgttctgaagacgtagtatgaaaggctggaatacatgtctcctgcatctgtgatttagcctagcaacattgataaagcacatactgtgtgcctgacactgggttgggcgctgaggagtccttgaggggtttagctggagaaggacaggtcccgtgctcagactcagggctgtgagcctgccaggtatggagcacaaaataaggcactgagagacgtttggattgaatagtaaatgtctcgtgttcgctcacctctctgcagaacatgacctggaagtggagccggagccccctatgatgctccccttgccgctgcaaccaccattgccgcccccacgaccaccccggccacccagcccaccgccggagcctgagaccacagatgcctcacacccatctgtccctccggagccccttgccgaggaccaccccccgcatactccaggcctctgtggcagcctggccaagtcgcagagcacagagacggtgccagccacaccaggcggggagcccccgctatcagggggcagcagtggcctgtccctgagctctccgcaagtgcccggcagccccttctcctacccagccccgtcccctagcttgagcagtgggggcctccctcggacacctggccgggacttcagcttcacacccaccttctccgagcccagcgggcccttgctcctgcccgtctgcccactccccactggccgacgcgatgaacgctccgggcccctggcctccccggtgctcctggagacgggcctgcccctccctctgccccttcccctgcccttgcccttggcattgcccgccgtcttgcgggcccaggctcgtgcgcccaccccgctgccacccctgctgcccgcccccctggcctcttgccctcccccaatgaagaggaagccgggccggccccggcgatccccaccatctatgctctccttggatgggcccttggtccgaccaccagcaggggccgcccttggaagggaactcctgctcctgccgggccagccacagacccccgtcttccccagcacccatgacccccggacggtgaccctggacttccggaacgcggggatcccagcccctccaccaccccttcccccccagccacccccacccccacctcccccacctgtagagcccaccaagctgccctttaaggagctagacaaccagtggccctccgaggccattcctccgggcccccgtgggcgcgatgaggtcactgaggaatacatggagttggccaagagccgggggccgtggcgccggccacctaagaagcgccatgaggacctggtgccacctgcgggctcgcccgaactctcgccaccccagcccctcttccggccccgctcggagtttgaggagatgaccatcctgtatgacatctggaacggtggcatcgatgaggaggacatccgcttcctgtgtgtcacctacgagcgactgctacagcaggacaatggcatggactggcttaacgacacgctctgggtctaccatccctatatcctgctggcatggggggctctgcaccttctgggatgcaggaagtccctgctcacctctctgggccccaccacccagtctgtagcagcccgcggtgcccatgaaggtgacagcatgcaccaccgtcacttcccaagcagggtttgtgtcccggcaccatgccaggctcccgagtgaatcattggcacgttttaaggactccctctgcgccaggcccatctcacccccagagttagcaggtctcagggtcacatgtaacagcagtgccgtgcagcttaacagcacacacgggcgcagggcctccttgtcctgtccccttcataacctcaggtaatcccagtagcctggtgaagatgggggctatgattcccattttacatatgaagaagctaaggctcagagaggttcagtgacctgtccaaagacacagctacaggtggcagagttgagatttgaacccaggcaaacctggctctagagtccaggctcttcaccaccaggctttcatgaggcttggctgttcacataggccagtgaggctagacctctcattatccctgctgtattagactgatttgtgagcactcagtttgtgtcaagagctctgctcaagtgccgggcaccatggctcacagctgtaatcccagcactatgggaggctgaggcggacggatcactcgaggccagaagtttgagaccagcctggccaacatggcaaaaccccatttctactaaaaatacaaaaattagccgggtgtggtagcacatgcctataattccagctactctggaggctgaggcaggagaattgcttgaacccgggaggcacaggttgtagtgagccaagatcgcaccactgcactccagcctgggtgacagaacaagactctgtctcaaaaaaaaaacaaaactctgctaaggaccataagcatatttcatcacttgcagagaggcatcactgtcaccccaatttacagatgggaaactgagcagaaagttgttaaaacacccagcactttgggaggccgaggtggatggatcacttgatctctggaggttgaagccagcctgggaaacatagcaaaaccccatctctacaaaaaaaatccagaaattagttgggtgtggtggcgcacgcctgtagccccagctgctcagaaggctgaggctgcagtaagctgagattgcaccactgcactcgagcctgggcaacaggagaccctgtctcaaaaaaaaaaaaaaaaaaaaagacacctagagccatgcaactaggtattgaccgtcagcagggttggtcagcgggcagccacgtggaggtggcatgggagtgggcagtagaactggacatcgctgtccctgaagggtggtctgaggatgggcgggaccagtctatgaagggaccagaaggggctctcagaatgtccatgtggcccttgacccacacccacccaccagcctctcttcagctaagaagaagaaacgggacgatggcatccgcgagcacgtgacgggctgtgcccgcagtgagggcttctacaccatcgacaagaaggacaagctcagatacctcaacagcagccgtgccagcaccgatgagccccccgcagacacccaggtactgccagggctcctggacacatcagagcctgctgggctgggccacggggatccagggcactcatggaggggtgccaggcagagggaggagttgtgaggccagaggggctggcacacagagggtgcaagtggaaggggagaggcgggtgggcggggcctaggagaaggaaggagtttgccttagtcccatgggccctggagcacctccaaagggtttaattagggatgtgacggagctgtatttccgcaagttcattcattttttgttttttgcttgggttttttttttagggggggacaaagccttgctctgtcacataggctgaagtgcagtggcacagtctcagctcactgcaacctctgcctcctgggttcaaatgattctcctgcctcagcctcctgagtagctgggattacaggtgcccaccaccatgcctggctaattttttgtatttttagtagagatggggttttgccatgttggccaggttggtctcgaactcctgacctcaagtaattcgcctgccttggtctcccaaactgctgggattataagcataagccacatcgcatggcctcattcattctttttttaatccagtaaatatctgttgagtacatgctgtgtaccgggcactgttctgggtctatagcagtgaacaaaaccaaatcctattcctcgtggaatttaattatttatttttatttttaaattaaaaaaaaattgagacggggtctcactctgtagcccaagctgatctggaactcctgggctcaagcgatcctcccgtctcagcctcccaaagtgttgagattataggtgtgagccacggtacccagctggaatttatattttaatggggactcataggaaataatcaagtgaagaaagaagcacgtaattccaggcagggaaaatgcgatggagaaaacaggagaggggttagggattaccaagtcaaaggggagtcagagagggtcagacccaggcgaagtgtgggaaggcgccatgtggatgccagagagactacagagaagtgaaaaagcgacttccataaaaagttaaaaccagagaggggctcactgaccccagcaggcctccctaggacagcagcagtgcaaaggccctgaggcagcagggagctccatggtgtgaggaagggaagggagaggccacttgtgggagagacagcacaggccaccagggtcgggggtactgtggtggtaagtgacctgtctcctggggtgacaggcagcagagggaggttgtgagaggagctggggtggtgtggagctggtgcaggggtcctgagggcagactgttcgggttgctgcggtttccagaccggatgtgccggacttagctgggccgcgaggagccattagctgtggaagaatatgaggaagtgggatggacaggaccagggctggcctgggtacaggagacagggatgggcggggggtgacagcccagggtgtggctggggtcgggggtgctgggaagctggacaccaggcctgagatggggaggctgatatgctatcaccacgaggcagcttgagttctgcgggttctgaaaacacccaggcagagaggtcttggtgggcatgtgggtatggcggagcttaggatggggatctccggcccggggacctaagtgtaggcatcgccaggagagaagtggtgactgaaggtcacagcagggtgacctcacctgggagggcacttggggcagaggcctgggatgctccaaaggttaatggctggggcagaggcccagggaggccaagagcaggacgtgacacaagggtttcggaaggatccccgattttgaacgcttgtggggtgagaggggtctgggtgagagccaaggagggggtcagggtagacaaaactttcggctgaaatggggaaaagacagcgccaggcaagagtgagtctcgtcgttttgaagatagaaggagcttgagacgctcagatactgatgggatggaggaggcagggaagcggtgacaattagggaccgacaggtgtggagaagcccagagcaaggagcccaggacactggggatgacagagatccagagcctagggtgggaccgccgaggacacggccagctccgctgagccccgcacaccgtccactgcagggcatgagcatcccagcacagccccacgcctccacccgggcaggctcggagcggcgttcggagcagcgccgcctgctgtcctccttcactggcagctgtgacagtgacctgctcaagttcaaccagctcaaggtgaggccgggcttcacccagatcgccggggtggcggcaggacctgagaccggggctcacctctccccctcttccctcccacagttccggaagaaaaagctcaagttctgcaagagccacattcacgactggggcttgttcgccatggagcccatcgcggctgacgagatggtcatcgagtacgtgggccagaatatccgtcaggtaggcaccgcccggcaggatgggcaccggggtgggcatggggccggcccagccagactgacccccttttgtggccaggtgatcgcagacatgcgggagaagcgttatgaggacgagggcatcgggagcagctacatgttccgggtggaccatgacaccatcatcgacgccaccaagtgcggcaacttcgcgcgcttcatcaaccacagctgcaacgtgagtgcccagcggggggtggcccctgcccctgctcctgcccctggccctgcttctgtgccaggagggcctggaagccccggcacgggaatcagctcggcctccttcccaagctcaggttggccaagggttatagggagaggaggacatgtgaggtcttttaccaggagctctactcctctgagcctcagtttctcatctgtcaaatgggcatagtgagacttctgtggcatttagaggactcaaagaagtggttggttcagttcattggtaatttcggagttatttctctgcgttagccttttctccgtgccttcattggtcaggctcagtcctgctcgggccgagctgtccactagaactttctgcaagggggaggtgcactgcgtgcatctgtgctgtgggttagccacatgtgtggtggtgagcactggaaatgtgcccagtgcatctggggacctgagttttaaattttatttcattttgatgaatttaaacttaattagcttgtgacgactgtattgggtggtgcaggcctagaggggagggacactgataacagggatttgagtgctgaaggaagagcacaggaagctctgagcaggaggcaggcatgttccggggtggatgcccctgactttgggttcaagtcttggcattgcagcttagtgagttacttaatgtctcttatgcctgagtttccttgtctgtaaaacagagacaataacagtctctccttttaggttgttgggagggccacataggtgggtcactgcacgtgggccatttgagtgctggccaggccagtcctcagcgcctgctggctctcttcgttgtgacttgatccttgcctgggtggtagggactttcctgtgaatatccggggagatctgaggggtgagagggaattgcccaggggaagcggtgctggggcaaggggaactgcgtgttcaaaggccctggggcagttgggagaacacctgtttgagagatagcaagggaggcagtgggcatggggtggggtaagaggatggggtgggcagggctgagggtggccaagctgaggaactaagtttctctgagagccaaggtcgctggaaggttggagccatcgggcaacaggttctgctatccctttgggaacgtttccctggctgctggggcaggagtggattttttcaggggtgagagtggccaagggggctgtagcaggcgggtgagcagtgatgggggcctgagcgcggctggtggccccagaagtggagagcagtagacacaaccaagaggcccttccgggactgaactcaccggccctggttggggccagatctggactgaaggaggcagggaggcagatgctctggggcctgggtgtgtggtgcagcggctgcccagagcaggagcagatcatgctttaggtgtgagctaagtcaaagacagtacccagggctgccactggcagacagcaggtagttgcatttatgggcttggaggcctttaccttttctgtaaagggccagataataaatgtttttggcttggtggctcagatgatctctatggcaactactgaacttggctattgtaacaaaagcagccacaaattatatgcaaatgaatgggagaatggatatggctatgtgccagtaaaactttatttacaaaaacaggctgctaggggctatagtttgctgaccctttttttagagctcagaagtgagacctgagctaaaaatagacatacatttgggaggcacttgtactacgaatggaaatgaaaggcctgggaaataatttttatcatcattatttaatatcagaggcaaggggtcacccctgggggtcgggggagccaaggtccagagcagagcagtgggctgggggtcacgtggcatgtcaggccttaagcacaggcctggttgggtttggggggtctgcagtggtgggggaccctgggggaccaggggctcattctcccccccaccttgcctgcagcccaactgctatgccaaggtgatcacggtggagtcacagaagaagatagtcatctactcgaagcagcacattaacgtcaatgaggagattacctatgactataagttccccatcgaggacgtcaagatcccctgcctctgtggctccgagaactgccgggggaccctcaactaggccccggcaccagactcaaaggatgtcagccgtagccctgggactcccgagcgtggagcccctggccccggggcccggccccccgcgcccgcccccatttcaggtgctgtcctctacccagcggccattcagggcctggcgccccacactaccccctggagcccctggctccggcccctccgcgggaaagggcttctctgtcgttcagcccacgtctctctcattttaacaaacgcccctttcaggatttctgtttaactccagcatcagcttctctctctccgtctctcctcccctctctctcttctctgtctcttctctctcccaccatcaccctcggcctcttcctgtgaatgctgctacgttgttttgtcttctctatttttttcctcgttgtgagaaaagacatttaaccgttgaaatgtgaaggtggaatcagagaggggccccgcgggggtctgcagaggcctcagtgtggctgtgcgtggcccgtgtcctggaagccacccggacctggacgcagggccaggtgctgtgggaaggatggaggcccccacggccttgacctcagaacactacgccctgaaagcgcccctcactgcccgtgggcacagtgaggagaccccacacctttccccacccgagctgcagcctgttccttccccagaggcctggggcaccactgacccggtggaccctgatggagctaagctgtcccaggcaggggtctccgctctgggctttccctgccacctcacaccccagcaccccctaaaccttgggttcaatgtttactttctcattcggatgccagcaacgcgggagcctctcggaggccccagtgcaggtgaggggcgctgagaacgcgggcagccactctcttctgcccttgccttcgccctgggtgggacagggctcccaagggcaggcgggtcccccagtcccgccattacgggttgtcagaccgtctgcgtgtggcattttttggcttataagcttcacccactcacccccaacccacaccccacatccccctgccggcagcccctcaacctaagaaggccagagcatatttattttcggagggagcagattacttctcccagagaaaggaaaatcttggaaaagatttaaaaacacaaatctaagccttgacggtttttttttcccttttgacccccttcccatctcttcagaatttattcccatggcttttttttttcttgtgcgtgtataaaatcaaaaggaaggggaaaaaggtttttgaagttcagaaccaacttctgtatatagaggctgccgcaaaggactttctcttgggaacattgtttcttgtagaaacatgcgggaagacattttttgctcatttctttgtacttccaaaaaaaaaggaaaaaaaagacaaaagcaagtccccccgtaccccagaaagcagaggaggcgtgtaaataatttctggaaagtgactgttgtgacccggagtcctcatcaagatgagcgcgctccatgagggagctgctcccaccctgcggacgcaggcggccggagcctctggtatctcagcttgtgtcaagcttgttatcatgtaaattctgtacaaagaattgttatttttctcttttttgttgttggtggttttgttgtgtgttttttgttgttttttttttattcctttcccccaggccctctctatttgagactgtgcccgccggtttcaagatcaaggaaattggtggcaacaagacacagatggggtacctgggcacagcggcgaacttctcttccgtttgcggttttctgcctaattgtgcaactgaggaaataatttatttttcacatgaggaaatgcgtagcttgtagagacggctgattcaagttacatgtacagcctccaaagggctgtctccattctgtccccttcccataaaagaagtgggggtgttcgagaagaccagggaagggacccttgcctcacccctccccctggcctcaccttgctcccagccatcgtgcccagtgttaacctcggctggccttcactaaggggactagacctccctctccccaggagccccagccccagagtggtttgcaataatcaagatatgtgtcgagtcatttttctttcaactccctcatttttcattgaacaaatctctgcttttcaagagttgggggtttctgctattttttgctttctctccctccccctgcaaagatgagaaccaatgagttttagggatgtttgtgcgggtagactccatcatccatatgtaacttgttttgaagagaagtgtttccgttgtgtgtcttgatgtaaatatttgttcatatttttgtgaattcaatactatgtaccattgtattatagtaacttttataaagcaaaccataaatatactgacttttcttacagatacgccgtctctcttgctctcctctctccctctcctctttattctttctttctgttgggagcacatcctgcttctgtggagggtggagtggtccactcagacactcagatcagcaggggtttttttgtttgtttttgagacagggtctcactctgtcacctcaggctggagtgcagtggtgcaatcatggctcactgcagccttgacttcctgggctcaagtgatcctcccacctcagcctcctgagtagctgggactacaggagcacaccaccatgcccagctaatttttaagaaatttttctgtagagacggggtctccctatgttgcccaggctggtttcaaactcctgggctcaagcaatcctcccacctcagcctcccaaagtagtgggattacagatgtgagccaccgtgcccagcctgaacttgtaggtgggttttgtgaaatgggccaaattatagtcaccactagaccttccacagcttttaagtgtgatttctagatttttttcttaaaacctcaggtttctgactcatgaggtctgcaatgaaggaaataagatcaggtatccttttactatcactagaagaacgtaggtggttcctcagaaatgtttaacacttaaggagatgcccccctggtctgcatttgagggaggaaaaagggctgataaaatagtagaagttgagaagaattaaatctatcctgtattcatggcatttcagagatgctgtgccccagtcagtctcagctctgcttgacccagtagacgggtgataaagggcttatagttggcgtccacggtaaatgtctccaagaagacgtaaaaccttagcaaaaagcaatatgcctgaaaagacgctgtacgtcacttcctactggagaaatgtgaattatcccaggatgccgtttccccctgtcaggttggcaaatattaaaaggtggaggaaacccaatttgagggagcaggaggctggggtactctcgtgtgtcattaggggaagccaaaaatcactgcaacctttaggaggaaaaatacctattagtaatcattatttaaaatgcacacggccggcacggtggctcacgcctgtgatcccagcactttgggaggcctaggagggcagatcacctgaggtcaggagttcgagctagcctagccaacatggtaaaaccccatctctattaaaaatacaaaaaaattagccgagtgtggtggtgcacgcctgtaatcccagatacttgggaggctgaggtgggagaatcgcttgaacccagaaggtggaggttgcagggagccgagatcatgccactgcactccagcctgggcgacagagtgagacctcgtctcaaaataaaatgatcaaatgcacacaaaagtcttggctccgttgttccactgtgaggaattgagcctgacagatacagtgggcaacaatatgaagaagagtgttcttcgcagcctcatttctggtatcaacgaaacgaagggagagtaaattgtccgttcacagtgggctgcttttaggaattgtgcatccagacaggtggacactcccgtaagtggattcatgggaatagagggctgaggtccgggctgagccaggaaagagaaggaagtgtctggccattaattcaatcaaccaatatttattgagcaccttgtatgtgccaggtactcttctaggctctggggataggaatgaaggaaacatactgttcttgagggcgagccagacaaatgtgaaaagtaagtgcaatagtaaggaggaataaagctaagagaagggggtgtagctgaaggaatatacaattttacctttattatttattttagagacaaggtctagttctgtcacccaggctggagtgcagtggcatgatcatagctcactgcagcctcgatctgctgagctcaatgatccccccacttcaacctcctaagctgatcagggccataggcacactttaccataccagctaattttaaaaatttcttttctttttttttttcttgagacagagttttgctcttgttgcccaggctagagtgcaatggtacaatctcggctcactgcaacctccacctgccgagttcaagcaattctcctgcctcagcttcctgagtagggattacagggattactaggattacaggcatgtgccaccaagcccagctaattttgtatttttagtagagatgggatttctccatgttaagcatgctggtctcgaactcctgacctcaggggatgtgccctcctcggcctcccaaagtgctgggattataggtgtaagccaccgcgccagggctttttctttctttcttttctttctttctttctttctttctttctttctttctttctttcttttttctttttttttctttttttttttttttgttgttgttgttgttgagacagagtcttgctctgtcacccaggcttgagtgcagtggtgcaatcttggctcactgcaacttctgccttctgggttcaagccattctcccacctcagcctcccgggtagctgggactacgggcatgtgccaccatgcccggctaagttttttgtatttttagtagagatggagtttcaccatgctggccaggctggtctccaactcctgacctcaagtgatccgcccgccttggcctcccaaagtgctgggattctagacatgagccaccgtgcccggcctttttttctttctttttttttttttttgaggcagtctctctctgttgcccaggctggagtgcaatggtatggtctcggctcactgcaacctctgcctcccaggttcccaggttcaagggattctcatgcctcagcctcctgagtagctgggactatagctgcgcaccaccatacccagctagtttttttattattagaagagacgaaaccctatctctattttttattttatttattttattgagacagagtctcactctgtcgcccaggctggagtgcagtggcgcaatctcggttactgcaacctccgcctcctgggttcaggatattctcctgcctcagcctcctgagtagctgggattacaggcatgtgccatcatgcccggctaatgtttgtatttttagtagagacggggtttcaccatgttggccaggctggtctcaaatgcctaacctcaagtaatcttcccgcctcagcctttcaaagtgctgggattacaggtgtgagccacctgtatccggccaatttttaaatttttatagaaatagggtctcactatgtttcccaagctggtcttgaactcctgggctcaagcaatcctctggcctcggcctcccaaagtgccaggattataggtacgagccactgcgcctgtcttcatcttctctcttgaacttgctctcctgtcatattttctactttggtcaatgacacttctgttctctgcctccacccaccgctgcctgccactgaccacctaagctcaaaggccagggatcctggatttaaaccttctctttccctcccttacctaccaaatctgatgcttcttccctattcctcaaatccatccacctcttcctctgctcctcagtcccaagagataactcctttcttcattgcctctattgtattgtgggggccaaaatgggagcccctctccagcttctcaggaggctgaggcaggagaaaggatcacttgaggccaggagtttgaggccagcctgggaaacatggagaaaccctgtctctactaaaaatacaaaaattagccaggcgtggtggcatatgcctatggtcccagctattagggaggctgaggtaggaggatcgctgaaactggggagatcaaggctgcagtgaactgtgatcatgccactgctctccagccttggtgacagagacctcagacagagagagggaggtcccagacagacttgggttcccttgtgggcaagagcccctccccccaaaataagactattcatatagcattgactgtgccagcctctgttttaaacgtctttgatactagcaacagggctaggaggagggtattattataattcccacttaacataggaaactgaagcactgagaggtcaagtagcttgccataggtcacacagctaccacgtggctatctgagaggtgaactcaggcagcctggctctctagtatgttctcagctagtgggtgtctgctctgcatgctttatttatttatttatgtatttatgagatggagtttcgctctttttgcccaggctggagtgcagtggtgcgatctcactgcaacctctgcctcctgggttcgagtgattctcctgcctcagcctcccgagtagctgggattacaggtgcgcaccaccaggcccagctaattttgtatttttaatagagatggggtttcaccatgttggccaggctggtcttgaactcccgacctcaggtgatccacccaccttgacctcccaatatttatttttgagatggagtctcactctgccacccaggctagagtgcagaggcgtgatctcggctcactgcaagctccacttcccaggttcaaaggattctcctgcctcagcctcccgagtagctgggattacaggcaccctcctccattcccggctaatttttgtatttttagtagaggcgaggtttcaccctgttgggcaggctggtctctaactcctgacctcaagtgatccacctgcctcagcctcccaaagtgctgggattacaggcatgagctaccgcacctggccatatgtgcccaactttctaaaatgttgactcaaatttgtttgaaaccatgcaggcaaaacgaagtaggtctatgagccacatttggtctgtaagccactagtttgcatccttctgggttatacaatttcccttcttcacattaagtcacaggagaatagagggggagtattttttttgcacggaatcctttgggttctctctgatctctttatttctgaagttcgtgatcccagaagctctgatttcttctataatctgaaaaaaatccccaattcccaccattataccaactcagagtatttttttcttctattgagctctgctgcctcctagctctgagttgacttatcctcacggagggttctcaagcattagaagcagaaagaggccagagacagtggctcattcctataattccagcactttggaaggctgaggtgggcggatcacctgagaccaggaattcgagactggccaacatagtgagatcccatctccatgaaaaataaaaacaaaattagctgggcgtggtggcacatgcctatagtcccagctacttgggaggctgaggtaggaggatcacctgagctcagaaggtggaggttgcagtaagccaagagcacaccactgcactccagcctgagcaatggagtgagactctgtctaaaaaaaaaaaaaaaaagagagaaaaagaaaaaaaaaagaggccaaatttgcccaccaccaactcttacctggttttgaagaaagaatctccttcctagggttttaggacccagctgcctcattcttttgcaaggatcactcactcttctatgagtatgaacaagcccctttccaaaagaagtcctcactgcgggcaaggctggggcagtgcagctgcgtgggtggtcatgggcactgccctgctgagggcagggactgggataccaggcccctcctacctgctttatctctgagaccaggaaccaagggaccatatcctacagttgatgagcagggatgctgcccctagagtcccttgtctaacactctcccctctcctgtgttcagaggtttgggctctgggtagcaaaactgaagacagctcatctttagagatcatcggccgggcgcggtggctcacgcctgtaatcccagcactttgggaggccgagaccatcctggctaacaaggtgaaactccgtctctgctaaaaatacaaaaaattagccgggcgtggtggcgggcgcctgtagtcccagctactcgggaggctgaggcaggagaatggcgtgaacccgggaggcggagcttgcagtgagccgagatcgcaccactgcactccagcctgggggacagagcgaaactccgtctcaacaacaacaaaaagagatcatcaagccggcagacaagatgctgccaaactctgaccccacctcagggcctttctccgttcgctcttcctggaatccttttcccgagcatggtcccatggctggctcccaaatgtcaccttctcggagaggtcttccgttatcaaaattagctcccctgcgatcttcgcttccacatattctcatcaactgccttttttttttttgagacagggtctcactcttgcccaggctggagtgcagtgtcaggatcagggctcgctgcagcttagacctctgtccatcaatcgatcctcccacctcagcctcctgagtagctgggaccacaggtgtgcgccactacgccaggctaatttttatttgttatttgtgtagacgcaggggggtcggggtcttgctatgttaccgggctgggctcgaactcctggcctcaagcgatcctcccacctctgcctcccaaagcgctgaaattacaggtgtgagccaccacgcccggctcatcgcttgctttattgtctgaatcgcgtttatctctctacaaaagcagtgtcatccgtctttccctccagagcaagtccccttccttccctggttccagaattcccctctccgcgtggtcccgctggcaaagcgctggcacccgcagctcctcggtcccgcggcgctggcggccgccctggcctccccctggctgccataaggcactactgccttatgcgcaacacaaacacagacacagtattggaccggggcacgctttaatcgggagggctggagcagagggcggccccgccgaggggcgtggtcagtgtgggcggagccttgggggccgagtccgctggtgggcgggacccaaggggagcagccagtagggaagttgggcgagttccagaatcagggggcgtggctgtgtggctgtggcctccgtggggtgggcggggcttacatgccgggcaccaccccattggtctccatgttggtgaggttaccccgcaggttctgctcctcctcgaaagccttgaacagtgagttgaagttgccggctccaaaaccctgtggcgggaaagagaggagatgagccaaggacccagaaaaccgagtgtgctagctgcctgtcccctcgggcctgccggggacaagcagtacctggtggttgtggcgctggatgacttccaggaagagcgtgggccggtcctgcaccggtttggtgaagatctgcaggaggtagcctttctcgtcgtagtccaccaggattttcagctcctaggcgggagacagggggctctgctaggggaggctggcacggtgagatccttggaaagtccacaggggctcctgcaccccaaaagtctggaaatgacctctttttctggcagttcagccacctccaaatatatccccaaactgtcctattactatccccctactacagttcctaaggcaccattcaagactgctgcccgcttctaatcttgtatccttacaatccatcctccccgcagacattatcaggacactttctttttcttttttgagacggagccttgcgctgttacccaggctggagtgcggtggcgcaatcttggctcactgaaacctccgccttccgggttcaagcgattctcctgtctcagcctcccgagtagctgggactacaggcgcaggctaccatgcccggctaatttttgtatttttagtaagacggggtttcacgatattggtcaggctggtctcgaactcctgacctcaggtgatccacccacctcgacctcccaaagtgttgggattacaggcgtgagccaccatgacctgctgcgggatcttttaaaagtcggatcatgtcattcccctgtttaaaatcctccagtggaaatcggaaccctcatgtactgctggtgggactgtaaaatggtgcaaccactttggaaaacagtctggcagcttctcaaaaagttaaacatatagtgttgcttccttaaaatacggattaaaaaaaaaaagggggtggccaggcatggtggctcactttgggaggccgaggcaggtggatcacctgagctcagttcgagaccagcctggccaacatggggaaacccagtcactacaaaaaaaaatacaaaaattaggctgggcaaggtggctcacgcctgtaatcccagcactctgggaggctgaggtgagtgaatcacccgaggtcaggagttcgagaccagcctggccaacatggtgaaaccccatctctactaaaaataaaaataaattggctgggcatggtggcacacgcctgttatcccagctactcaggaggcagaggcaggagaatcgcttgaacccgggaagtggaggttgcagtgagccaagatcggccactgctctccagcctgggcaacagagcaagactctgtctcaaaaaaaaaaaaaaaaaaattagctgggcgtggtggcgggcgcctataatcccagctactggggaggctgaggcaggagaattgcttgaacccaggaggctggaggttgcaatgggccaagatcgcaccactgcaccccagcctgggaaacaaagcaagactccatctctaaacaaacaaaagggaacatggaattaccatgtgacctagctactcctagatatataccaaagtgcattgaaaacacgtccacacagagccttgtacatagatgttcacagtagcattacgtataacaccccaaaagtggaaacaacccaaatatctatcaacgaggaatagataaacaatgtgtgtctatctatacaatgggatatttttcagccacaaaaaggaacgaagcactgacacacaccccacgcagatgaaccttgagcacatgctatgggaaagaagctgctcacaataggcctattttgtgattcctttttttttttttccgagatggagtttcactctgtcgcccaggctggagtgcaatggcgcgatctcggctcactgcaacctccccttccctgggttcaagcaattctccggcctcaggctccccagtagctgggattacaggcatctgctatcacacccagctaatttttgtatttttagtagagacagggtttcaccatgttggccaggctggtcttgaactcctgacctcatgatccgcccacctcagcctcccaaagtgctgggattacaggcatgagccaccgtgcctggactttgtgattccttttgatgaaatgtccagaataggcaaatctatagagactgaaggtagattaatggtgcctagggctggggtgggaggggggaagggaacagagggggttgggaggtgctggctaagaggctcaaggtttctttttggggtgacaaaaatgttctaaaattgattttttgcccaggctggaatgcagtagcctgatcatggctcactgcagctttgacctcctggcctcaagtgatcctctcacctcagcctcctgagtagctgggactacaggcacgaaccaccatgcccagctaattttttaaaactgttttttttgtagatacagggtcgccctgtgtttctcaggctggtcttaaactcctggcctcaagcaatcctctcacttcaacctcccaaaatgctgggattataggtgtgagccactgtgtctggcctaactgtttttgtttttcttttagacagggtatcacccaggctggagtgcagtggcctgatgatggctcactgtagcctctacctcctgggttgaagtgattctcccacttcagcctccccagtagctgggaccacagacacagatcaccacgcacagctaatttttttttttctttttgtagagatgggggtttcgccatattgaccaggctggtctcaaactcct

SEQ ID NO: 357 - DNA, 5294 bp, Homo sapiens
gcctcgctgaccccggtgaagtcgggcgagcacaaggacgaggacaggccgaagcccaaggaccgcatcgcctcgtgcctgctggagtcatggggcaagggcgagggcctgggctacgagggcctgggcctgggcattgggctgcgtggggccattcgcctgccctccttcaaggtcaagaggaaggagccaccagacaccacctcatctggcgaccagaagcggctgcggccctcgacctctgtggatgaggaagatgaagagtccgagcgagagcgagaccgggatatggcagacaccccctgtgagctcgccaagcgggaccccaagggcgtgggtgtgcggcggcggccggcgcggcctctggagctggacagtggtggggaggaggacgagaaggagtcattgtcggcgtcctcgtcctcatccgcgtcatcatcctcggggtcctcaaccacctcaccctcgtcctcggcctccgacaaggaggaggaacaggagagcaccgaggaggaagaggaggcggaggaggaggaggaggaggaaggaagaggaggaagaagaggaggaggaggagatggtggccgaggaaagcatggcttctgcaggccctgaggactttgagcaggacggggaggaagcggctctggccccgggggcacctgcagtggactcgttgggcatggaagaggaggtggacatcgagactgaggctgtggcccctgaggagcggccctccatgctggacgagccccccttgcctgtgggtgttgaagagccagcggactccagggagccgcctgaggaaccaggcctgagccaggaaggggccatgttgctgtctccagagccccctgccaaggaggtggaggctcgacccccattgtcccctgagcgagctccagaacatgacctggaagtggagccggagccccctatgatgctccccttgccgctgcaaccaccattgccgcccccacgaccaccccggccacccagcccaccgccggagcctgagaccacagatgcctcacacccatctgtccctccggagccccttgccgaggaccaccccccgcatactccaggcctctgtggcagcctggccaagtcgcagagcacagagacggtgccagccacaccaggcggggagcccccgctatcagggggcagcagtggcctgtccctgagctctccgcaagtgcccggcagccccttctcctacccagccccgtcccctagcttgagcagtgggggcctccctcggacacctggccgggacttcagcttcacacccaccttctccgagcccagcgggcccttgctcctgcccgtctgcccactccccactggccgacgcgatgaacgctccgggcccctggcctccccggtgctcctggagacgggcctgcccctccctctgccccttcccctgcccttgcccttggcattgcccgccgtcttgcgggcccaggctcgtgcgcccaccccgctgccacccctgctgcccgcccccctggcctcttgccctcccccaatgaagaggaagccgggccggccccggcgatccccaccatctatgctctccttggatgggcccttggtccgaccaccagcaggggccgcccttggaagggaactcctgctcctgccgggccagccacagacccccgtcttccccagcacccatgacccccggacggtgaccctggacttccggaacgcggggatcccagcccctccaccaccccttcccccccagccacccccacccccacctcccccacctgtagagcccaccaagctgccctttaaggagctagacaaccagtggccctccgaggccattcctccgggcccccgtgggcgcgatgaggtcactgaggaatacatggagttggccaagagccgggggccgtggcgccggccacctaagaagcgccatgaggacctggtgccacctgcgggctcgcccgaactctcgccaccccagcccctcttccggccccgctcggagtttgaggagatgaccatcctgtatgacatctggaacggtggcatcgatgaggaggacatccgcttcctgtgtgtcacctacgagcgactgctacagcaggacaatggcatggactggcttaacgacacgctctgggtctaccatccctctaagaagaagaaacgggacgatggcatccgcgagcacgtgacgggctgtgcccgcagtgagggcttctacaccatcgacaagaaggacaagctcagatacctcaacagcagccgtgccagcaccgatgagccccccgcagacacccagggcatgagcatcccagcacagccccacgcctccacccgggcaggctcggagcggcgttcggagcagcgccgcctgctgtcctccttcactggcagctgtgacagtgacctgctcaagttcaaccagctcaagttccggaagaaaaagctcaagttctgcaagagccacattcacgactggggcttgttcgccatggagcccatcgcggctgacgagatggtcatcgagtacgtgggccagaatatccgtcaggtgatcgcagacatgcgggagaagcgttatgaggacgagggcatcgggagcagctacatgttccgggtggaccatgacaccatcatcgacgccaccaagtgcggcaacttcgcgcgcttcatcaaccacagctgcaaccccaactgctatgccaaggtgatcacggtggagtcacagaagaagatagtcatctactcgaagcagcacattaacgtcaatgaggagattacctatgactataagttccccatcgaggacgtcaagatcccctgcctctgtggctccgagaactgccgggggaccctcaactaggccccggcaccagactcaaaggatgtcagccgtagccctgggactcccgagcgtggagcccctggccccggggcccggccccccgcgcccgcccccatttcaggtgctgtcctctacccagcggccattcagggcctggcgccccacactaccccctggagcccctggctccggcccctccgcgggaaagggcttctctgtcgttcagcccacgtctctctcattttaacaaacgcccctttcaggatttctgtttaactccagcatcagcttctctctctccgtctctcctcccctctctctcttctctgtctcttctctctcccaccatcaccctcggcctcttcctgtgaatgctgctacgttgttttgtcttctctatttttttcctcgttgtgagaaaagacatttaaccgttgaaatgtgaaggtggaatcagagaggggccccgcgggggtctgcagaggcctcagtgtggctgtgcgtggcccgtgtcctggaagccacccggacctggacgcagggccaggtgctgtgggaaggatggaggcccccacggccttgacctcagaacactacgccctgaaagcgcccctcactgcccgtgggcacagtgaggagaccccacacctttccccacccgagctgcagcctgttccttccccagaggcctggggcaccactgacccggtggaccctgatggagctaagctgtcccaggcaggggtctccgctctgggctttccctgccacctcacaccccagcaccccctaaaccttgggttcaatgtttactttctcattcggatgccagcaacgcgggagcctctcggaggccccagtgcaggtgaggggcgctgagaacgcgggcagccactctcttctgcccttgccttcgccctgggtgggacagggctcccaagggcaggcgggtcccccagtcccgccattacgggttgtcagaccgtctgcgtgtggcattttttggcttataagcttcacccactcacccccaacccacaccccacatccccctgccggcagcccctcaacctaagaaggccagagcatatttattttcggagggagcagattacttctcccagagaaaggaaaatcttggaaaagatttaaaaacacaaatctaagccttgacggtttttttttcccttttgacccccttcccatctcttcagaatttattcccatggcttttttttttcttgtgcgtgtataaaatcaaaaggaaggggaaaaaggtttttgaagttcagaaccaacttctgtatatagaggctgccgcaaaggactttctcttgggaacattgtttcttgtagaaacatgcgggaagacattttttgctcatttctttgtacttccaaaaaaaaaggaaaaaaaagacaaaagcaagtccccccgtaccccagaaagcagaggaggcgtgtaaataatttctggaaagtgactgttgtgacccggagtcctcatcaagatgagcgcgctccatgagggagctgctcccaccctgcggacgcaggcggccggagcctctggtatctcagcttgtgtcaagcttgttatcatgtaaattctgtacaaagaattgttatttttctcttttttgttgttggtggttttgttgtgtgttttttgttgttttttttttattcctttcccccaggccctctctatttgagactgtgcccgccggtttcaagatcaaggaaattggtggcaacaagacacagatggggtacctgggcacagcggcgaacttctcttccgtttgcggttttctgcctaattgtgcaactgaggaaataatttatttttcacatgaggaaatgcgtagcttgtagagacggctgattcaagttacatgtacagcctccaaagggctgtctccattctgtccccttcccataaaagaagtgggggtgttcgagaagaccagggaagggacccttgcctcacccctccccctggcctcaccttgctcccagccatcgtgcccagtgttaacctcggctggccttcactaaggggactagacctccctctccccaggagccccagccccagagtggtttgcaataatcaagatatgtgtcgagtcatttttctttcaactccctcatttttcattgaacaaatctctgcttttcaagagttgggggtttctgctattttttgctttctctccctccccctgcaaagatgagaaccaatgagttttagggatgtttgtgcgggtagactccatcatccatatgtaacttgttttgaagagaagtgtttccgttgtgtgtcttgatgtaaatatttgttcatatttttgtgaattcaatactatgtaccattgtattatagtaacttttataaagcaaaccataaatatactgacttttcttacag

SEQ ID NO: 358 - protein, 870 aa, Homo sapiens
MRKMKSPSESETGIWQTPPVSSPSGTPRAWVCGGGRRGLWSWTVVGRRTRRSHCRRPRPHPRHHPRGPQPPHPRPRPPTRRRNRRAPRRKRRRRRRRRRKEEEEEEEEEEMVAEESMASAGPEDFEQDGEEAAPGAPAVDSLGMEEEVDIETEAVAPEERPSMLDEPPLPVGVEEPADSREPPEEPGLSQEGAMLLSPEPPAKEVEARPPLSPERAPEHDLEVEPEPPMMLPLPLQPPLPPPRPPRPPSPPPEPETTDASHPSVPPEPLAEDHPPHTPGLCGSLAKSQSTETVPATPGGEPPLSGGSSGLSLSSPQVPGSPFSYPAPSPSLSSGGLPRTPGRDFSFTPTFSEPSGPLLLPVCPLPTGRRDERSGPLDVLLETGLPLPLPLPLPLPLALPAVLRAQARAPTPLPPLLPAPLASCPPPMKRKPGRPRRSPPSMLSLDGPLVRPPAGAALGRELLLLPGQPQTPVFPSTHDPRTVTLDFRNAGIPAPPPPLPPQPPPPPPPPPVEPTKLPFKELDNQWPSEAIPPGPRGRDEVTEEYMELAKSRGPWRRPPKKRHEDLVPPAGSPELSPPQPLFRPRSEFEEMTILYDIWNGGIDEEDIRFLCVTYERLLQQDNGMDWLNDTLWVYHPSKKKKRDDGIREHVTGCARSEGFYTIDKKDKLRYLNSSRASTDEPPADTQGMSIPAQPHASTRAGSRSEQRRLLSSFTGSCDSDLLKFNQLKFRKKKLKFCKSHIHDWGLFAMEPIAADEMVIEYVGQNIRQVIADMREKRYEDEGIGSSYMFRVDHDTIIDATKCGNFARFINHSCNPNCYAKVITVESQKKIVIYSKQHINVNEEITYDYKFPIEDVKIPCLCGSENCRGTLN

SEQ ID NO: 359 - DNA, 89829 bp, Mus musculus
  misc_feature (1)...(89829): n = A,T,C or G
ggaggactgcagctttgaggcaggggtggggtggggtgggacagcctagtctgaagtctcagatcagaatggggttaggttactctccctcagaggtttgggaacgagtcccacctctcttgagcaggactccaaattcctctattgccccaggatctcttgggaccgcctatatttagagccaaagctcccaagttttaacttctaagctttgactgcactaaagcttaaacggagctttaatgagttaaaatgaggtactgtgggaccggaaaggtgactcttttgctcttgcaggtgacctgagtttggttcccagctcctgtgcaaggtgatacacaagctcttgtgacccagcctcagggggacccattgcctctggcctctccgggcactgtattcacatgtgtgtgtatacccacatacagacacataattaaaaataatacacaataaaatgaaaaaactgagtcccaggaggctgtgccctacctagtccaacccagatatttgtatggaggcattgggtgcagagacttctggctgtgtggacacagaggaagggctctaaggatgaaggtgaccatcagcaaagccaaggagagaggcctcagaagaagcccagcctgaccacaccttgagcatgaaactccagcctccagaaaataagctgataatcaaagcctccagccgcttctgcatcccaggaggtacctataatcctggtgatccctagattgtggccacattcttgcaatatttgactctgtcttatgaaacccataatgcatgttccctcctccactgagatgccagggtagctagcacccaggtgccatcagcagcctggctggtcgtgtgcacaccatgcttgggacacttgttacacaggtccttttctgaccctggttctgttcagtgggtggcgggaaccttctttgctcccagctctgcaaccctgtatagccaggacagccctgggtgcttgctgcccttatgtccttatttctccaaggagatatgggataacctccatgaggtttgaaaaaggctttccttgaggtttgaaaacagccacaaaaacctgtcaccctgtctggtggaatggtaaggttggtgtccccaggcttctaagacagaccacagaaaaggtacaatgtgatttttctaggttagaaagcacaacacagggctggagagatagctcagtggtcaagagtgcttgctgctcctccagaggacacaaggtccgaccccagcacccatgtggggcagctcacgactgtccacaactccagctccagcagacatgacatcttctgtctttttcagatacctgtgtgtacagaaacacacacacacacacacacacacagagagagagagagagagagagagagagagagagagagagagagagagagagaacagaaccaggggataaaaataaatctagaaagaaacaaagaaaccgtctggaacagcacagcatctggtttgttacttaaatgccactcagtggctctgagctgccaggtgggttcctgataccttggtcacgtcagaagggcacctggtagactagaggcagtggaggaagggcacagtgaaggttggcagtgaggaggtagttgataaagttgactgaaggaacatgcagcaggagaactgtgtcgtagcaggaggagctcagggtcctgtgtgtgcagaggccctggagcatgctatagctatacctgccaagccctgaatagcacacagaccagtgtgagtgaacgcagagttctcagaccatcagttagaaagatccccacacccttgaatctctaaaatcccagaggtctggcattgggttagcccactggagttcccaggagaaccagtgcctcagagaccttacatgagtgtctccccgcactaagcatgctcgaccaaacatacacagagaaagcagagtgctgcaggaagcaggggacacagagagggtccatggctgagaagagtcctgactgtcctgcaacgctaacatccctgcctgttggggaatggagggttgtgggatgagaagggtcagctcctttctctctcctctcttctgtcccctcacccatcctccctcctcctaatcaggtcaccaggggccaagtctcatgtccccaagttcagtactctagcctagtgttttgagttcaggtggcctcaggaaagtccctacctgccatgcacaaagacccagaataatgggcacatctgtgtccctccatggtgtggccactaactctgaaggatgtctgagcttgatataggacagatgtaggctctgttgcctcagaccggcctgcttgagagaagccaaggacaggtgacaaggtcaagcccaaatcaacctatccacagagactgtgacttctaaccgaagattggtacctgtccatctgaactgtcttgactgcagctgttcacagcatgcatacattggtttccccccttcctgccccgaagacagctcagcactagagcatccctgacatccaggagtgtctccgacattgtttccagggattcagtgttggctcgggtctcccagcctccattgttccacaacagtctcccctgcggcagctgccaacacatccccaccctactcctggaggaaaagaaaaatctcaacaaaagctggtgagccaatgccagatgagacagatgggccaccctgtgtcactgcagtagaataggtagacagagcaattgaccactcggaatgaagttctcagaagaacaaagggttctgctcgggaaaccctgctttctgcttgctactcggtgctctgccatcccgaggaagccaaggatacaggggaagccaaggaggaagggaggaggcagagggggctggaggaagcttgcagaggagttgccgggcaacctctgttgggcctctccaggtcaggaactgggattgcttgtatggaactggcgcttcccatgaagagccaggggttctgagggcctcatttctctgccgggttggaagcttagactacaaaagaatgctcccttcacactgagggcgagtctccttcttggcctctgctggcctcacatgccacgtgatcatctctctcagagccccagcaacctaggacagggtcacaccctagagcccatggtctcacagagggtgtaccttgactgctataggctgcttgctcaaggctatgtcttattccctgacaggcccagggcagctagggagagcccctcaaagaaaagaaacagcttcttagggggccaggatgtggatgccagggtggcctcctggatccacagagagcatcatcttcaggacaggtttgtgatggcgaacaacatacgtgtattcagtccctctggcacaaagacccttgctttcgagactacccaaaccccaagtcaccaatatctacagatatggcaagagatactcagcagccactcatagaacaccactggacacagaagaatttaaaaaaaaacaaaaccaaaaaaaaaaacaaaagactcagcaggcagagtgcttgtctatcatggacaatgtcctataacttaaccccacaactgcataaacctgccacgatggcctaacctaagcgctcaggaagtggaagcagaagggccagaagttcaaggccagtctaggatagatagatgagagtgtaaatacaaggaaatagggagagggggaggggaggggagagggagagggggannnnnnnnnnnnnnnnnnnnggggagagagattgagatttggtgttgattctgaccgcagaaaattctaaatgcaaacaccatgatacagcaggtctgtgggggggtctataggtggaggggaggccatagggctgtgaagacttccctaacacagtgtgagctgtcccagcaccacctgggcccaattccagctctttcccctccagatggagagtgatgttgcagaggtttgaataagaacggctcctataggttcctatagttgcacgtcagggaatggaactctttgaaaagcttagagtaggagttgtggccttgttggaggaagtgtgtctctgagggtgatgcacttgagagtgcagaagccatgccagggctaggctgtctttctacaggtcaggatgtagctcctccccaccataacagactaaacctgaaaccgtaagcaaaccccaacacaatgctttcatttataagtcgccttggtcatggtgtcccttgacagcaatgggacagtagctaagacggtgtggctgcctttggccctcatgtctcctaaggagaaggaactaggtcataagaggctggggaaccaagcagccttccaagaggaacatcaggcatgaggtagcatcagagagcaagtgtcctacagatcagagatgtcagaaaagacaggtcctgaggtccctctctgttactttccctatgcattcccgaaggtccatcccttggccctcagcccccaagggctcatgggaacagactcaagtgccccagggtgtctgcctctgcaggtttcctgacaaatgtccattgccaaccatactgtgggggacctacacctcccttctggccctttgtcttcacccctccacagtatatggaacctatatgaacatgtcgggtaagacagggttcaagccttgtgtagcacttgggatgcaggagcagtggatgttcagggaacagatccatgggctgagacccaggggttcagagagtcgctgctctggagactaccgctggaatctgtgtgtgctaacgaaaaagcttaagttgaagagaaaaaacgaaagtaatttgcagcctaggaaaggcaaccctctaccaccatatccactaggatgaagcccaagctctgaagttaagcaaaagacaacagcagcaggcagagtccagagtgagaccttcatgagaccagacactcagcaaggaggaaccagagagcatccagtagcccatggaggcactggtgtttggaaacagtgccgactgggccttcaagggggtggggggcgtgtgatttaaaattttctattatattttactctctctctttctgtgtgtgtgtgtgagagagagagagagtgagtaagtgtgtgtctatatgtgagtgtgtaagtgtgtgtgtctatgtgtgtgtttgtgtgtaagtatgtgtgtctgtgtgtgagtgtttgagtgtgtgaatatgtgtatgtgtgtgtttatgtcagtgcatttgtctgtgcatgtgtctttgtgtataagtgtgtatgtgtgtatgtgtgtgtttctatgtgtgtatatatgagagtgtgtgtgtatatatatgtgtgtgtatgtgtatgtctatgcatttgtccatgcatgtgtctctgtatatgtgtgtatgtgcgtgtgtctctgtgtatatatgtgggtatgtgtgtatgtgagtgtgtgtgtgtgtgtgtgtgtgtgtgtgtgtgtgtgtgtaggtcagagaatagaaaagtacagagagttggttctccccttccactttctctcaggttttcaagcttggtggcaagtgcctttacccactgaccaatttcaccagtcctacctgatgtttaagattacagataatagccagacatggtagtgcgtgcctgtacttccaacattcaggaaatagaggcaaaaaaaatcaggggttcaagaccagtcatagttacatagttagttggaggtcagcctgggctacttgagcccttgtcttaaattaaaaaaaaaaaaaaaaagtttagtgaaagcccgtggtcgagccccacagcctctaaactggaccgtgatctgcacgtgcacagaaaaatgttactagaaacttcatttttaaaaagcaatgcaaatttgttttcctcgcagatacaagttaagttcccttccattctgttctgaggttacttcaatggcagcactagtttacacagagggtccagtttcaggaggaaacctggctagccacaccagtgactcatcagatccaaaagctttgactccaagcgtctcccaaatccttccaggtgcctaaaacacccgtcactctctcagccaggcctaccaggatctccatgaccacgacacacctgcaaacagcccaccgactggaggaagggcggcacccttggtgtgactgtgaaggcggggttggaggccccaagggaagctgaccagcaggcaccaggttctgtggctgcctgctgcaacagagtattcagaatgctaccagtacactgtccaggcctatttagagctccctttaaagcgcccttcaacaccaaagaaagatagatggagtgagaaattacgaaggaaacagtgctcacgcctaagggagattttctcatctctgcctgtttctgcctctgtggttcaggcacctgctgccccgggccagctgcacttctggcttcccagacccaaaggaagtgaaattaaaagagattgctgaggagagcaactccccaagaagggtgagcctccagccccaacctcacagtcataaagaaaccaggggctgccctccacactggccccttaaagagaaagtggcttcagaaggggcttccccaccaataagcaggcagcacccaggctctcaggatgcctgcttctgtgggtcattgcattgtgtgctgggtcatatacaggctggactctcccttgggacaccttggtttcctgcggctgagggacccgggcttgatgtaacagtggccaaggtagataggactttgtgcctgacagtttgggtcatagatgcctacagattcaccaatctgggttaagcctggctgaaaaaatgccagccctttttcagctgctgggtgaccttgctgagcctccaggtgatgcactggtggcagtgatgtgctggtggtggcaacgctgacacttgtgcctcactagaggctgagtgggttctccgaggtcacaggcaggcctcgcacatccaggtgttcagcagatgcgcttcctgtgtggtttgctgaatttatttctgttctcagaagcaccttaaggggcagccgtagagttttccagagatgtaagcaagcccctaaaacattgggtcccaattccaaccctcacaaggggttaattccagcctagggacccaaaagcaggcttgtcctctccagatgtacatctgatgatcacagtccccgtcccggatttccacgtgtcacccagccatgcgctgtgtcacctgctctctggttctgagtttgctcagccccaccctgtactgggcagggttggtggccagcactggacaggctcacctgtcacccagtgtatggctcctgctacccaccctaactagacaaacctcacttgggaccaagaagcagaagttggtggcctgccgctcagctcacaaggagctgcacaggtcactgttctcccccctccccccaatctggagcggctgggacttacggccctccttgatgggtttagagactagagacatcaacctgcagaccctatcctttctgtataaagtggattgctatgagacttgtgtagcctcttcttttcatctgtctgtctgtccacccatccatccatgatgcatctgttcatctacctacccagcactcatagagtctcacaacctagaagaggagacagtgtaagctgagtgcctccttgcctccagtctccatagcctctgaattcctattctcagctttctggttagacagcagattcctaaaggcctggaaggaaggctgccccaacctggaatcactcagccacatcattagagaactttgatggacagctgtctcctgcagtttccaaaagacagaagcaaggccatcttgatgtctggccaccctggcatgggaagagtgtgagggaacaggagggagcccccaatccctggcataaagctgggtgcagactgcagacggccatggtttctgcagggaaccgcggcccctcaagctctctgcagccacttccttccccactccttccttatctatcggaccacccagcgcagaaagccacaaccaacgtctacttccccacaaacaccaactgccctcctgggggcatagggagcggatgatcacccccaggtgctggggcagtcccccacttgtgagcaactttcttctctttcaaaccccacctccgtgagacctgctgattggaaaagcatgcggacagggcagtaagcaacgccaggcctcctcttgaaagcggaagtgtcccatctgtgggccccacaggtgcaagccaggaacatctgcctcggagctggtggggagccacccactcccaccagccgcacccagggtccagccctgctgcctcttgggctaggggctgttttcaaaaacccctcactgcccctgatccaaacccttccttggctcactcactcactctgatatatttggggggaggggctgtggctcagctgcactggttctggggaccatgacactgctctgttcttcagaggccaaggagcctggcccctgcaggactgctggcactgaaaataaacagacacaacccagtgccctcgttgatcccatgctccaccctcatcagaacacagggaacacagtgacactggtggactgtcctatctcacagcagggtcctctctcctcaaaccctgaagagaacagtcagccagcagggtagaaggggcaagcaggaccccatgttttggaactcaagacctaagcttgtagcttgttgtattactcttaatttcaagacactcaaggccaagacagtgacatccaggaagacatgaaacaaggggtttttagtagccaactatctacatgaacaagctaaacgttaaatcaaagcaaagcatagtggccctattagcatcctaggaccatgtctgggaacccttaccaggtttaagagaacattattccttcccatgaaaccaccctatagtttcatcaccgtttagtaagtggctttctctggaacctgaagctataatagcattatttctactgggattcacttggaaaggggcctggagtttctcccaagtagacagcctttctagcaagctccaggtcaccaggcagagaggccaactgcctatgtgtggcctgtttggctcaagcttcctttaaagaaggtaatataggatggggtttccacagctgggagactagactgtgaccctgatcctatctgaggccaggcacaacatgacaatggagattcttccaggcaagaggtgaccagagaaccactgatggtgatggagagaccacctgagccatgggtgggcaggaggctggtcagagtcctgaccatgctcactcctgactctgccagcacccccaataggtcgttcattggagggcaaatagaaagggtttcttggtcttgggcaaagtgtggctgaaggcaggcaaagtgggtggagtctctggacctcccaggccacaggaagggctatgccccatgggaagatagacagatgagccagaggctctggccaggatggacattactccagggtggaggaaacacactccatgagccacaccagattgggcccagtgggaggtctcagggctacaggcgggataggaggaagttgttgggaagtcagaccggaatggcatggtggagggagaaccggcaaccaggcagatggttcctgacgaggaagctctgggcacagctgcaggcccccgacccccaccgcattatcactgtgacacagctggctgcctcacccctgaaggctgcaggaggacctcccccatgctgtccccaagcccgccccgtgtcacatgaggccctgcagactcccaccctccgtccagggccacaacccagctctgccggctgtagtgactagaaaggcctggagcctccaaggaacagaggcacgggctccgagacgccaaagctcctccagccctcctgttctctccagaccccacgaaatcagaaaaggtgcttcagggtgggctctggaggccggccagctccctccagccccaggtaccatcaatctccggctccatctgcagctccatgtcccaggcatccaccaccactctggagagtggggcactcctctcgggaccccggggtcttcagaatggaagcccaggtaagaggctgggggaaggggatggggggagattaaagagtcagaagctaaaacaggtggagcaggtgacaggaaggtgacatctccaagctgccgtgtgtgtgtgtgtgtgtgtgtgtgtgtgtgtgtgtgtgtccagctttgttgacagcgtggctgtgttgacctacctcaaatatcaacacagtccccccaccaacaggaacgtgtccctcacagctggggcaggtggccccgtaagagcatggcagctgccaagcctgaatcctggccccacccagaggcaggtgcatggctctgtgtaggagggaatgggctgtgtcttctacagtgggggcttaggctagaactcaggggctctcagatacttctaaatacaaagaggaggttaagggcaggacagggcaggcccgggcacataagcattacttccagcagagcattgggggaaatgaggacctgtctcaacctcatttccagccaggggctgctggctttagggagggaaattcagcaagcagccatttcccctacatcactcacctcactccaagaacctcaaggactcagagatgcaagcaggtggctccatcccggctcacaggcacatggccacactctaggcagcctttggatcctgcctgagcccacggtgcttgtgctgtggcagtcagattcacgtccagatcctgggcccacggcacccttttctgcagagggaaacactgcgaggtttgcccaaacctgcggctttcccaaggcccaaacatccagaccccaggtcgtccaaaacatacaggactcaaacgatggtgcccaggtatatgtggcccaacttccccacaacaacatgtgttattttgggctttggccaggtgtgggattcaaagacaccagggagaatgctcttgttcacagacccagatgtgactaccctgcaggcgagcgcaagggaactacccttcccagaggatgtcctcatagacccaccgccctgagagctgccgccaaatctgtcccctttgcttcctgccctgggccaggtccttcctcccttctatcccaatctcccacatggctcctctgagactgggaggaaggcaagaagtcagccggaggtgggagaaaggccactgtgccatttggatagagcagtttggagggccctttgaagctcagggccacgagatgtgtttgaacttggttgtgcctttaacatggatggggtattggtggagcagaggtgcccagagcagtctgcatatgtctctgacagaatactcacccaccagtgtaatgtccccacttggtgcatcccagtaactccctaaaaacctcacccaaggagacaaatgtggggctctgtaatgccagaaatcaacaccagaggcagcataaagctgagccactttggcaggtttagatgactgtaaccctccaggaatctgaaaatcttggagacagaacatgggttaattggctttgttgattgccaacaacctttgccctacaaagccagtacataccgaacaccgtaagctgggttcaccgttaacagcaacagagtaggactctgctgtgagctgaggcatgccaggctatgggtgaggtggatagccagggcatggactttcatcatccctgtgacagagaaaggaacaaggggtcagcactgcacaaagccaccccactccttggaatgctggtgtggtattcctgtctactgcagaccccagagtgccgcggggcagaagcaggtcaggtagagtgttcacagtcttgtgtttattaggcatctattgtgggcactattcatagcagggcactgtaggtcttggaggtttgattggatggtggcttgcttcccaggagtggggccaggagggtgccgcatactgagggagaccttgaacactacccacagacattgtaggctggaggatccagatggatgtatccccttaagccaagcttgctggtgtggccttagagaaacatggggcccagttcgtcaagcaggaggtagagagtgccacttggtgcaggagcccaagcggaggcaggagggacaaggtagagacagatatctcagcccagactgaagttctgagcccaaccctgggctagctagattctactaagtattccctcctccctcctctcccctgacccctctctgtctcctctctccctctccctgttctcttccctcctcctcccaccagtcccaccactgagcttgaatgttcatggggcccttccacgtgcatagattccactaaccctgaatagaaattactccagagaaacactgggtctcttgtagttgtttttataggtctgtccatatgtgttagagatcatgtcacccagcacacatgcacaggttctgtgccgatgttgggccattttgtaggaatgacttgggggccacgccttttggtgtcatggtgcagccagccctggaatcattccctgtgttaactagagatgaatggggagctgacacagtgggtttccagggggggtctctcacaggcagggaccaggctgtcggagggttgctcacacctccactagagcatccagcctgcctcttccagctcctgctggatctaggcacccctcatctatggcagccttgcccaccctgtctgcatccttctaaggctgcctttctggcaaggacactgatcctgggatttcagtcattttaggtctggtgcaggatggagggagggtgctgtccaggtctgctgtgcacggcaactgccacttacaggaaaccagagccttactttcatggctgatcccatgggttccggccgccaggggcacagaggacatcccagggcagccacagtaaagaccagcatagaagcccacgagtacttccacttcacacttagcctccatgtaggctgcctggcctctgtgcttgttggtgggaccagctttgccagggatgtgactcacagaggaggcaggctcccaacggatgagagaagactaatgtgggagaaaaatgtctgaggtgacatgtcccagaaagcagaactgtgggcctcatgggagtttgcagacagctaacagtgacctttggccctggtctgatggaatgatggtgacctttggcctaaatctgtgtgagtgactgtgatctctcacccacatctgcttgaaatgaggtgacctctgacgatttctgtgtgaggtgacagtgacctctgaccggtatctgcttcaggggatggtggcttctgactcaagtttgtatgatgtgaagatgacctctgacccatgttgtgccaaaacaccttcatagagaccttcctgttaggctcgccagctctgatcctgggctgtgaccttgagctccaccctcaacctccagcccctctccttcctgactcaggcctggtgtgctcagaagcctgaagcaataggttgtggcctgtcctgcctccacgtctacctctgtcttgctggccacatggtctcaggagcttctttctgtgtgaggttgtgtcttgagagacagcagaagatgatacagaggctcccaagagcacccagcatgctttgctgagcctgcagcctagatttaggggcacgtgggttcaagtgcaaggatctctgctgcggtaaaagacatagccccacaagctcagccctggagtgaaaggaccagctgtggagccttggtcatcccttggtcctatctggaagacacacacacacacacacacacacacacacacagagagagagagagagagagagagagagagagagagagagagagagaccatcatgagggacagtttgcaaaagtcaggcagatagaggaaggcagagaccccagcatgggcagaagagaatatggaggctaagtaggggtcaccaccagacctcttgttcctcttgctgtcacgatggacagtgtccccatccactcacacagagtccaggtaaggcaaggtaaatgctactgctgtaagccctaacgttctctcctcccaccctggggacaagaagacagttcctcctgggagatagcctgtcatccccataccacataccatcttcatcagtaagacaaagataagaggccaggaagattgagatctgagtagggtgtgtgcagtccaggccagcttcctagagacagtgtccccgggggtgggggtgggggtgggatgggggaagctgcaagctactcctcaggcaagggcaactttcggttcttcctgtaggttacgctgaaagcttggtgggcgtgctagcctagataagcccctggtctctgatccctgagggaatgcctgacctgctccttctagaactgcccaccacctcagtgggggaagccaggagaggagagaaagtggtctctctgaaagtgatctacccacccatccctgggagtagtataggcctggaggtgtggccagcatggtgaattctccatgaagttcccagatgcaggtctacccagcccaggaggataactcagaggacaggaatcatgcccagggaggctctagccactctcttaactgagcaaagttgctggctatctactgaaaggatgatggatctgatgaacacaggctccctcagggtgcgccctggctccatggccctgactgtctagcttattcctccctcccgtgctgtggggcctctggccatctggctgctttgcaaacgcccagggcctttgcactgtcttccagcagctggaccttgcagttcctccacccaaccagccccgtggcgtttcctaaattcatctgtggcatctcgtctgtccctctcggttgcattgggctccataaggctgggtctcaggccatccagaccaacagaagggcgtgcctagcactgcaaaggaaggggagtgtccgtggagatatacagccagaaaaagccaggatgcaagttcacaaagcatagcttagtctgtgagtatccctagatgcaggaggcagatgtcaccaggagctacaatgcaagtcaagagaaagagagagaatggcttcttggtcatggatgcagggatgtaccttctgctgtgtctgctgttggcttctggcctcctcacaagatcagagcaagctagcctagattccagctgagacagagccgggaggcacattgaacctcctaggaaggaggtcccaacatccaccaaggcaaagggacaggggacacagtagcctcttccaatggagggacatctccccagagggatataaggagcagccatggcacagagaacaatggtgtcctttggcagcccaagagccacagtgggctttagctcaagcttggtccctcattttcctaccttcttatcaccatgttgcttacagaggaggacacagaacgagcgagaggaagtgtctgcacggctgtgagctgacactaggctatcacctacccagcccatgttcctttctggccaccagcacacagaaaggccaagtgaccttctcagactcaaacagcaagtcctggccagggtgggctcagggtcctctctgtgaagctcatctatgagaaaacatgaagtgaggtataatcttaggacagggaccccttggcactggctcctctgtgtgggagtctgtctcggcagcagtacactaagcttggctctacaggggctctgcttgcttctagaagaccaagcatgtcctgaaacctgctgacagtaataataacattagcagctgatggtgataacagccatggggcacccccccccccccgccgtaacagcctgacctgtttgggaatcttgtcttggtcttcactcattactgaagttcaagttttttttttttttcatttccctagaatggagccctgggagggacaaggaccaaaaagcttcctttctgtcaggggaagaagaaaccccagaaccttttgaggagccccatgagggtagaggcaggcgaacagagttggtactagatcatcgagctgaactcaggcctcttgaagccaggcttggcctaatgatgcagcctgtgtcctagctccatgggccagacttagcccatgtccctgggtccccaagcttcagagtgtctgcaaagggaaagtcacatcggcctatattccagtgagccaggcttcccggtctgtagagtgtgatagtggaccaaactttaaagatgggaatcagttgcacctgctcccacacctgagggtgacacagatggggacaagcctgcttagtgagtctggagtagaacggggtgaggaaaggcccaccctggcacagggcctggccccctcacctcagccctatctctccctcagcgcttcctgctgttccccagctcccactccaccatgacagatcctgaatatgttggggaggagccacgaggccttgccagagccaggaggaactgggagtccgccccaccctccgacccaggtgcattctgagtatctggaaagccccgactctggagggggaaagtggaaggctggctgagggggtcaaaaggccctgtgttgtgtctatggtagccgccgccagcacccttcactttagcctctgaccagtgtccctgtgttcccagaacagcagggcctgctgggtgtgtatggttctcccagaatccagagttcctcagaaagtcctttggcacccccatggccccagctgctgtccccaactgctccatcctatgatgagagaaggaatatggcttccacagggtccttcagggaaaggcccagatgaggcggctgctgtgtttgccctggccacaccctgaggcttgccttcccagctaccttgtggctctccatctgttctgcttgctctgtgaaacctttctaatgctcttgacattaggcagtcatccctgtgtccagccagttttctcgttgtaaaatggggacagtaactgtctggctttcccccagatccatgcatcccaaccaagtgggcagtggcagcacccagatggacataagaaccctctgatgcccccatttcctctacagcagttctcccaggcactggggtgttaacttgtcacaggaagagcattatctcctttctgctggtctgtgctggttcccatggaggctgctggtccccggggtggacatgccacataagcccatgtgttctttctctgcttccctgctgaaaattgagcccctgactctcccctgttgcaaagatgctcacataaggctgcccacatccaaacacggaggccacatccaggcctttagcagaggcccaaatccaaagtggctaccggtattgctctcaggggaaagaggctggactcaaagggtggcgatgggaacaggagatatgtccctggtctttgtagccctgtaaaccacagctcacattcagaaggtatttatccaagcatccagtaaaagttcttggggatcctgcaatccctggcccagttcctcagacctgaaggactgggttcttggcattaagtgggctgcatgcctcgcgaggctgggcaggctgagccaaagtcagcctgtccgggtgtgggagattcatggaggatccccagctgtgccaagcgggtgggagaggagccaagagttctatgggcacacagtcctattatcaggctcagctcactggcaggctactcacagatgtcctctgaccctgcgtggggtaacctaccctggtaccctgctagtcaacagctcctggctaaggcacttcagggagacccagctagtggaggcgagactgcaggcaagtgcacactatgcatagtggtctctgagaatcatctcagccctgcccctaaggcagacggaagaggaaaggctgctcactctactgcgtgggtggccaaggggaattctgacctttctgtggattccctgtgcaggcccaagcccgtatttagcacatggtcagttggggaggggttgcccattccagaagccagtggttctgtggcactttttaacattgggcaggcgtggcctctagagattactcgtttgcatgattacaaaatggccttgcttagtttggtcacacaagaacttcggctgtttctctctgggtggacagcaatgacccagggtatgaagttctcatgggtgagttaggcttgtaaattcaccattgagtcatacaggtcaaggtcagagcctctcactcgacacgcaaaggcacgcaccggcaagtgccacacaccacataggagatatggcaagatcaaagcagcagcacacagggactgatatccaggtcagcatcgtgtgacaagtactgttctgaaccagtggctggacagagggccttggtgagggtgctctgtgaagaatgggcagaagagtggatgtatgtttgatgtatgtatgatgtgtgtataaatacgtacagaggatggagagacggatggtggacagatggtagaggatgatggtgtggatgggtagttgataatgattgtatagatgaataggtagatggacagaggatgatagatgagtgtgtagatggatggtttgatgatggatgggatggatggatgatggatggatggatggatggatggatggatggatgggatgggatggctagatggatggatggatggatggatggatggatggatggatggatgcagagatggatggatggatgcagagatggatggatagatggagagatggatggatagatgaatcttttattgttttatctcttgtttggaaactctattcagcagtaatttagaccctggtttaagtaggatggctttgacctgaagatagcagatagcctggtccagggctagacacagtttatgtgatgcccatagaaaaagcccaaaaaacaaaaggtccagttggaagatcaatgataccatctggaacccatgtcttcatactgcctgccttcctatcctctttcttgaagatgcctagatataagctagctacttgtagcccattaacgatccattcagcacctttgtgaagcggtgtgaagtgggatgagccatggtcctatgtgccggtgcgaggcatgaagacccccttactcagtatcccgtctgcactatggagcaatgcctctctaccatcaaaacctactgcagaggcacacaaaagccaaaaggttccagaacccaaaggtttatttatccctccaccttgcctctgtccaaccccacccctaggctctaccacagtccctcagcacacacacacacaccccaagacaacttctcctttccttcctggaacagttctccgcccagcagccacactaccctcagcttctccccaacagtttcaggacctgcagtaattttagatcccagccacacccagagctccccctcagataggtcaccttgccttaaggagactgtaccccctgagcacccttgagcacacagaatcagtggctccaaggtgcttcctgcagctccattttgactaaggtggtatcagccagatgtttctcacagtgtgcctcagttgctgctcccaggctacagtcagtccagtccacacctctatctgttttcagaacatttgctgcttcctaaaagaagccctgtcccccaagctgtcactccttgtccccttcttccctggccaccactaactagctctctgtctctgttggattttcctggacatctctctttaaaaaaaaaaaaaaggtgtgtgtgtgtgtgtgtgtgtgtgtgtgtgtgtgtgtgtgtgtatgtatatgtgtgtgtgtgtatgtatatatatatatagtcacaccagagggggcattggatccctttacagatggttgtgagcaaccatgtggttgctgggaattgaactcaggacttctggaagagtagccagtgctcttaaccattgagccgtctctccagccccctctgggcatctcttatcatgtgtcatctgggtggggggcacttcccatttcttttaccttgtggcttatttccagggtcaccaatgtgtggtgtaacagtgctttgtccatttacagataactagtatcccatgagttggctatgcctctttttcagtttatctgcactttactctgtctgaggaaaagccatccgcaccatctacaggatacgtgtctccttccgtaggtctttatttacctgagggcacagtgagggcagtggtcatggcagagagttaggaggtagtgttgtgatctggttgtcacctttacctaaacttccctggacatggagagggaccactatccctatacaaactctgactctgttcacactctgtgaattgattggtatgaatctggggtaggaggggcagccctggaagtccatagtgttaccgggcaggctgtgtgagagagggaaggggtagagacatttctggagtagttctgcctaggttccttctccaaggacaatggctgggtctccaggcatgtaggcaggttgaaagctcttcaggaaaaagacaagtacctaccgaggctcctcaagtggtgctgatgagcagctggtcttggacacccgcactggggcatcagagccccaagagacccttattccaggttgactcatctctgggtgctccaggcctcagatgtgaggtacagttatgtgctatgtgtctaaggctaaggtgaacttggacattagtaaatgcctatagtcccagcactcagaagccagaggcgggatgatggctgcaagtttcaggctagggaggatacatagtgagtgccaggatttgttacctactttcccagttgctgtaacaaaataccagacaaaagtaacttaaggaaggaaagggttgcttggtctcacagtgtgagagtgcacagtgcatcacctgcaggtagtcatggagatgagagagaggcaggcagcatctggtcacattgtgtctgcacccaggaaacacagagaggaccgctggtgttcctcttacattctcctttccactgagtctgagacacctgcccatacacccattgtgactgtagacagaatgggggtctttagaggaggggtatcagattctgaggcagaagctatctgtgggagacacctggaattggtcatgacacagcgaggtttatcttatacatgtgtcataagctaattgtaccacgcagcttggtattcagaaacaggccttcttcctaaaatgctagacacagcacagagggagagttccagctgctcaccacacaggagtgggacagggacaggcctcccttcccaccttctggctttcctaatcctgtcctccatattcttacctgacaaccaacatcagcccatgcagacagtgccccgacaaccgcaaatgggacccctaaactttgccagacccatagacagcttctcttgtgacataggaaggtataacagtcagctctggccaggatggtggtgtccttggactgacccatccctctggcaccctcaggacactgaggaaactggggtaatagagaaaatgggattcctggagctgctgcagaggctggaccaagcccagacctggcgagagaggcaagtcagcccctcagcaaaacccagggttttggattaacattcatgggatgtcgtcagccaaacaaacgcaaatgtttattttcccagcggtaaattacaacttcaatagacagaaattacggtcctgggccttgaaaagcagtgacaggtgccttgtccctggatggtcacacggcctagaagtgttgagtctaagtgcccccagctcattcacagctccctgctgccctccccccacacctcaggcttgtgtgacccactgaacacattaccgggttctcgtgacatccagcaaatggcgcaggagcccaaggctggctctccaggtacatagctactctctatagagtgactgcatccctccaacgctggtcttgtccccagcacccttagaagctctaagaaggacatggaatagaaaccacacaatctagtgtgacctcccatgaggtgaccggcacagcaatgcccagagcctcaggccttgtttctggtcctttctgtgctctcattgatatgggggtgcctaggcagaacaagagagggaagtggggttttctgccattatgtcttgactccttaggcaataacccagaaacccagcactagccccacagtctggcacatgatcatcacagatgcaaggtacccagtaaggcaaggctaggcaggtagggtagttcctatacccctttggatggtgtttccctgagcatgttggatcatttggcattagaaccctacagaagctcctggccactttagccacatgcccttctggcctgcagaagctttggtcttataatattaaagggcagggaagttgggtagaataggacctgtttagagagctggggagtatgggtgcaggttcctctgaaccttcccctgtccaaggatcagtttccttatgtacaatgttaatgacctgtctggatagctctgaggtctcttcacactgtgatggacacattcaacccctctctccctagacgaagggcagtgacctgctttcttttctctgagcccatggctgggagtccaggatgagtctgtgcacttgctgggattatgaggggatcaagcagtatagggaacataggaagtgactcccccaacctagacaccagttccagtgctgtccttgcatgagaagatggggacattgattgacatcgatcatggatacgtatttattccgtcattttttttccaatggcgccatccttgcagagtcccggtgctgatgggtcctgacattttttgctcctcagcatccagcgggggcaggaagctacaagctctgatgctaagggtctcctatgaatcaaggaaaacccagagatctgtgatcatgggggacaggagaaagaaaggtttctcaggggatatgttgaaactgggcaggacccgcacggagaatgtatgcctgtaaaatgttctagatagagtgagtgtctgtggaactgcagctaggacgggtacagagggggaagctcaggggctgcaccttatctggagctggaggggacagcaccagcctcccatgtcatactctcccatgtggagatggatggcgagagaagctccagtcaccaggtctggctccagtgataacaaacggcctgtcagcggcagacaccgtgggtcgggagatcatcggctgcctggacttgatggatgagctgcggtggctcctatgtgctcccagcaagcctgttcccatcatagcaggcactgggttaccagagcccctcggtttggagtgtgcagtggaaggacagccaggtgtgggccattcaggattctggggctacaagtgacagaagccaactccaaggagtcaggcagacatatctgtgacaggaggcccagcccttgtcctcctctgtcccttctgcttgacattccagcagatggctctgggcaattctgcctccactgtagaaccagagccaggcatctcttcctgttagtcgaaacaatcccaaggaaggactgtgagtggccaggtggtcaccctccctccttctctgaaccaagtgcccacatatggtcgaggaacacgggcagagaggccgcagagctggggttgctgaaacggcatcgatgcaggcggtcccattgatgagggtgaggtgcaagctggaatttaaaagcaaaaacagtaccaagggagccattatacctgtgcatacctgtaattctatcattcaggggactgaaacaaggttgccaacaaatctaaggccaacctgaactacatagtaagcactaggctagataagactagctaaaaagcaagaatgtatgtatgtatgtatgtatgtatgttacccacaaaagcacaaacagaacagtagaacaaagtgcgtgtataaaatatcctaaaaagaagcaaagttagaaggcttgctgggaagcagtgtgaagtgggatgaagttctggagtcatttgtgagtgagtgcagtggtactgcactccagaagtggcaaagcagggaaaagcagccaaacagaaccccagagcagagcaaagaatgggtaagctgtggacagacacagatgaagaaggagggagcgggacccagtgtgaaggaggttcagggagagccccagcttaaggccgaggagtggagaagcagctgaccttgggagtggtcaccccactttatcatactcacttttccaacctgtatttttgtttacaattagttcatctatctatctatctatctatctatctatcatctatctattatgtatctgtctgtctgtctagccatccatccatccatgctctctgcatgtgtgtgcaaacaagagcacaaccttggctgtctttatcttttctttttgtgacagggtctttcacaggcccagaatttgccaagtgggcttcagtggctggccagtaagcaccagaaataaaggggaatagtgccgagaactcagttctttcctcaagacaggggctcactacatagctctggctgtcctagagctcattaagtaaaacaggctggtctgtaattcatggaggtcctcctgtctctaccctccaagtgctgggaccaaaagtgtgcaccaccacaccaagccagggctatattctaaattgtaaattttcttagatttccccctactatttgcagaaatttgtcaagtccaaacgtaattccgaatgaggtaggtagtctctactcagcccgtggtctctgaggggcccgtcaggcctatgccatgaaagcactagactcccaggcagggagcgctgagggtggcgccagcccatggagaagcgagcgcctcagttggcgattttctcaatctcgtccaaatcatctgtgtccagtctttctatcttcttattaaaatgctcctggatcctgttgaggatattcatgctgtgcttgctgacctagacttcttcattggtgatgaagcaatagaaaagcccacatatgcaacaaagtggccaattcgccatggtatagttgaagactgggacttaatggaaaggtttatggagcaagtgatttttaaatatttaagggcagaacctgaagatcattactttcttttgactgaacctccactgaatactccagaaaacagggaatatactgctgaaataatgtttgaatccttcaatgtctcactcccaaagctgggaatacaagcactggccaccacacctggcctcttgttgttgttgttgttgttgttgttgttgttgttgttgttcaacacgggtcctggagatcaagctcagatccttatgttttggggcaagtgcttcagtgagcaccatctcagccctgtcctgtagcctttagtactttgggcacatgccccaaactgtttctcatctttcagggtggctcaagcccctgggagtggagaagctgccaccattacacagtcagatgtgtgattctttttttttggggggggggtggtcgagacagggtttttctgtttagccctggctgtcctggaactcactctgtagaccaggctggcctcgaactcagaaatccgcctgcctctgcctcccgagtgctgggattaaaggcgtgcgccaccacgcccggcttcagatgtgtgattcttgagcggcagcaatgacttacaacctttccagaccctcttatctcctaatgttcacggtgtcctgtagttcacatagtaggggacctggccctgatatagtctgcaagagagctccatatctctggggacataacatgatatctaatcgtactccaactccttggaatgtgtgtcagccgtttgccacaaatgtgcttggtggcatctcatctgaagctgagaacaagaggttgacacatgtatggctgtggctcccactggttccagggtttacagtcccatgcacatgtgcgtatacacacacacacacacacacacacacacacacactctccagcctagagaagagtgaagggaagaagcaatagcttggagactcccgcagtacagaaagtgttccaaaatgaaagaaactaaggagggcacacaagggacatgcaaagccactcagcagggctcatgaggaagtgcactcagcccagtggtacagtggtgacccctatttctcaggacattctcttgggtcttccctaatctacagcctgctctttcctcttcattcggtgccagagcacggtcccgttcctcctctgttcactagaggaccaccacagtgctgtgaggttctgtatcttgtttcacagtcagtcaggaaaggtgatgggtcttccacgttctcattgttagacagtgtcaagaacagtagagactcaggtaggtgaatcctaatctatgactttctggatcaatcttaagtctcttcatcaccatggccaaagtgcctgacaaacaagcatcaccccgggcactcctgcagagccgtccacactgtcagctcctgtgatttttccaaatcttgtttttgcatagagataagaagcaaaatccagctaactcatcccagggggcttagcagacaagggaggtacatgtcttcctggtatcagaggtcatcagtccctccaagagagaaagagaagcctgtgggagcttcctctcctctctgacttcaggaagatcctataggaagatgcatatggagagttctgggtacggaatgggagttgctggtgtgaggaatctgtgctgtagctactgtgatgtgtacagtgccagcccgctcactaaggccacgtctgagccactctgcccctaacccttctgacaaaggtcaaagctcgcacttgttccctctgctgtctggaagggacagaggcagccatctgtctgtctatcctccttccttgagaccatcatactctatgtggttggctggtaagtggccctaaggttatggggtgggggtagggggcagccaaagggctgaggctgagccagaaatgtcagaagataggtggggaacaaacaagatgggctatagcccatcccagccacaaccacaagacccgagtctcccagggccagcttcctcatcggcagaaatgcatcatttccaagcgtgtatatgagaagcacctggacctcaacatgggagggaggcagcaggcagttctttttagagctgcactgtttgagatggcttggctgttttctgtccagcttagagctggaatttcagctacctggatcggcacacaccatgatccatcattttatctagagagactgaccacatgactccttcatctcaaccctcccctccccctcctcttcctcttccccctttctcctcccccaccccctccgtctgctcttcctcctctgtctctcctccnnnnnnnnnnnnnnnnnnnnttcttctccttcctcttcttcttcttcttcttcttcttccccctcttcctccttctctccactctcttctttctcagtagtgtctcttaacatagcccaggctggcatggaactcactatctttctgcttcggttcccaaatgctgggattatggtcactggccattgcacctattccttgtggaatagaatagaaatgtgcatcacagaaagaaaagctgtgaaggcatcaaggtgccagaccagagcccattcccctacacctctcaatggcacatacactttattatttacataaggtgtttaaaatgtcattgatatctatatttttgtctcccggggtttttaaaataaatagaccaagtttttgaagcagattcatagaaagattcatagaaagattgatcagaaggcagagctgtccctgggtctgcacaacatggatagtgtccctggtgtagggcactggtaactaaggagtggacagagactcaacaaaactcacctttatagtgaggtccagtctgagtttcgtattctgcgtgtttagttaaatgtctaatgatggtgtccgccgtcaaaatgtcaccctgagccgtgagaaaaggaggtgctgcccttctggggggtgaggatagcagaaacaacccaggtgtagctggaagtgttagacattgagattgctttctttagagaaaggggcttctgttctaagaagagcccccagctgcaagtctggtgtcagctctgtactgtgagctctgtactgtcagctcgggcaggcacagcccctctcacagcctcgtgggaagcagggaccagataaaggtagagagctgacttcactggggaaagccacactgccataagcaagagaaagtggctcctttgaattgaatcaagcccaggtctctatagacaataaagagcttcaggcggcacctgatttcctgagcggctgctgcctctaaggtgtccacgtgatccctggtgcttggtgactctttgttgttctgagaaggcgtgtgtcttgcagatggactggatacacagtgtgggttgagagcttccataaggtaacatgagagtgtcgaagagctgtgacctggacatttccacagggaaccagctcttcataaagtagcagggagaccaagtgggtaacaaatgggctctggaaatgtctttccagctggtggaaaaatggagggacaacggctgtcaggactcgttgtgactatgctgcagtggggccggcccactccatacaaagcagccctcagggcccccaccatctcctccctgtgcagcagccatggctctctcttgggagagcttcctagctgagaggtttacctgtcacattgaattctgtacctccaacagaggttgtgagcacctttcttaagttcaagccacacactggccacttaccacaaaacagacatgccacccagcagcacgaggtgggtaaacctgcagctcaagctgagggtcccactcctgcctcaggctgagctcccagagactggcttacgaggtctgctgagaggccactctgccggggccactcttcacgacagtatctctgaagaggactgtcctttgctttctcggtgtacacagcacactagcagccacacagctggtgtccatatgcctgggataaaaagtttgcggtctcaagccacatagccaactcttctagatccacattcctctgtgaaatgggctcgggaccctccactcctctataagattgatacatgtggccagggagatctgaaaatgtggacagttttataggtgtcagactaggattagatagcatcctccacagagggagatccgggaaaccaaggagcccagatcccaccccaggaggaccgtgcaggaacgctttttcaagaaggcagaggtgaacccctgagagggaccccaactggggaaaaccaagccactacagcaagcctggaaagaaacggagggtatttttacttatttatttatttaattttggcacattgctagatttttatccttcacatgcagatgtatgcctaatgagatgaaaatcaagccccccccacccccacccccccgctgatctgaagttctggccccttgtctctgcaggcggtgaccctgggtctctccttagtctcaaagaagcaaagtgtgagtgagtgaaaaactgggaagggaaaggaaggaagtgcagcgagtttgctcaaatgtaccaaccggaggaacgcctgggacttgtcgcaaggcgcctcgaggaaaagtgggtaaagtgggtggggagcaggctcagaggaagcagagaaagtaggacgcggacaagcagaagcagcggctgggggcttttcctcaggttgacattaaaatgaatgatatgcaaacgaatgcaaagcatatgcgaacgccggccccgatggcagtggggagagcgggatcctgagcccacttgccgcaggtcgcctggcgccttggggaccaaggccgagcgcggcgggtggagcgcgccccctgccggcagaacgcgcaggtggcccgggtaccccgaagggcttgcgaagggggtgagggggggtgcgcgccccaaggaggggcgcccgcctccacgtcccggagtagacaccgcggctccgggagcagcgacgccgtcgggctgcgactgctccgaggtgggtgtgcgcggtgcgctcagctcgcccgccctcccggggcgcggcctgcgcggggcgggggcgcacagctaggagtccgccccgcaccgggttgccccgcgccgcacgctctggctacgcgctgggactcctcggcccgttcccactccacggccccgctctcctgcatccgtacgggggtcccacgcgcggcctggcgctcctgaggtccctacgtcctgagtcggaccccatagccaagtccgccgggcgcgtcccggggcccctcggccacccgggcggtggaggcgggagccgctctgggcattgggcggcgccgggcgcacggaaccgggcctctctccggcggccggcgccccggggcggagcgagcgcgatgggcgtcgggctggaggcaggtggcgcagcggcggcggggcgcgggaggcgggggcggagcgcgcggggcgggggccgcgggactcggtgagacgcgcgggcgagcgcgcggcagcagagccgaaagcacggcggctggacccggcggccgccgaggccgaaaccacccgggcagcgtgcgggctttgttcccgcgctgggggccgaacgcactcggcatggcccaggcggtcgccccgcgcgccccgaccccgccgcgcgcctgagccccgcgcagcgcgagaagacagcgtacggatcgcccccaagttatggaggtggcgacccagtgagaaggaaaagccacttcgggagccgggttgcgagagagctacggtcccctggagctccagaccgtaagtgccgcccctgccctgttcaacaccgccgctgtcaccctactttgccggttgctgccgtcccgggggtcctcgctttgcaccccctctccagcccctccactttacaaagttcgtgcccacggcagggtggagccaactctgcccactcatttgactgagttgcagccaccctaggtgagcagacagcttgacctgtccagagtgtgtgtggttcatctttaggtaggagctgagtcggtgggggagtatgggctccccaaccaccacccacaagcgccccctggggtgccgggtctcctgacaaagactggtagcctgaatgacagggctcgggactgactggagtagcgggagggcaaccttcctgggagatagtgctggcaggagagggtctgctgctttctctagcccttccccctcttattttggtccctggatcagccattagggccatggagctgagcatccttcctgatggtcgggaggggatcctgaccgccctccctggggtcctgacagccaggtgcaggcacagcctccggctctgatccttctcacaggctttgggaacggtccatctgtgtgtagggcaggcccagagccaggctgtgggaacagcggggaggaggtgtgaggaggtgtgagcaccgcggagggacagatggctggggattcagccggagtcgggctgactaaggtggagcagaaggcagccaggctggcagctcctggctttgagccgctgcctttcaactcatggccctgaacttggtgtgtttgggcttcttgaccacagtgctggctggacctacccccctgctccatgaatagaactatctgatcatgtgagctaaagctgactttcagagcccaattcctcaaaataacagacgatctcatgctcctgtttgtagggttgatcccagtaactgtcacacccgtccctcctatcctgaggccaggatgtggcttcattatgtctggctgggtgtgtgcttcctcccggcgctcagaaacaggaggttcccaggcagccactcagaggatggggctggcagaagacaaagggagcggtcactttgccctggcattgcccttgcaagttgctggaaggtttcagaaacttctcaagactgggactctctcatctccctaagaccccaggggctggtctgagagagttcagccatacccggccagaatgcacttggctcctggcctgggaagaagtaggaaagccctgtgagagatttctggtcttgtgcatggagggatcctgatgggggctacactggggtcatgatgtcaccccaccttggtccactgaagggcggaagtcagaagatgtggctgtccccagttggcactgggagcccacagttagagcaccaagctgagaaaatgccgctatttgggactgttttttttttggggggggggcacaaccactcttgtgcattgagagggaaaagcagagaaaggaggaaccctgcgaacagaaggaacagatgtggtgctcggtgctgcccgggagctagacagacacggggagggagaatatcacgttaggactgattttctggcggaatccaccctcccgggaggtactgtgatcttgatgagaggggagaaagggagggccatgtgtacctggcacaccaccatcttttgctgtgtgccaagcctgagctggcatatggaagacacccctggacagttccttgcaggatgctctggggctgctgggtggtccaagcagctctcaggtccttgtctggctcttcctctgttaccgggttatccatgtaattgagttaccacctccaggaaatctctctgattgcgctccacatatactcctttctgcgtgactgaaagaaactcgttttccttcctacacgcagatctggaaatgctggcaaggctgggtcactgggccacaagatctgagccagtaggtttgcccaccatggagaaccaggcttagcttcagcctcttctgatgcagaagacaggagggtgtgtcgggagaggtgtttcccaccaccttctggaatggtcttccctcccccctcctgcactgtaagcgggatgggtttgggggtgggggggttctgattcattctcagcctcccacgtgccagtgggatggtggtgaattagatggatctagatatcctccaaccaccaagagaaccctcctagctcattcatggctgctcgggtgtgcatgtgtatgctgggtgcgcatggaatccagcacaggacaagaggcttgcaggctgctaggctggccatgcctggggcgaggggactggccctatggatcttccttggttggccattgtttcctgcactggccctccagactttaggtctgcctgccacacagcagggtcacaacattttctttagcagtgactatgatcttcagaacttagctcattgtccaaaacagatcctcttgcccaaccagacagacttggtggcgtgagtttgatgatagcccggaccctcccagctttgtaatctctcttgcctgtgtccttggagccttcctatgtctgtcaggtcttctcctcagcatcctaagaactctgagtctgtcccaagggctgcaagtgaccagggtcggtgctatgagtggagagccctctgctgggctgcctcaggcaagtggggaatagccacctcatagttcttgctcagccacactgctgacgtcgtgggtgggccttcgtgaagctgggctatcctggttcagacctcataggactcagtaggggggatgggagggtcgggtcactcaaaaccctctggaaaccaccaagacagtgtttgactattacaaaagatacacactcactgcaggataaatccacattcactgagtagtgtcacacacacacacacacacacacacacacacacacacacacatacacagtcccttgaaggtggccaatagtggagctttgctgagcccactctgcctctacatagctggtcatagagagtgtctgccattgtaggctaaaagccttctccatgctgtgcagaagtggatgacagaaacaacccaggggaaagtccacctcacctttgagaccagcactggcccactcaaagtggagtccaacggcactgacccactttccagactcagagaggttcttcagatgccagaggctgatgggcccttggggttccccagagttctgacccaacaaatgagttggctaacagccatgcagattctgtgtgtatcagggttgaccagctgtatcccctagaggggaggaactgtgagggaccagagaggtgcaggactttatggggagaggccacaggtctaaggctcctttctacaaggatatccagcctctagaccagactggattacagggttcagttgtaaccccccactccagtaaagcagtcacttgctatattgcctttgtgactcccaggtgcctcctatcctggtgggcctatcacctggccttcctgggcacagtgagcagtcacagttctgtttctgaggtccccagactggagcagggtgagagcaagggttgcagggcttctctcgtatagaagccagttcttggtagagatgaccgtcagccccagcaggcaaggctgggcagagcctggcatccgggtgcgcgcctcggacagtaagcactccgttcctagtttccacctccagctcagccggaccaggtggagagcctgccccttcccttgagcgacagcacacttcctgaggcagtaaaacagaagctcaagctcccgctttctataattcgtgggacctcagggcaagccagatgtcaccgggaaaggaaaacaaagatgaatttggctataataaggaagatgtctccaggccaagactcctagagcacagccgacagctcctgagttcccatccttctctgcctccctttcagcctcttggagccagtttatccctgtgctccaaatctcccaggcagaccctgaggcccctcataagggaggcagaatagtcagcttggtcaagggaaaagcaacagaggacatgagggaatgagagcactccctgacactcctggggacaggtcatgtatctctgtagccacggttgacaaggaatcaaaaggacattcaccccgctggatcatctagaagacaacacagaggacacctggtttggctgtgacaggtcccatgttacagccagagaaggcaagtggtaagagattgagaggtgtgggggttgctaaccatctctggaatctctctcctgtcctcagacaggatagggacaacactttggctttcagggactctcagctgtgtgacatgcttcaaagtacttgccccctctgtgcctctgatttctaatatgtctattgggggaacagactgtctcatccactcttaacccctagggtcatctccgggtctgaggtagatctgagcatcaggtagccatacctgggtctccttgctctcttgctgaccccgtgctgaatgctctcttgttctagtgagcaatatggccttggccccctgtacagcatctctcctttcatggagacagcgggtgaccatggagccaagccttggggctatgtgtgtcgtaccctttgaacacctgttttgtggaaaggcatccaggaaaggctggtagagcataccctgaagctgctcacgtaggaaagctttgggacagggacataatgctgtcactgagcgctgtgcctctaaggatgtgatgggtgctgcagggtatagagtacccagggacccagagtggccttgcagaggtttagctgccagagaggactgtagcctgcatctccaaggcttttctcccagctgggaaagatctctgtgaagagcctagagaagtcccacagtgtacagaagtcacagggcagtgctgcaggatgtgtgccaggtggaactgtgaaggggtcctcaactgatcatttgtgtgcccaagaacctggtcagtctgtagctgacatcctgcagagaggatacctccagctgctaccaaagtccatcaacctgtctgcgaggcactgtgtgcggctttatagaaggtacctgggcatggctgctgcacagacaatggacaatgtggactttgaggcagggctatggggacctttgtgtacccgtgtgcaagcaagtacgggagtgtagggaaacgtgtgtgtgtgtgtgtgtgtgtgtgtgtgtgtgcagtacagacacaagagtgtgtcattttggcaaccatttgtatttccaagattcttccagttatagcgatgtctgctcctccctcattctatccctcacacagctaggtgctcactgtgtgtctctagctggcccagaactccctatatagaccaggttggcctcaaactcttagacatccacttgcctctgcttcctgaatgctgggattgagtgtgcaacaccatgcccagcttctaaaactggataacgttccactgcatggacactgtgtgagttccgttgtctttcattgaaaatgcatgtagtttccatccctgattcatgctactgtggatatcaggcagggtctgaggaccggtctttatgggtctgtaatctgttggctttcaaaggataaaccaaagagaaaagccacttgcctggtggcgagggctggttttgtggttacttggtcctccctgccagggacaggtgccacccaaggtctcctgctggcttagggacacctgaccagtgcctgtagggggttgtttgaacagcagcatttctgcctgcaagctgtcaccgtgtttgattccacaaacagccactgggctccccggcacctgctctgtgaccagatgttctaaacccagttctgttcctagcctctctgcgtctatcctgtgtgagcagccaggggagtcgccaccaatgtcaattgtatatacccctccaggaaggaagctgagccacaaattgttagaccacatagccctcatatcccactggccactgactcggttctgcctcccccgtttcccagatgtgccaggccctttgcctgtggaaactttccctggtcccctctgctgtaagactctcctctccccttcttcttgcctgccccaaatgtctctttggtggttctacacactttctttctccttctttgttctattttctcagcggtagagcttgccctatgctgtgctgtctccttctgaatatcaggaccagccagctgccgtccagatatctccaagtatcgagttttgtccatcccaagccacctcacttggaggcagaaggtgttctgcagtaggtttttgtttacctgcagtgttcctgcaggataggagcttgccactgagggagcgcctctctctgaatcctatatattttgtaccctctctgtaccctaccctgtacctgctgggttgcacagccttgggatctcaggctcaccagcccaggaggcagcttgggttcactctagatgttccggatagacgtctcctgagagatcataccaggtggtgatacaggtacagaggaagcaaaggtgcagacagggatggcagcagctcaccgaggaccccaggattcacctatgttcatagacagaacaggagatctcacaaggtggctgttttgctatgctcacgggttctggggcagaatagggacagagcccagggggagagcatccttgctccacgtcctctgagtatctcatgccttagccaccaggaccaccagtgcatcagaagctcagcctggagcaacctgggtagtgggagattagtgctggagccacagtgcttcctaatctgacctcggagtcccgcagtgccttccatgtggccttgggtggaggtctgagcagctgtgctgtctggggagccatgccgcctgctgaaaggggaggcaagagtcaggctgacctctgggcacacataagagggtcaggacaggctggaccttgggcatcccagtagtgtctgcaccctgtgtgggtaatgccaggcctgaggagagagtggtatggtgggggaggcagatggtctgttctccacctgcctctcagtctacctcagaggccagtcagtcttgtagtcagtgtacaccccaccctggagcagctgagatccatctctggctggtgtgcccctatgaccgaggttgctgagtccctggctacctggctcggagcctctcacgagacagggaagctgtggggaagagcagatgccctcgtgaatcagcccctcctccagctcctggacaggggcagaatctcaggaccagatcccctggggacacagtgagccaattagtttttactcttccccaaatctgagaacagggaacctctcaaagtgcagagtgatggtggagtttcgtgctccttgtgcgactcccccatgcagtaggggtggggtgggctgcatgtgggaaccctagtatggctgtggggtagctccaagagtttcagggagcccttggctcccctcatctgagatattagcctggagctgcacccacagataggtgctcacagatgggcaagggctctacggatggatggagtgctatagcagcctgggctccacgccgagaccccgccctcggttgaaacaaaatgcagcaggtagggattggtccttttgcaatgactggcacctgctccaggcggaagccagcaaatgctgccccgtgcctgagagggacggcgaatggagggataagtagtggagtctcagcctgggctataggaggtccctggccggctctgctcacctcgtaaaggaactgtgcagaaacctgcagagggacacagccagtgactgctctacaaagattgttttgtggttgttcaaaaaccctgaggcaggagaatgcctgacacactggaggaacagcaaggagatttagggtgcagagcactcgggctgagcgagaagagagttgagaagggcttgggagatagccctgtggtgctgtggagtcccggcttcagcaggcataagtcacaacaagtgaaaaagcaatgcatatttctccttagccctgaagtactcaagggcctgatttagtgatctctcacccaatcccaaccctgaaggtactattgatatgtttgacagatggggaatctgaggtttatggattcctaccctcaaacctcaagccagcagccagtttgtccctaatgaagattcctatccactaatccctctgcagtcacacgcttggtgtggcggatggtcaccacactctcgagataaagggctggggtcaaccatgggtcactgctctgacattacacacaataaacacgtgccccaaggcttggcctggtgactgacaccatcacagggacccaaatgggtgcccagatcttgacaattgctctgtgcaacaggggtcagacaccggtattagggaggtctggctaggatgctgggacccttgggaaccctgaaggtggtggcagattgaagtttgtaatgctgtcctttagggaaggactttttaaggccttgggctgtaactcggtggtgagcattctgctggtgtatgcaaggccctgccttccaccttcagtggaaaaagatgatatcaaagaatcctgttgccgcttttaagccccagaaccaccctatcctgggtagcagtggcaccctgagcccccccaacccagagatatggggtgtattggctattgctggttgttctaggtcccctctgttctaggataaaaaacaccccaaccaaaagcaaggtttgttcatgttaaccattccaagccatagttcatcacagacggtagaaactcaaggcagggactaagaagaggcttgcttgcttgtccacaaagtgtaacctccaaggaagtataaccgccaaagtatagccaccagagaatacagctggaaccatggggaacactgcttgctggttagcctgtaggctagcttacacaccactagctttcttacatagttcagtgccgcctgcctagggaatggtgcctcctacagtggggtggacctgtctagctccaggaacaatcaggacagtgcccctcagacaggcccaaaagactatctgatctaagcaattcctcagtggaggaattcctctgggatgactttagcctgtgttgagttgatagttaaagctaacggcaacacctgacctctcagtgtggggttgcgcccttccctgatgggaaagtgaatctccagcaggtaggggtccctccaggaggcaagagagatgtgggcaagggcaaagtgagagcctgctgaatcaatctctctctctctctctctctctctctctctctctctctctcgagagcctgctgaatctctctctctctctctctctctctctctctctctctcacacacacacacacacacacacacacacacacacacacacaccccacacagaacatcctcacgaggctcatgagacagaccccaacatactggttggttatgctacctgcttctctgctcggaagagtgccctgccaggttcccatgcatgttggcattcctggaagttgtacacacccgtgggtccctagagagtcccagtggagcgacctcaggcagctccgtgccctcggtgacactctgttgtgggttcctgttcagtggaagctctcccagagctggatgcctggcaagcgcctcttcccaggaaaattccccaaaggctccgcccccagatctcaaggtcccctgagaccggttggtgggatgagtcaaaatacccataaggttcccgctggaaaggtaggcagcttcgccagccccacagctcccccagagcagctgcaccagcatcaacaccagcaccaggcccatctgcctgcctggaaccttcccagggcccggagaggagattgactgggatacggcagggaacagtttctaaccactgtgggaagggagaggtgtgcggctccagggtctccctgtgtgtccgctatgacgtggtatacagctgagatgatacggagcccccacccttagacatgaccaatgggtggcacctatgctcaaggctagcaaatgtgcctctctacccataatcccagggtctttgctttatctgtggggatccagggctgggtaggtgggtgtgagcacctacagcaacttatgcgttgaatctcagcacctgagaggctgaagcaggagggatgctgtgatttcgggaccagcttgggctatatactgagttctagagcagccagggctgcacaatgagaccttctctcagaaaacagaagttgacatcagtatgcccacctgtaatcccagcacccaagaggctgtgggccggaggttgaggccaatcggagctacaaagtggagatctaggttggctgtggtagaatgagatctcgtctcaagtgaccaggcaaataagccaacactgctgacccaagggtagattcttcgcctcccaggttatgtcctagttccctgaacaggcctgcccgatgggccaggtaaggattctattctctgatcgtcctggagagcctctgggagaggttcatggtggacctcagggagcccagtaaccatgttcagacacaggactttgtgtaggggctctttcccacccgatagccgctgcactgactgcaggctgcgctgagatctgtagtgacgtgctgagctgtgttcagaagacgcagcctccacttcctgtgatgcacagtgaggctgcagtctcggcgtctgtgtgtgggatatgtgccttatggctcagagcagaagcagctcagaccctcacaccagccagttggtgtttgcaggaagtgtggctttgcagccgctccagacgggcactccagctgcagctgctgtgtgatcgagcctgcagcaggaggctgatctggactcctgcaactgggaactctggaggcaccgcttaggagaggctgggcctgagcagggatagaaaggcccgtgtgcccatctcccagcagaagggaggacctcctgttttccaaggatactgcactccacgaagttgacactgacgtcaaaccctgacgctgtaccttccctcacctccctgctccgggatccatctcagccgcgcccctcccccccccaagtcttgccaaggaaggaggatgtgagaaatgtggcgggcactgtttatagccaggcagccatgtgaacagggcctgtatggagcaggtgggctctcttcactgtatgcatgggtggcacctcaccctccctgggcttctgtttccctatctatgaaatggagattggaaaaccctttcctgtctcatccttatcatctcccaagcgcaggctgccaggcttagataagctaacgttttgccccggggcacaggctgtgctgccagaatgcggtctccccttgactctgaccagtcccgggaatttgaccttggatgggtctcggtatttggcagcccagcttggaggtcatgatggctaggatgctccccaggggaggcgagcaaggcttcctccttccttgaaaacaagcaagcgggggggggggggggggtttgtgtgatggtgaggttgtatgggaagaagggccaaatgagtagatgtacctgcctcaggtacaatagagcgtattcaaattgtaagggccagccgaggcgcccagtacccgcgtgctcagcactcagtgctggtgcccattcccgctggccccagcaggaaatcgaaccaaggctggctgggcaaaaccctatgttcctgccctccagctttcaccatccagcaggatctgggaagctgtgtgtgaatgagctgtccctgataccccgcagcagagtcctagagcaacagagtgggaatggtagaggcagctcaggccagacccccccacccaagagactctgagaaaaggcgcctgcttggcagccttggatcaggaaatcccggctggcagggtgccaccacctcactgccaccctgatccgtcaccagccagacatatttcggatccttgccaggcaagggggaggggtgttggagaggggggtatttttctttaaaagtacttgataatgccaatcccaccataccctgagccttcctcccctccctgcccagtgccttcccactgggacctggtgatctgggcaccttcaaaggcccttgggggctgccaggctaggagcccnnnnnnnnnnnnnnnnnnnnaccccccctccatgccatccttgctgctgcctgtgtgtaattaacagagtaattaaaaacaggatgagttaattggtattcatttatgtggcagatgtttttaattgaagcaggaaacaatttacctgtttacataaacaatggcaaaggcaggcttgtaaaacacattttaaatttttttccctccccttgcctaaaaaagaggaattgagagcactggatctcccctgtgtagccctggcctcgcagtaaagagtgggagccccaccacggggagggtgggtggctccggcctgccaggaggaaacatctgtttgccggttgcttccagcaaaggctgtttccttaaattctgagaaaggatgtgttgttcttaggttgtgggagcctgcttgaggtgacagctgtcctggccactgcggccatcaggaggcctggcaaagcaaggcccagacagatctggccacccttctggacgaggagggcagggcttcccttctgtgcctgcgctgtgagtgcggtggtgttcctgagtctgtataagagggctaccatccttctcgtgcggcgattgagattcggggtgaaataaaaatttaaattcagttcttcctccacgaccacctgtcaaatatgcggttccaacgtgggcgctggggcgctggatgtacaggatgcaaagcttgggagactcagtgacacatgctggggcgagcacagaaagcttagcccatgagaaaacctacactgcagaagtcgcccgattacagtgacacaaattaagtgcttactgtatgccttacctgcttttcacgttgtacatgcatgttaattactctaattctatatcctgttcccatggtaactccagagagggataggatgatccctttgcccggcagagctgggatctgaactccgggtccacactggaaaccaccttggctttgctgggtggagacgcgtgtgatagagcgcttggcttggaggcacttagtttgggggatttgttgggtttggttcgagacagttctcacgtagttgccagagaacttactgtgtaggccaggctggcctcaaactcatgaagatccacctgcttgtgtctcccagtgctgggactaaagggtgtaccacattctgctttgctttctctttttaaagagtaaacatgactgaaatagcgcttagccagagataccggaaacaccgcagaggatataggcacgttagctgggcagagcctggtgggaggagcaggcatgctgtccttgtgtccaaacagcctggagtcacctgcccaggtcaatcacacctcaacatctgcctcctcctcacctgcagatgaatgacagcttcagaagcaatgtccgaggtgacaccaagcaggccgcaaaccctcaaaatggccttttcatgaatgtcaagggcaaagggtaccagaggctcccagtgtgcattttgtggagagtctgggcttttggagaccatcagctgggatttttgcagacctctggtgacacttagggcaacatagagaatagaatgttctggaatctatcaagcatgaaggctttgatcggagaaagtgccccagagctgtaccaagaggtggcagagggtcctccccaggtcagctggactctgggcttcatagagtaaggcttacctggagggccagccacagcatttattgtttgtttgtttgggggggatcatgaatggagaagtgagagggtgtcttgtgggagtcaagtctctcctcctcctggttttagagttggatctcagatcataaggcatgagagtgtttttatccactgggccatcccaccaaccctacagccataaatttttaggtcatctggaggacagcacgctggacaaacagcctgtgggggttctgggccggtagctgagtggccttagaagaatgtcagactttccgagtgcatggtcgtggactgcccaggactatagccctgacctcggcagtagtgtcctgacaagccctactagacccacatggcctccctgaggtcttctagcagcctgttgtctcctctgcaaaagcaggaggatcatgggttctctttgatgtgggctcagacccaggtcctaggcctggaccttgctgggccttctcagggcagccctcttctctgccctgggtatggaagaacagaatgggtgttctcacctgggcaggataggagagagaatactgcaggcctgacccttccagactctgaggagttgctctaggcttcccacactgggcatcaggttggcaccacatgaggctgactctacactgccacagcagcccacaggacatccgtgcaccagaggaaatgaggcagggaagcctagaagggagatgccctgtccaccctttgctgcctaccccagtcctggctggtctcttctcagggcttgggtcctgtcctgctctgggctgtcacagggacagatgtcacttgttggtgcctggcttatttaccagagactgagccaaacaggctcgcatctcagtgatggcaacagagttcctcgggtttgtcagttccttgttttgtcttgttttcctttaatgagtctgcactggtgttcttggcttttgttttatttctctgttttgtggttctggtgattgaaatcagagtcttatgcatgccgggctctaccgctaggctacaacctcggctacttgtttatttgggacaagcctttgctatgtagtctgactggcctgaaattcgctatgtcgactaagcagactgtgaactcataaagatctgtctgcctctgccttctgagtgctgggactagaggcatgtacaaccatacctggcctgtctttttactttttaaaatatttatttgtgtttgtgtggtgtggtgtgcgtgtgtgtatgtcacatgttcctgccatatgtgggcaggtgctcccagaagccgaagggaatattggctcctctggagctggagttacaggtggctgtgaaccaaccaatatgggtgctggaaactcagcaagaatagcaagtgctcttaaccactgagcagtctctccagctgttttgagacagggtctcactaagttgcccaggctagccttgaacttgcaatactctggccccagtgtcccaagtgacggcttgcaagcctgtaccgccagaccctggttcgagctgaagttatgggctgctctgagccacttgacatgggtactggcaatcaacctctggtctgtaaacggagtacattccctccagtccaaacagggctcctcccctaacctagagtgccaggcttggcactgctggtgactggtgcgaattataacaataaggactcaatttagtgtggaggacagcaggctggcagaggaggtgccctctgcacctgtgtttgtcaaaacagcttctccctccttgcagatgaccttgtatatacataaggtcaccttgtgactagccagggcattgcgtcttctctctggcttgcatgaccttcactggagaagatggacatgtaaacaccatcctccacagctggtacaagcctgctcatacataaatatacatgcatgtatacacagatgcatgcacacatgcatgcatacacagatgcatgcacacatgcatgcatacacaggtgcatgcacacacatccatgtatacacagatacatgcacacaatccatatatacactgatgcctgcacacactctgtgtggtgtatgttcgggtatatgtgccacagtgtacatgtggaggtcagaaagcaatctggggtgtcagtggcccttaccttccactttgcttgagagagggtctctggtctgacaagacatatcaggctagctggtcacaacttctgggattatcttgccaccacccccaccttgctacaggaacaccaagaggggagacatgtgtcacgacttctgggtctcaactcagacactcatgcttgtccatcaagcactttactccatgagcaatcttccctgccccacatatttccttactgatggcttttcacatgtccctctgcttgaaggcttggttccggtctatttcggatcatggggagacaccctcctaagtacccccgtcacaacctagccagggacagtcggtgccaatgaagcaggtgggaagtacccaggtagccacaacccaacctcatcatcagagccatttgtctttaataagctgtgccaggatgcaaggtgacttcttggtgacatggcagggagggtgcagacccatccatgccccttgcatgccaggacccatgctgagttaaggggcccttcttccctgtgcttcccccagcctggcagcttcccctggcagtgggcggcccagatggcgaggcacctcccccacggctctctgggagttgttggctgtgcagccccagcagctgggagaggaatgtgtttcctttgcaagccagccgcagggtgagcaggcctggacatctggatcccatttgcagccctgtggacagcatggaaggctttaatcccagtgttcccccatcctcccctgccttttaactctgtttggcccagggtgctgtgaggacggagcgtgccaggcttctgggtgctctcacaggtgggtgtggccttcagcatcttcttctggagattcggagctgagattctcactctgggagcgtcacagcaccctctgtcctgcaggagtgccaccccatttgcttggacttacttttctccacgtttttgtctgccattaagatacacggtgtcagccgggcggcagtggcgcacgcctttaatcccagcacttgggaggcagaggcaggcggatttctgagttcgaggccagcctgggcccctcctatccaggaaaagtaccttcctgattttgaacactgtactaggctgtttgcaaaacaggccttcatacacaggcacccacagggtgtgctcttttgagtctggcttcttctctcagctgtgtgtttctgagatggtgccacatcatgtttggttgcatgtccctttctccttgtgctgtagatcttggctgtgtggatatcacagttcttttttttttttaatgttacttattattatttatatgtacactgtagctgtcttcagacacacaccaaaagaaggcatcagatcccattacagatggttgtgagccaccatgtggttgctgggaattgaactcaggacctctggaagagcagtcagtgctcttaaccgctgagccatctctccatcccgatatcacagctcttgatggtcaacttttttggttaccatttgggtctctctgatcaagtggctaatctcattctctgcttatgagttacaaagctattgtgctttgggagtgccattacgattgacagatgctgatccagaggtttccaatgccaattgatccagatgtccctgtcagctgttggtgtgtaacaaaccaccccagactgagtgctctggagctaccactggtctccagcagggggcgcctcagatgagctccatcctcagcaggtggtgtgggaattttctcctggggaaaatgagccactcaatctgtcaggcttacttgcagagtatgcatgagtgttacaaacagaagcatagctgtatccaagcagccacagtaggatgtctgcacccagaatggatgagggctgcccccagctacatagatcaaagtttctctccctagtctcccccagcctgtatactctagcacccatcttagctcctgaggtgcaattagggcagaacggcatacagatggctaggagaggtgactggaatatcagatgaggggccatgaccctcccaccctatcctctgagggaatgtcagccgtccacaggctcaatcatgatggactcttgggagccggcatggctgatctgaagatggtgggtcttttgctcagaacgtagtgcaacagctggcctctgctctatggttggcctggcaggggctgcagatctgttgagtgctaggcactctggtggtgactgggtccagctagacccctgtgtgtgagacaccaagcctcactatcttacatctcttccactgcatcttgttggccacagcaggtctggggctgaccctgttcaaaggaccactagtgagctggtgtaaaggccacagaggatcgctgtggtgttacgtgtagtgtccagagcagataatacaatagttctggcctcagtttccccatatgtaaatggagttctgacaccccacagctttatcatgtaaaatgggggagtcgtttccaagcccaggatagcacagttgctctctgcaaagaggaagctatccaacacgtcaggcatgctgaggacagccttcctcctccgtggcccccacactatccccatgcacccacttgttgtacccacttgtagaaccatgcattccgcccacatggggtaggagctggttccagatgcgtctctatctctcttccttcagtcccagtggtgactgtgcccaagatcttgcacacgctcagctcggcgaggactcttccactgagctacctcccaggtcactgctgcactttttgcttctaatacagggtctggtctaaagcttgcaatcctcctgcttcagactctgtaaaggagcaaggttacagatgaacacacaaagcctcgccactcagcatgtgagttagtgcgcatgtcccgctgactcttgtggaatgaggtgggttcgttctcctcgtttttttgtaggcaagaaacctgaagctcggtgtaactggaacccacgctgctcattcctgcccgcctcttgtcctccagggctttaaagttggggaagagccagcctcctatcacagggagcgcagtggactctgcatctgtgactctctctttcttgcctttgctgcctcaactagcctcaccccaaaatgtgcgctcattctgctggtgggtaccaaagttcagagttattcgaggcaaccccttagttttcacaattagagtaggaaccaggtctccagccttctagccctccactgtgaccctggtgaccttttgaccttttgaccttcatcgtcaccatggactgggagtgtggggttcttgggttcttcttgagatgtccccgtgctgggctgcagggagagcagtggcggcaatggctgcagcgtcaggcagagttaaaaccagagaatggtaccgagtcagacctctgagagcaaggcagggccaagaagagccaaccctgcttgactcaaagtcctgtcaccactggggcagaagggctgcctggccaatggagcacagaacaggaaacactaatccctgtatttttgtattattacttattcatggcggtggaggctgatggagaccagatgtgggaagccactgaagcagacacctgggactcgttagggcctgcatcccacccactcccaagttccctgcctacgggatcaaagctgagtgcttctgatcctagccttgaacaggacaggatggagctcagcccccaggtcagactcccctcctagatgtggagtcacccaggggaagccctcagctctttgctgtgccttgggcctgggagcccaggtctaacccagccctttgctggagaccagggcccaaattccttctgtgtatcccacaggaaggctccagaagagagctagctgtgtcctctcgaagtttgtcctgggttgaaacagctacaatcttgcatgagccctctaatgactccagatgtagctaggcctcagtgtccaggacaggagcctccaccccctgccccaaccccacaaagaccaagccttggccaaggatgggggatgggaaggacaggccaacgcctgttacatccgtagcctcaaaggacttgtaccccaatggctatactgtctatcaaccaactccttttattttcaaaagggcccatctgaacgtgaggcagttagaaacccctcaggaccagtattgctgggacaagtccgagatacgtaactcatggctctgagcagtcaaggataggcaactctgtcagtatggagctgcagctctctagtgtcctccttttgtccccaacctgtgtccagaggtggttgtggggctcccaacgtgtccctatcccaacatgtccccccatcccatggtcctgtggtcctgagacatcctgaagtgtgtctttgctgggttacttcactccatgtcactttcacacgtgtctgggctcactgttcactactttgcttgtgtgtgtaaagagtgagaagtgcttgagcttgctgtttagcttgtgagggtacccggttacctgcaatgagatgaggctgttggccttcaagggttaaaagacatgtaatctcttatttcatttgtttatgtggcgtatgtgtgtgggtacatactccagggtacgtgtatgcaggtcagaggacaacttatggagttgattcactaacttgcaccgtatgggttctggggctcagtctatctcaggttgtcaggcttggtggcaagcacctttattcattgagccatcttgcagctctgcaaagccattttaaatggagatctctaactggatggatgagtgactggatggatgacaggtaggtgggtagatgggttgtgcatgagtgacacatttgtggattaatggatgggtgctgggtaggtgtagaaggggtggatggaaagtagatggatggatgatggatggatgggtggagagatgaatggagagatgaagagatggagagatagatggatggatggagagatgaagagatggatggagagataaatggatgaatggatagatggatggatggatgcagagatggatgggtgaatggtaggtggatggatgagtgatggatgggtggatgatggatggatgatggataggtcgctagctagatgaatgatggatgtgtgtgtgtggaaatgggtgtagatacggtcagagacataaatactccagtagtctacgcgaggggctcaaaatgctgaaatattccaaacagccttacaatctgtggtttctgacagccatgggactccccgcctctcggttttcccatctttcccatgggaatgccgttgcccaactaccaggagcctctggggaacatattcattaaaacaaaacaaaacaaaacaaaaacacagtcatgacaaagatatgaagggagagaagatagagagtggaagtctggaggaggtagcatttccacagaaggacactagccagtgcaaaggctctggggccagagaatctgaggcaggagagtgagactggacagtgagcagagaggagacagtcagccttaagtggcaggcttggaaatgtgtcctaggaggttagctgaccctgctgagttgaggaaatccaatcatgtgggtttaccttggccttggtggcatagccttggaccactgcccaggcaaacgtagagactggaatccagagataagggctccgtactccttacacactgtgtggccctgcagtgacctcaagtgaccctgagtatcggggtagtctacggagttgccgtggggtgatctcagcctctcggggtctctgattatctcacatttcttacagaatgacataatgtctctcatctctgtctctgacactctctctctccctttccctctccctctccctctccccttcctgtgtgtgtgtgggagatgcagggagggagtttgagtgcacatgttgtggaagccaaaacacagccttttgcgtcctacttcaggtaccttccaccacccccttttcacacttgagacaaggtctctcgttgacttgaaacttgctgagtagactggccagccagccccaggaaccttccctcccactccccactcagtgctgcagttacaagaacatgcctctgtacccagttccctacatgggtgctggggatcaaacttaggttctatagttgatctccagggccaactcacccagagccctagatccctgtagtttcatgactgaacgagaaaatagcccttgctagcacacagtctctttcctccaaaggcatgccctatacctttggtttttcactggggctcctgaaatcacagatgtagaaacaaaccgcccacccaggtcacagtgtgggacccatcacctccaagtgtgctttggccttttcctctgattgatgactttgtgctatgggactctggatccccccccatgccccacccccagtatatgaggggttggctgcacttgcagagaagatgcctagatctgggtgccttaataccatcatgtgcctttaagaccctgcctgctcatggtcagcccagaaggggaaagccagtctggtcctttcagcagccctgaccagtctccacagtccaagactccacgagaagaaacctcacatctgacttcttggggtggagtcccagcttcctacctggctgtgcctcagtttccttacctgccaacctcatgagtttatggtggggacagcaggaggtgacagagcactgaggtcagggccagaatctcagccctgactttgggctcacacctgcctctgaatcctgttgatgtacacagtgacctaggtcacggcaggggtcagtcaagccaggatctgaatttgctagggacacaaaaggtctgaagagacccagccagaaagacggtcagctccatgctggacctcggccagttcccagctgggagggcaggctgggaaccacagccgatggggacagtgatggatggagtggcctgttccggcacattccgtgttctttcccacaggccccgcctggctttagagggctgcttcctctgtggatgctcagcatggacaacacaagagctcccctgggcccacaagcagctatggggcctgggaattttctggagggtgggaacatggaagtagcagagactgaggtaagctgagggaggagccaggcccttctcagcctctgtcttcccggagatcatcctaggctatgtcaacttgaggcaccatatcatggtgtattggtgccaccgcctgccggttctctactcgttcacatccctcagggaatccccaagtcccctttctagggaggattggaggcaagataccatcagctctaaaaaataaataaataacatgaaaggctgaacttgctttagagacctcggaagctgcctggggtcatcgggctgtagggcccctgagagcagcaggggcaatctacccaaatccagttatattaccaggcttctcatctgggtttcactggaccactctgtgccttggtttccccatttgtacggtggagcagggttgtagggatgcgggctgttgggaatatcaaatgaggccctcgtgaagcagacatccttcaccacagagaagagagctatctgttaggctgtgtgatgccgtgggatccttacctcattcccttgggctgaaggagctggacttggggctcctcccacagcatcccctacccgccactgcccaagaagtgcagtactcttctaagttgagcactaacaagccggtgtcatatggtccccagaaaccactctaggttggctgaccacacaacccaaatgctttctgcttgtgtgaaggttggcctaggggcacgggcatagatagaaatggctccctaggcatctctgggtttcttcaacatggttctcactgtgactacaccacaccagttacctgtattaaaaaatttacagcaacagtttggctaagagctagtgcacagtacccatcctggctgccccacccacaagctgtgagctgtggggaactcctagaggagccctgacagcctcccctgggacacatggtcagcagggctgcccccaggacccctgaggtttttattttgctcacctcacaagaaaagtcaaattaaacaggcaacagaatctctctgtccagctacctgcaaacacaactcagaacctggggactcaggcctgggtgtgtagggacagaaaggacagtgtggcttgggactgatggatgagacccagctctgtactgctcagctgagtggctttgcagaaatcacttcctgggcttcagtttcccctttgtgagatggagctgtaacagtgcctcaaggaggctatgaagggtggagattccagcagaagtgtgaccgaggccaggggtttgaccttggtggaacaagaggaaaagacacagcttccagctgcccagatttcacagtggtccgggacctctccaggactgctctgggcatacccaccctcccaccagcatatgcaggctggctgggaagcgaggactgcctctcagtgggtgtccagatcgcctggccagctcccctggatggctccttctcaggctcgtatggtatgtgcctagagggccttgggggaagacagagccagggaaggacaggtctactggcctcatacctgcctttgactttctgagtctgtggaaccccgtgatgcctgcccagccactacagtgtgaagagaaacattcatgaaagttaacagcgagtctggagacgcggcgcagtgggtagctttggtagcttctgtagcatgcacaaaaccctgggtttaaaccccaggacccagacactgggcgtggcggctcacacatgtaatcccagctttcggaagcggacgccgcataagtatcagaagttcagggccatctttggctacacagcaaatctctaaataaaattgctgtgtgtggtacaggacctgtgaaggacatcctccacctcttttcatacacacacacaccctcagggaaatgcatggtgtacatactttagcggtaaggccccaggagacagcctttctctctcagcagccagcccctcccacctgaccttggaacaccggcctccagactccctctaccctcacccccccccccagggtcctggccagggactcctgagaactacttcctcatggggctgtcacatcgatccctaccctgagtcatcatcaccttttggtggctgcaaaccttgcagatgggttgaccagggagtaaggtgaccgtagtgtggtgacagtccagaggaactgccaggagggataagctggaaaaggaaacaggatttccagggcatcctgggaggtgggcacccttaggctgctgaaggggaggtaaggaagtataaaggcagagagaggcagcaacccccacatctgggaggctgctggcaggtccgaagccggagaccaggtgcctctaagtccccacactcacaggcttaccatccggtgtccatgtgtgctatgtgatttggagtagatcatgacactacggtgtagccgactctctctttgaaatgggctttgagtggaatcagggccacgggacttctgtgaggccaaatggaatcgatgaagtgctgggaacagagtctgcatgcaatgaacgcttgaggctctgaggcagagggatgatccctggtctccatgattcatgtcccagaaacgagaaagaaaatgaagtttctgctgctggcgcctttaacatcatgggcatgcaagtggcggccactgcatcatggtaccctggcccatggcaccagtgggcctatcagtatgatactgagcaaatattcagagaggtgacagccagtgcccagtgcccattgcccattgccggcccagctgtccctgtgcctttactcaattggttctactttgtttggtacttgaagctcaggtgaagccacttcccctctgtgaaaggcttcagagacacagagtgaccccaatgtcctgggcctgagaccagagccagcctggtacttgagacatttggccctggcaataccctcccgggcaaccccatctgcccgagggcccaagggcagactggacaggtgaagggctggtgaggacggagcgctctatgctgaagcagccagtcccagttgccttctttggttgttgtcaccggagactggccctcagccctacagccaggcatggtgttgataggtccccacagctgcagccacacgtgtgcccagccatcagcctttggacagttgagggaggggaggggaggggctgagcgccggcaggaggggggccaaagccacagctgggggacagcaggtgccgcagcctgggtggctgctgtgtgccatctgctcccatcccgcccctcctcgtgggcccagcaagatgggggcttcttgcctctcccatcaccgacccatacacaagccaccacggaccactgggcttaaagtgtctctaaagcttctctcccctctgcagaacggggcggaggggtggagggggggtgctggtgagggctttactgtttctggcctgccgcctggtagatgtcacttactgatcaccagccacagaggcctgggtgacctagacttacatgtgaatgctaataatgggatcctggaatgggatgcaggatgggaaaggctgaggagtggtacccacagtttcaatgaggatggccaagagactctgtgactctgtctccgcaaccccctgcccatagatgacccaatgggtgtgagcatgggcggcgagcagtaattgggacagaaaggtctgctttctgctcatagcaggcagaagcccacccttgctagccctggatagctgggccgtgtgacaaagaaacagctcacacgggttttttcacccatcctgcctgaggccccggggctcaccatgctctgcaaagaatgccccaagcaaggcctgcccttgggacttgtgttaaacccttgctttgtggtcctttgaggaagcccttggatgtccagggtccacctgatcctcagtttaccctggccgccatcaccatcttactcttttcctactctgctgcccctgagctgagtcccttgataagagctgggtcactcggacatgcttggtaatgggtgtcctgagctcccgcacagacctcagccccgacgggcttggctctttgcttcacctgtgcttagatgccagccacctgtgagaacacctgagcttagatgccacctgtgagaacacctgtgcttagatgccagccacctgtgagaacacctgaggctcccacaggagggttggcatcaggagcccacctcgccagtggaagctcaggcccccgcccaggtgccggccagcctgctctgtctgccctcagctgcctaatctgtctctctctctttctctttctctctttctttagctcacaggaaggagaaggctgcagcaatgccagactccccggctgaagtgaagacgcagccccggtccacaccccccagcatgccgcccccacctcccacctcatcccagggagccacacgaccaccctccttcacacctcacacacgtgagtctccctgcccacgacccctgcccataccttgtgtagaatagatggagccatttgaaattctgtactcggatttaacataacgtgaccctgtggcccatttgcagcctagtcttaggctcagatcccagaccctcctccttgctacctcactgtgggtaagctagctacttcagcgctctagcctggcttcttcatgcacagagtggggccctgccgtggttcctatcttacagccattgtgagagtgaagtaagttaccagccattagcaccagcttacaagcacgggtgttagaaggccccggggacttaggctcagctcagcagcccacagcagaggccactgtggggattccagggagcctcaagcaggagtgtcctctctcttccatagccacctctttcctttgaaaaattgtaacttaggctgagcaggtgggaaactcccagggttgggccattaaagggtacagcgtcccatgcccttcccccaagacagaggcttaagagtatatcccaagtgttctgtcagagagaagccatgagccacctccgctgcaacgtttgaagacacgtacctgaggggacccttccccagatctcacactgaagcaagatcgctctccgtgggaggggtctcagtaactcagccgggtgtcactcacctggtttccagggcatgcatgtttcctctgacctctgcatccctgaacgtggagcactggctctgcccttcaaagttaaagttctcaataaagccttgctgtctagagaaagtctgagatgagaaacaatcagctcaaccccaggctagccatgtcccaggctagccatgcccctgttggcagattgccagactcctgctttgggggtaataccatctgcttccaggtatagtcacgttgaaccagagccctctgagaacacgaccagcacacagccggttgtctccacatgcaccttccagtctcctgcgaggtgctaactcccatttcctacagttaactgagggttcaacaattagtgaacctggagtgaggattcctagccctgcctcttgtagctgggactctgcccttagcagcctgatgctctcagaggacagatgaccctgccagggtcctgggtctgcctgctggccatgctcctccaggccaaagatccttgtgtctattctcacattgttcctccctcagtgattcggctgacatagtcactctccctcctccctaagcatcctcccctctgggctgagctacaggtagactctggctgctgggcagcctcagaactcatccagtggatgaaagggaactctgtgggaccgtgccgatgtgacctagaagtgttaacctagaaacaagatcgtgcgtgggggctgctatgcccctctcccacccatgaggccatgacacacttcctgaaacaagggtcctccagatgtttggaggccccaaacaggaaagaagaacagagcagccaacaggctgatcttggactatgagctgtcacctactctaagggtgcacccccccctgcccccagcctgcttttccctgtggaccagctcttgtcccaaaagctcgcctggacaccagatgttcctggttaggagtaaggatggggtcagctggggccttcaaggctttgctttcatgaggactgtgaacagatgtgagggtggtcagagcatgtgtggttcatggggagggcttgtgtgcctcctgcctctcggtcccactctgggggtcgcagctctgtctgtagagcacaaggctttcgtttgtctcttaaacgggcacttccagtctgagggggcttcagatcaccggggctagttggttggagcataagcctcctgaggtcacctcaggttcgttcctaatccgcgtggctaaccacacacacgctcccctccgcacctggctggtggcagccctggaaaagcctctgcagtcggctacagattgctgcccagtgttccaagccaaatggagacactgaccttgaacctacttaagggctgtggttttcctggcccagtgaccaccctgggcacagattggtctgtggctggggagacaggcaggaggctgaatatggacaatacaaggagcgctgacccagcctaaactcctctcaggcagggagcctgtaggtaggttgagctcccatctgcccttccttgagagtttctgagacagggggctcactactcctagagctcctgtgtgtgtccactgacaaccccacctcacgtatcagacctgaatctccgtcacggaaaacacacagcctggaccctcaggtccctcgatgacagtgccgagggggtaaccgagcactctctggaaagacagcttttaagagtgaaatgtcctgctgacagatacccagtgcaacccattttacagaggagaaaactgaggcccagaggagtgggccagcccccagtggcaacagtgtggtctttaggactgccactgcagagaggacagccgctgcggcgccctcctgacagcctgttcttcttattttgcttacagatggcgaggatggacctgcgacgtctcttccccatggccgtttccacggctgcttaaagtggtccatggtctgtctctgtaagtaaaataacaagaaccgtgggcttcgggggctggagagatggctcagcagttaagagcactgactgctctttcaaaggtcctgagttcaaatcccagcaaccacatggtggctcacaaccacccataataagatctgatgccctcttctggtgtatctgaagacagctacagtgtacttacacatattaaataactaaatcttagaaagaaagaaagaaagaaagaaagaaagaaagaaagaaagaaagaaagaaagagtgagccgtggtcttcaaggaggctacctgggtccttctcaaggcctctacactcctattgtcagatctctagcctccttaaagacaagagaggtccaggggcctagggcgagactgagaccctcagtctttgcgccggacctggtgcctttgcatgtgagcgccgactgagctgcatcctcaacatccagatgggctgactggagcagatgccagggctgtgaggggacagtgggacatatgtcaatgacaagccacactccactgttaaaagagaccctagctcctactattggcagggtagctaacgatgggcagggatggttacccttgcctcagtttccccacctgtaaggcgatgttaccacagtatggagcgctgagggcgattcgtgcacctcgctgacaaagctgctgctgtcgtgtctgagccacaccacgtgccctgtgggtatcggtcactggtggatgattgtatcaaagcatgaggtgacattcagaatacttgtccgtcagcagaagcagccttgactgggccagttagctgcatatcccaggcatgtgtggctgccatataacttctgggctcttaagaatgaggaagcactcacatgtgcagcccgtgttctctgttgtccctcttgctgccattgttccgtgccttgcttagccacacactagagcctggcacacagcctgactggtcatcaactgttgaccggctcttgctgtggtgataatggtgttccccttgtcggggagaaagggtggaagagccccaggctaactcccatccaagcgtcaaggctgggggagttatgggggtgctagcgtgtgcccccaaacatcagccgaggacacgtgtgcagtctaacttagtaacacacctgtcgtggtaatgaaaacacttgtgccgggggctatttttggcgtctctttagctgctgagactgcccggcagccgcgggagggaagacaggcagtgaggcgagcaggccacggggggacccaggcgctcagagcaaggttggtaagcgggccacagggaggacaggaccaggccaggctgggtctggtgggtggtgtggactagaccatgtatccatcggcatgtcttagaaactactagaagtcccatagtcctggtgatagaacccttggtcttaagacacaagaccatggctattagtgaggtctccatggcaacaagccatctcctggcctggctgaggtgacagcaagtgactgtcattggggttgactggggcgtgtgtgtcggctgtcagagctcaccattaagaaggaagtccaccgagtagtgtcctctggacctggtcttagagaggctaggagcccagagctgttaggatgctgtgtgctgccatcactgaccgctgcagagcaagaggggtgctcccacatacagcgcttatgcctgcctgcttctactagcataccatcattctggaactgactgtatcctaagccctggaagaggctcttgagatcctttgggggagacaaatgggaaggcttccatgtataccccaggagagaggagcttcttagaaccatacgcagagggttgccatgcctggtgacagcttaaaaacaccaggtagcctgtgagcctgcatgtctctccccacatgttttgaaacttgtgttcctcagaagcagctgtcaagggggtgcctcacataacccccaacatgtagagttcgtcagggttgtgacctcctgagggccagcttccaggtaagctggtggcatgcacaggctccataagccatggggctgggaatcaggatagactttgatatgctttgatcctgaagcccacctcaggacttcagaatggcttgggaccactggcagatagagaaaccaacgccaggcccgggtctgacctacaatgtctgtctggacaggtgccactccccaaacccttcaagggtttatgatatgagggtgtctgaggacctgtgagagcatagctcttgtaacaggtgactgtcagactggaggtgaggatagaatggggagaaaaggtgttctctgaggggattataccagcagccacacccacaccatgccagagcatctcttgtcttaactggtgtggaaggtgggggtccgccctggggtcagacagttgggggccaccagctggctgtacccatgagctgcttaccccagtctgttatatggatcgagaacatgtttgtgaggcgccctggccccaaggcggtttatctgggctagagcctcaggcagcacctggacaagatggtgccagtcactgcactagttagcaagagaaggctatatgggacccatgggagagcctgaaaccacaagactgacagagtcgggttaggctcccccatcctgtagtgcgagcagaggtagaacaggatcctgcaagagccgtagcatctgaggagatctgagggccaggaaggagggatgcaggtctagccctacctcacctttccgtgcccagcccttaggccacctcccagtgcttgaatcaagatgcacagtctggagtgacttgctgaggagcccattgcctgtgacaagcagggaacccaggcaagcctggagggatcctgagggtaaaagagggctctctttctcccttggtacttctagccccaccaggctagcctcagcacaggtggcatgggacagctggagctttgaggattgtgaccttatgggcaccccagagctacatttctcagcccagacaagagaatctggcttctgcattctctgccaaggcagaagacagtgctgtatccttaaggtcagggacataggacacagacaaagccacagtggagtgagccagaggtgtatgaacatgcctatatgccagaggtagcattggtaacctaccatctctgacctgtctgcagaccctgctaatcatagctggggcccactgccacaacttttaaccttttgtcactcactcggggctgagaggcaaggactcggtggcagcccctggccttggctctgggacgctgagccaatgacagggctatccagtcagccagggttcagtgactggcagcagtgaccctgtagcatgcttatcagctgtctctttggtcacttgatcgtcctcagcatgaactagcccctggacacagcctcctgtgtcacagtcccctgaagaacccaaccagctcctcccgggagggtctcagtctctgcctgattttaagtcccatctgctcatgcattggatctacatgctggcaatggtgttgctcagggttagagagacttggggtcttcagagttgtaaaggctctgggcacatcgcttggagttgggaaagagattgggtagaaggtattgcttgaggctgttggagcaggggcagagtcgctagccttgtcttggggtgatgagagtgacttctcatttcgcataccacaggtgaagacacgcttgctcatagtggaaacctgagccagtctgggagtttgaactgggcatctgctgtgtgtgtgtgtgggggggggatctagaatctcggctggcgtgaaggtcaggctcagggtagcccccagggacagcgtcagccagctccaaatgtctgtctctgcagccacttatagtgtgtgagccctaccaccctcctgactggggtacttgagttgaagggagccacctccccagtaccagtttgcatatctgtaaaaagagtatagcgcccatgagcacagaacggttgcagggacagagcggcagctgcgtagtacgccggccaccatcattgtcactgtcatatgggtcactgacattgccatcatgtgtacttataaccatcaaatgcaattgttaccccttgccctcacactcactcaccgctctcccacagtgatgaacggcagcagccactcacccacggccatccacggtgccccatctacacccaatggcttcagcaacggcccagccacctcatccacggcctcgctctccacacagcacctgcccccggcgtgcggggcacggcagctcagcaagcttaagcgtttcctcaccaccctacagcagtttggcagtgacatctcacctgagatcggggagcgcgtgcgcacactggtgctgggcctggtggtgagtctatgggctatcaggcgcccctgttccccatgacagcttctgccgcaagctccattgcgatggccacaaccccatcgtgctctgcccagccctcaagccagatctggaacctcctcctcctcctcctccccctnnnnnnnnnnnnnnnnnnnngcgagagcgcgcacacacggcgggcgagggaagtcgaagggtggagtggaaagaaaaagtggcggcgtgaggcgtcggagagcctcaaggagccgcgggagaaacagggcgattatgccgtggagcaggtagccaggggatattcagtttgcgtgtgggtgggttccggcgcaggtggaacccagggcctgagtgttgcacgatgggtctcggggggcgagcggggtgagagtccttggagaggggtgtagagggcgcggggcgttcaggaggcgtcgcggtgaaaggcggaagcccggttggtgggcgtggagtctgcccgccgggtgtagggcccagaacccgccaggcggagtagtggagaggggttgtggtacggacggcgcctaggaaggagaggggagcccctgtgcctcgaggacaaagggtagcgttacacggtcgtccccttgcgccctgtgggaccgaggtttccaaaaagcctgcttggatacaatcatgaatggtggtcctccatgtcagcggggggcacgccccccctgcttcatctggcggaacacacccggttacgtgtcgggagtcacccatccctccctggttgggtgaaggctccctttcccgtcggggggcccgcacggggggcggggggggagggaggagggcgcgaggagggggggaggagcagagagaaggaggagtaaggggagggggcgggggaggtggagagaggaggaaggggcaggagggaggggagggggggtcctcctcctcctccccctcctccccaaggtgtgggtggggcatctgggtcagtaatgcatgggaacctttagatggggcggtcggtctctctgcagaactcaactctgacgatcgaagagtttcatgccaagctccaggaagccaccaactttccactgaggccgtttgttatcccttttctgaaggtaagcgaaagcagcaccttccaggcaacagggatggtgtacacaaaggccctgggaaagaagtgtatacaaagctgctttgtaatggctggaatccagtgtgggaaatgggtgtgcagaggatgaagaacaggtgatggacaggcaggtgtgtgcctggaccgcagggtgacagaagatgctgtgccaaatgcagactggggcctcacaaacgacggtgatgccgtactaggtccctttggcagagcaaccagagcctctgagcaaggcaggttcctcagcccagcccacaccctcgggatgaggagccatgtttgtttatgagggttgcatggtgttttggttggtttgggttctgtgggctctttcggtttggtttggtttttgaaagcactgagggctgaacatagtctcgtccccgctaggcaggtgtcctgctgctgagctgtggctctcgccctttttaaatcttgaggctgggtctcactaagttccccagggctggccttgaactctgtcctcctgcctcggcctccagcaattggggttgcaagtgtgcactaccaggcttactgagaagcttgtgagccagatcctcacgttggggttgtgactcactgcagctctccactctgagaggagagagggtggcgtgcttccaaatgtgtttgcccacgtgattactttccgctcagacctctcagggagatgctagctcgctcacccctgagggcacccacctccacttacaccagagccctggctcatttggtcctgcatacctgtgctctgcttcagtcaaagttcaaggtcaggccgtataaaggatgagtgctgagatgcgagcccccacggagctacctagtcactgggctggctcctctcctctgtactcagcccctgaggctggagtcctccattctcacagagcagctacctcagtgagtttttaaactgcccaatgtagaccaagaatggattataaggctctctgcacagatgccctgttgacccatgagagggagaaacagccctgatgctgtcaagttaataggcaggaaaactgaagccttcactgtcccagctggtagagatccaaggccaggttcaagctcgggtctgtacagttcagagtccccacaacattcacagtacatgccccaccagccgcaccccctctggcagctgacagggggaccccacatgacacccatatccactctcctcctccctccctcccacccacaccttgctaggctcacactggagctagtgacaacagagaagctgcgggtgccagcgcgtaggcccacctggcagtcattttggtgtgcgttggaggccccgttctcctcaccctccgcacactgccgactctgccgccgcctgtctttgggatgccatacgcctgcttactttgtcagagccgatgtttgcaacagatgctccgtagcattagccgccccgtctgtgcctggaatatctcagctttcatttcctgtggtccttacccacagtccccttcctacctaaccaagtgcaggatcacctaactaggtgggacaccttgctgggcactgcctcctcaagggacctcctccgtttcatttctctatgcccacattggctttttggggaccagcctgtgtcatagctcacccaggacctctgcggctcgttgttaggaacactgggtggtatgtctgcctccatgatatggagctcctggggtggaagggccaaaggtcaaacctaaaaatacaagatcccagccagtacctctgaccttgttgccaagacaccaaccaaccagagcccactctgtcctgtcaaagaggcatggttactttgccggtacagcggggcccagcctcaaaggtcttgaaacagacagacaagccagaggaagggctcaggcagctccaggtgcctcccctgccctcacagggtggggtcccctcttggcagggcagagagttaccacagcaccttcctgaatagttatggacatcctagcctctacagtgcttcccatggctgcccctggagacggctgggcagggtgtggctgcgcagagcctggctccaatggcagggccctctagggtcctttcctaagcaagataaagctgtcagccacacaggtgataggcaacgctaggttaattcacatggggctcactggagtctatcacaccagagctctggtctgctgatgggtcaagagggcttgtatgatcatcccaagaccacacgactcctcggtagcccagccagggtgaagcgcacccaatctcattcagcagcttgtggtggagagactctgtaaagcaaagggaagtgtcacaaaaactcaggactctgctgtcaccttggtggttctagatgtatgctgtgtcttttaccagagtcccatccaggacaaagatggtttagattttttttttttctgggcatcaaaatctccacgccaagtgaagttggggcccagaccaccctgtgaccagcttgggtgtgtcctctgaataatgcctgggacttctgaaaaagagtggggacttgttctttctggaagagaagtggtcctggatccccagccaagggctgccatgtatctggactgtatggcagggctacctgatcctaggtcccctccactctgccccacatccacctccatgtagctggacagtggagctttacagaagccaccccacccgaggctctagctcccagctggccccagctggccaggaccccagatgttcccccacccgaacagcaaccagatggtgctcatgcccaacccccaccccaccatgctggccaaggagagggtgggggactggtgagggaggagactctggaccactgagacctcccaggacctcatcccagcccatgcttctgacgtggtcggcagatggtgggctggcccctgttcagctatccaaacagaaaaacaggcctggcaaccataccgctcaacaaaaaaaagtaccggctgcctgatgggccgggtggatgcgccaacggaggctgaggaggcggaggctggagaaggctgccctggcagctttgaaacgcatgggaaagttttagattgtgtttatttacaaatacttagaactgctggctctcccaagagcctgccactgggcccctgtccagcatgctgaaggccagcctgctactctacccgcagcagttctgaaaaggctgaccaccagcagtgcatgcctggagacctttgcccagcactggggagaagctcacagacatggagtccatgagctccagtggcttcatctgcagattgcagaatctagaagtgatgtcatggctgaggcgcgggttcacggaggtcatattccttatgtgccgatgtcccaggttccagctgtgagctttgtttagggctgagactggaaagtgagagatagtggggagaggagctgggtctgtggggcttctggccagtgcatggcgggggaagagggggctagagcaaagaccctgtagcagcacagcaccttattgacatccctatcccactcctctccctccccctccctccccctcttatgcacacgtgtatattaggttgcctgccccctcttaaccttgctttctttctccatgacaacaatgctatggaacctgcataaacggggtacaggtagggagtattggctgcagacagcactctaggaggtgaagtccctacatcgctgtgtgtccagcagatctcaggcctgtcacttcccactgtgctgttggaaggcaaaagggacctaagggacccagagcagccctgagtcacacgcaagcagttctgggctgtctgctacgaacaggctacgtgggtttgcaccccagctgtcagtcagccgtgcctaaaacccctgtcctgcctgcccgcaggctaatcttccactgctgcagcgtgagctcctgcactgtgcccgcctggccaaacagacacctgcccagtacctggcccagcacgaacagctgctgctggacgccagcgccacctcccctgtcgactcgtctgagctcctgctggaagtcaacgagaacggcaaaaggagaacacctgacaggtgccagcctctcacaaacccacaggacgggaggtgacccatggtggcctcttcctgcccgcccatctgcccctactgcagctctgccagacagctggcccggtctgttgtctgtagcgggctgatcgagcgctgctaaccccgctgtgtgctgcagggacaggctggcgtgtgggccacactgggttctacaagcatatgcagctcatttagctatggaccccaggggcctctgggatccctggaggacagcagctcagggaggggactgtccaccagagttcacttttctccgtgctgtctgtaaaccctgagtgacctggaacctaaggcctatctatggtagctggactggtctggaccccttgacaggccatagagatactggtcctactactatatcgcagtggggaccacacctggccatgggaccctgggtgtctccctctgtccattcttcaccaggagccccagaggaggtcagagcgggggaccagaacccagtgtgtgtgtgtgtgggggggtgttcctctgattttctacctctgccctgtctgtctctcctcccctccattattatcctctatccaagactgaggctgatgtccattggtcacctattttcttggtcaggaccaaagagaatggatcagaccgggaccctctgcaccccgaccacctcagtaagcggtcctgcaccctgagccccgcccagcgctgcagccccagcaatgggctgccccacccgacgccacccccacccccgcactatcgcctggaggacatggccatggcccaccatttccgggactcctaccgccatcctgatccccgagagctacgggaacgccaccggcccctgggtaagcggtgtgagagggccgtcaaccgcttgaggtctgaacacatagtctggaacctgtgtgtctgtgagtttgtgcccatgtttacgcctgcgtgtgctggtgtcggaaagagtccgcatgcatttatttaggggttcagtcagcacctgcttgtacctatgctctagtggaggacactgaagctgccagcagcacctcagctgtccagtaaggaaatgggtataaggagccagcagccaccccagcgcccatgtagcctgacttgcccctccagagacaagtcgccactcctcacacactgaataacaccacagtagaggaccctaatccttgggatacactcctgccctgggcagcatgaggccacggtagctgagggtaagattaccagcagggctgccttttttcctcgaattcagaagtgaccctcaagtgggccatgtgacctccctgtgcctcagtttctttctttgtcagaacagagattatgtgaggataggttattgatagagcacctgacacacactctaccccaaggcccagccaccgatgacaaggacagcagctgacacagaacacatgccactcatcttgcacgctgtcatttcccagtctgtacccacacctcaaaggaaaccgaagtccaaggagtatgagtggggcagccatgggtgggcacagcgacactctgcggaaacccagagatggccgtccctgccacaccctggtgtgttggaacgtaatgttagaaatgaccatccagggtcactcagaatgccaatagggtcccagagcagggtcaacagaggcctttccctgcccccacaccatggaagcttccagggcttggtcctaggcagcaggtgacagtgtctggctcaccacagccgggtcaggcaggtgctaattcccacccgcttctgctaatgcaaaaataaacgccagctgtcgcacagatctcagcctctattttagtttgggcgttggcacaggcccctcgtgggcagccagagagggtgctggatgacggctgtggccactccccgcccttctgcaactcagggaggcatttcaggttagggtagcaggaggtcctaaggcgctgatggctgcttaaaagagaggttttgcctccccccaccccccaggaagtctggattgctgccaggtcacctgcacagcctcagttaggacactgggagcatttgacattgcagggaaaccaagacagggccatcatgttcctcacgccccagccagtggcaccccacaccccgccacaccccatttggtcattcccgatccagattcagactccttacacccaacaccgcctctccactttctgcctggtaactgtgggcacacccctcaagtttatcaggtcagcttggggcttttctttctaactacttatgatgcaagaactaggcagggttgggaaactgaggcagggagtggcaacataagggccccaggatcccacggagaatgaaccatcctggattactgctttgatcctgctgcaggtagatctgatcccaagattgaacttggggggggggggtaaacacccaggtcagagttcagcctgggacacagaggtaaacacaacacgccatttttcttcatggagctgacagtctgggagcagggatagtagagtaaacagggagatcttgtacctagagaccagacacacacacacacacacacacacacacacacacacggcctgaggaattccaaagactacagctgtggaggggcccctcgggcctggactttgaggaatgcataggagtgcagttatctgaaaggaagtcataaacacacctaagttaagcagctgcccagaggcctggaggtttctggaccgtgataagagaaacctttaaagtgagttcatctagagctgcctatcagaaatgggcgaagcgagaagagctgggttagcaggttaccgggaggcagtgagtcatgaggcacaacagaggtggcctggtttagattcccgacgcccctggtgtaggaagtaggaggcacctgggagtaggggcagggcctgagatccaagtcagggcttagtcatccgcatgggggcctaactgtgtgtggccttttctacagccatacctgggtctcgacaagaagaagtgattgatcacaggctcacagaacgcgagtgggcagaagaatggaagcacctcaacagtgtgagtgcccaggtggggctgccacgcccgtgtgactccctgaacatctgcacaaggctggggtggggagatccacgctgagattgcgctcctctgggttggttcagcatctcctggtaggacccaccggcatgcccactggctgcccgcccttttatgtgagggtcattatccactgttggcctgtcaggatgctgccaaagagccatgcacactggctcttcctcctctaccatctcctgctcagacacttgcagagtcaagccccagtgatgtaggacatctttgtgcctgagcccctggtcaggccaggtggacctccactcccctggccctcatgcacctttcttggcaatgagagttttgaaggaaacagcccaagccccttccacccctaccatgcatccaaagaagattccattcaagttgggtgcccacaggcactgggagtcatttcactgtttgtggggagccaaggtatagatttctgtgccccgccttcagggacgttgagctggctccctgaccaccccctccatattggatggccacatctggccacagccccggttccaacgtcctgaaggccctgccacccgcccgcagcttctgaactgcatcatggacatggtggagaagacccggcgatccctcaccgtcctgcgccggtgtcaggaggccgaccgtgaggaactcaaccactggatccggtgctacagtgactctgaggaggggaagaagggccctacccccatctctgcccggtccctcaacagctgcagtggccctgaggggtctcagctaggtgtgtaccaagcaagaacatggaggacctgtagcgagaggttgctagccctatacagtctctgtaggatgccactaattctccagaaagctagccaacactcggtccttacttaaacaggaagcctcacttggaaaggggggcctttcccatggcataaagatgtgcctggcctgctagggagcctggacctcccagattctggtaggtacaggccaggcttaggaggaggcacccaagggcttctatttacccatccaccacagcggtgcctacggagatgggggtgaggtggtccgggacatgcccagatcccagcgtgaatccatgttcactgtctataagagtatgccactcaaatccctccattctcctggtagcatgtgaagccctctttcccaagaggaaagatacttcttgccttcaaaccctggccagagaggaagggaatccagtgtggaggaaggcaactgatgaccccaccttgtgtgtgacactgtaccctgcccccttattccagatgttcaccgggacttcacgcccaggaccctgtctggctacatgcctgaagagatctggaggaaggctggtgagtaaagacagaccctggaaacaaccgctaaaaagtgtccgtgtctgccgggcatggtggcacacgcctttaatcccagcactcgggaggcagaggcaggcagatttctgagttcaaggccagcctggtctacaaagtgagttccaggacagccagggctacacagagaaaccctgtcttgaaaaacaaacaaacaaaaagaagtgtctgtgtctccacagatggtctccacacgaggcaagtttgggatttacacattgggtcacacataggggtatatacaaaatgcatgtgtgtgcacacatgcacacacacagacacacacagaaagagagagagagagagaatatgaatcaggtatttacagccagggttcacatagtgtacctctgtttccctatggataggtctaagccgacctgttgttttcaaagcaggtccctcacagcattgacttgcctgaagcctgttagaacagaatcctggacactaccagaacctgctagaccatactgtgggtaggacctggccctcactcactgaagatgtacaccagagtaagaaccatgacgctggcaggtagagctttggaagtttacccatggctctgttccttgtgaccagggttgcacacatgtgcccaggactcacacattcacccacatacatacctttcagctaacgagtggagtcattgacttgtgcctttgtgtgcacacacgcaatgtatggtcggcatgtgtgcacacaactgcacttaggcgcctgcccgagttgtgagcgtagagggtccagaaccccaggggagccagcctgggtgactgccatcctacgtttgtgctttacagaagaagctgtgaatgaggtgaagcgccaggccatgtcagaactacagaaagctgtgtctgatgcggagcgcaaagcccatgaactcatcaccacagagcgtgccaagatggaacgagccctggcggaggccaagcgacaggcctcggaggatgccctgactgtcatcaaccagcaagaggactccagcgaggtagggccaccagcctccaggtgcactgcagtctgtgggctgaccgaacaccacacttgtacaacctccaggtctcatgaactctctgctctcagtggccatggctgtctctggtgccacaagaaaacctgcagcctgttcagctctgtcagtaaagagagagagagagagagagagagggagagagagagagagagagagagagagaaacacatgaggcctggtaggtgtccctcaggccttcccaacctgcaggagcagtagctaaaggtccagagaataaaggattatctggggtctgacacattccactgagctccattccactgaagcctgttgatgtcaaaccctctgttccttaacttgtgaaagcaagaggtttcagagagcagggcattggtggtgcatcctttagtcccagcacttgggaggcagaggcaggcagatttctgatttcgaggccagcctagtctacagagtgagttccaggacagccagggctatacagagaaaccctgtctcaaaaaacaaaacaaaacaaaacaaaacaaaacaacaacaacaacaacaacaacaacaaaaaaagaggtttaggagccttttcaggaccccaggggtctgcctcggcttctagcatgcaggtagaatgtccaatgaccaggaagaagaaagccaggagagctggccttgtgtgcccagatgtctgagcactgtgctcccttcagcagggtgggtgaaggaacactttctgaagcttagttggcaggacatcagaggaaaaggaaagaccactctgggcaagtcattcataggatgccctttaagtgagttcaaatcccagcaaccacatggtggcttacaaccatccgtaatgagatctgacgccctcttctggagtgtctgaagacagctacagtgtacttacatataataaataaataaatcttaaaaaaaaaaaaaaaaagaagggccaggtctcgacactggagagacaaagccaggtagaccttggggcccactggtccaccatattagaccagttggttagccaatgagagaccctgtcttaaaataaggttgaaagtgctcaggaataatatcagctattgtcttcaggcctccacatgcatatatttatatatttatatgcacatacacacacacacatatatatatattaatattatatcttcacacactcatgtgcacatgcacacaaacatacatgatctcgggatctcagctgtcaagagatgggcagagccgaccagggtgttgggtatttggaagtgaggatagtactagatctgacagccgaacatacctggggaaggggcgaaaagaactctcctagtggagaggccagcaaggcctcgtgagtggagcaggaaagctggtgagggttgaggcctgagactttagaagccaaatagagacaagaagtgggctaaccacccagctccacagccctgccaccttccagggatctccagccactacaatccaccccttgtcaacttgacacaaataatatctcatgttcacatgaaacaataacaaggttgtgaatacgcctaacatgatataactatccctcgtacaatcgcaaacgcatttgtaaatttacaatggggcattcatattactttataatcctcgtttctgcaactggttacgtggccttaattggtatttataactaccttcctctactacccattctgtatttccttctccttcagccagcacctcagcaggtcttggctcttttcctggaggattgacccataccttcattcctgatgggtctgcgtcctttgtcatcctgcttggattaggctgttgtagtttcccattgactttaatcacaggacatgctagtactaagagacgcccaaagggatctcctacactccagacataatcttgcttaccaccattgtgaagaggtaatccaatttccccatggtaatctggatctatcacccctcctaacactgttattccttttttagcctgttggtttaagggcattagaagcccaaaatgaccagggggaagtctgagcttccagttcaatggaatgttgtagctcctggtaggaggaggaatagtcagaaaagagaattctggtccatagccacctctcctcccaaagggactgcttggcagctgggggaagatgcatagctctcctctgcaaaacacacacacacacacacacacacacacacacacacacacacacacacacactccttctcatcagtgggcaggttatctgggcacatggggtctgtcctattctgactgtctcctttgccctcctccacatccagagctgctggaactgcgggcgcaaggccagcgagacgtgcagtggctgtaacgccgcccgctactgtgggtccttctgtcagcacaaagactgggagaaacaccatcacgtgtgcggccagagtctgcagggccccgcagctgcagtggctgacccactacctggacagcctgacgccactgccagccccagcgaagccggctcggcagggccctctcgtccctgctctccggggccgccaggcccgctggacgctgctgtgccccgctgacctccagatctgacacccagcccatggacgccatgccctgccaacctcccggccccaccgtggcccaccagttgcctggagccattgctgctactgcttctctccaaaagaaaacacagatccaacagaactgcatccgtgcagccccagctacctgacaaggtctgccgggacctctacagcctctcgtccatcgcaagcaccctcagaaagcattgcagagcgtcagacagtggcaccagcaggagtgtggccagctccgccgctgtctgtcccctctgtgtccgtctctctgtgtccgtctgtctttctgcgtctgcctctctctgtgtgtctctccgtgtctttgtctcctgccgtttccctgactctccggcgtctctgtctttgtaaagtccacatgatctctctgtcatcagagaaacctagttggtagcttttcttttccatgaagaacttttggagattttgttttgttttgttggcaaacaagctacttagaaatggacaaagaagactgtggggttctccccattcctcatgagtaagggaagaaactgtgatttttctatccagagttgctgtatcgcccagccagccccaggggcatcagcgagcacacagcagagataatgagagcaactgcaatttccaacttaagaagcagcttttgtttcaggttttactcctttaatgtcaaactctttggctttaagtgaaaaaaaaaaaaaggaaaaaaaaatccaaaaagtttttttttttttaagcaaaagaaacacacctgtaaactaccttgccagctagccagccaaggatgccagacacacctcgctccaaaggaagcccaaaaaagcaaactcaagaaattgaaatccaaaatttatttttatcactgccaaagtattttcttcatggtctctccgccctgggttggtttgcatgtcagtctttgatttgggttttgattttgttcagggggtgttgggatgctgggatttggtgggtggggccaagaagaaaccttttgttcctttttgactagtaggcagcatccttgctgggcagagccatcggcagcaaggccacgtgaccctcagcaccgcatccagaagccccagtcagcgtgagcctgagcgttgtgtgccctagggctccgtccatgcgttccctacatgcaagggaggcacctccttccatcggtccccacaccttcctgggacttctcataagtcatttccacttgtgaaaaaaaaaaaagtgctaaagtgctcttcccagagagagcacacttcctaaacgaaactgtgacaatctttttggttgattcttgactgcttttgagagcataaggagacagcaaatcacgctttctcagttttccctcctctacctctctgctcttccatcccaccctacctccatctcggccccatcaccctgcccccagtgtcttgctgtggctaccctcatttctttcaaacttttacagaaaaaaaggaaaaagaaaaaaaaaaaacacgaaagccagcagccacccgcacctcacccggaagactccagcccggctgtacatatccctgtgttgtatccccaatgttggtctccagtcctgggggtgacggtgatgcttgcccatctacactctagcccctgcccaccctgcccttcgcccgctcgactccctcaaggattcaaggaggaaatgaaggaagaaggctcatgcctgtaccaaacaaaaagagacagcagactcagtccaggtctgcacctctgttgtggctgcagcaagccgcaggcctagcgtgcaatatgggggattgctcctgaaccctgggcccgggggggccctgcccagagcaaggtgtgcagcgtgtgttaatgtgaatgtacatagtctccacagaggtcccaaaccgtggcatcagtaccgaggagatgtttgccaaataaaaagaaattaagacaaaccacggaagtctgtgaggtttaggaaacgctttggaaggagtctgagtcctataggcttctttggtggctggtgtttcttcacagctgtatgaccattgtttaacagaacgttctatggattctgttgggtagcccggaatggagcctgacagcaacccttgctcggaaggctggggtagatctcattccctggaaggttcccgcggccgcagccctccaaggccgcagagatgtattcttgtgggtttcagagaagccaggacacaaggcggcctcctgcctgcccgcccttctctagtggaccagtcctcctgagcgtctgcctgcaaacactgagtctgtgtgctggtagagcgagacctgcctcccgtcgcaaggagcatcactggattccattcccagctgtaccccatgcggtacttcttgtctctgctactccactgcatgcagcaaccttggcccttccagaaaggcaggccagtgaccactggtaggaaagagctctgggtgatggggtggtgagcaccatgttttggggggggtcagagcgggccaggagtcctgaggtggcattcctgatgacctacgtccctggtgtcaggacttcggagcacctgctcctatgtggtccagatattctgaggtaggtcccaaagggtcaccagtttgctttagttcaaatacctcctttcttacccttaccagccttacccaccttttaggaacagagggcccaccacagacaacaaaatgctgcccagccaaattcatctccatgagccaggttacatatttagggtttagcagagacaccacccccccatctatactctagccgttgggagcgacagcccctcaaggcggctgtcagatggcattggaccacagtgagtctcctgtgcatgggatttgactagcaattgtagacatcgagggtgagatgccatgtctgctaggcagagctcaggagtcaaggcaagtgcagaatcagggtggcagggagatggggctggaaagggttaggtgtcgcctgaggcaaggaggctggaggataaggtggggttgctaagccgggcaccgaggccctggctaagctgtgagttgtgctttgaccccagctacccagagacctcacagcacaaccagacaacctcacagctttgaagggacagggaccatgggtgttctttattgggaggtataccctgggtggccataaccgcagcctacccttggtttcaacctacagtctgcctggggctctccacagagctgggggcggggcatggtactccatccccatccctgctacctttctctggttcacacaccatggacccaggccctgcctcctgggaaccacagccaagcatgaaccaaaccccctaggcgatgtggctctcacagagccttgctcccccagagcctccaactcagaataccactttacttcctgttctgtggccaaagctaaaccaggaaggctgagtagggagggcaggtagcaggcagagctctccaacccccaaggcccagcccagatcccatctcatgaccttatggcttcttggcacaagtcctgtgtgtcccagccctgcctcagacccagactggcctttccgtgaggactacccaagagactactttccagctcagtcctaagctctgctcaggagcggaggccagtgtttctcctcccaggtgtggtcacagctggataggaactggctgaatgacaccacagctcaggtcccacccactgcctgacaagtgagaggagccagcccccaggggagcacccagaaggattcagttaacagggacatctgtcagaagacctgagagggttagctggggatggagaaggccaagaatgggaggcggggcctctgtgggcagtgtcaccttaaggccacagtgggcagggatcaggatgggacccaaagtttagtttctccaaataaatcattaggctgacaccaaagtatcatcccggcacccatctgtcctggcatccatctgtccactcttgtactcctcagcctaacggacagatcaacgctttcctgagctcctccttctgacacgtgcagccatcttcccatgaacccgtttgcctctgaccattcatcatcctctgcctcccttccagccaactacccccatctatctatcttgacccattggcaaatccatctttccacctgtccattgctccatccaaactgtctctccaccccaccatcccagcatactatacctacgcccttacaccttccagccccatgcacacaaccatgttccctatcatctctctattcactgtactcagagttctgtcagctccatcagtgtaccaaagacaccaggtcctcctacgccctctactctgcttggcctaaactgtccagggctgctctaggaatatctacccatgaggcaacaggcgtctcccacccctggcactctgccccaccatggtgttcagatacctccagaaatatgagttcttaccgtaggcatcgtgggcaggttggatacattcttgtggcagctgtgacacatctggagctgcttggggagagaagggaacaagaattgtgctgtggggtgggtctgtacgcctgctcacgagctctggaagcctgggttaggcagccacgttccctgaaattagggcaaagtccttgtttccaggagtctgtccagaagagagcaagccagggctggcctcccttgacaccggggtgctcttagtcccctgtgcccctggacttttgtgcaccattcccatcttctctgttaggatcccgaggagctcagagttggacctgtccggtctgcccctcctcaatccacggatggaaaggagtatttgctgggtgtttgggaccattcacaagtccccctgggaactccttgctcatcctgaagctcctactatgtagggaagcttctgaaatgaggctgggcagagacccctgggtacccatcatgctggcaagaggaagagaagatagggagagaagcctgaggcgagctgggctcagggggactgtctattcctggagacagctcacagataaagcccaggacagtcaaccaacaactcgcacaagtccccaaatcctagaaacctctgtcttgtgttctgttccttttccttccgttcagctggcccttagggtaccaagccagactgggagacaggaatgcagcatctgagtcaaagcatggcctgctcagcacatcctcctgctcccaacccagacaagaggcccaggagccctcagctcacaccatacctggggtgagcatagcatcacacagcctgcctggggagccactgcttctccccctacaggagctgggaggagagtactggatgttttgttcatgaaaagctgtgttccatgccctacacatctatctgggtgctgggtcccgccacccacctctatctactgctgtcctatatgtttgccctgtgggccacggatgtggcgatcaggttaattacatctgtgtaataaagtaagcatttgctacgacggctctgctgctcctccggatcactgcgcacaccggatcactgtgttcaaagacctgatgcacagacaagggtcaccgtggtgttcggttgtaccagagaagtcttggggtcatagaggagaggaacttcaggttcttgtgctgctgctagatccttggcaaatggggtccatcttggacaccccctccccccgccaaatgaaccttggacccctgagtttcaagggcctgacctatagcttacggctggggccaagttctttgagctgtccacacgagggagatggtgagacctggctgagaaaaacagcaaaggcttgaggggcactgagggcctggtggagacactgggtctgagggaacactgaagggacactcaaggcctgaggggtcactgagagcctcagagcggctcagcagaaagacccttctctccatctgctcctgtggcaactgtgtcctggctaaagagaaggctcctcttgaaccagacacccagccatagcgcttcaggctgcaccagtagctgcctggaggaagcgactgtcattagtactgtgaccggcttggaacatggtgtatttttgaaggcattgttgggaaggccagcatcggggtaagcctgtccctaggccaggcgcctggctggagccccactgggcctggcgtgtcagcgatctcaggatagcacagagaggagggtgacaaaatttttccactgcagacactgagctcaggggggagactggccagggagggcctgagccccatccagacggccttggcctgggaacggcccgccatgccctgccttccacatggaagtacaggaaaaatccaggccggaccccaagagagcttcatacaaagagatggagggcgtgcaggaggacatccgtggccgcttgtctatccctgtccagtccatcctgtatggccagcttgttctcagtatagatgtggatgctgcccctgagcagctctggttggccaggaaagacctagggaagaaactgaagcagggctggggagagcccagtgccactcagtcactacatctcaggtcatgtgactagtctctactcagactacattatctcaggtcatgtgactattccacagagtctccttcttttatgaggcatggaacccacaccagtttttattactagtgagttgttttcgacagtacctcactttggatcccaagccggccttgaacttgtgatcttcctgccccagtactgagtataagtatgagccatcacatgaagcgtgatacagctttcagccactttgaagaattaaacggtacatgaggagtcaggctagggtcagaagcacacagtttcttagggctgcaccagccacagctgctcccgcctcggcctcccaacccctctgccaatcccaggatgtgggggtggcagccaccagactccacttacaatatagctaaactaatcccatctcctacctgagccagattctcagagagaccctattgccgagcctggggacagggtcacagaagacatgaggctatggagtcaccagaaattccctgtggagacctcttagggtcatgttaacacacacagctgactcagaggctcagcagggtagcctcaagaatcatcggtacccgtgtctagccaaaagccagcaatatgtttctagatccgcccctctgctggaagccccagtaaggagtcaatggatgtaggctggcaggcagcagtcctgggaggtgagggcagaggggcaacagatgaacagggctgggaactgatgtacccgcctacagcctacaccgccaagtagatgtcacccaggttgtacagctcagcctgagccttccttgtggcaacaagaaccatctaactagtgcctggctataatagactcccacctaggcctgaactcttagccctcgggggtgggggtgggggtgaagggggtcgggggaaggggtggcttgctcaaactgacccaatgtatcctgacatgcacagtgccacctctccctgaaatctgtccttttcataggacaattaggtagcttgaacaagatccgattatcagttaggttctattgtcagagctgtggtcagggcacgcggcatatccaggtgacaggcagactccaggaagctcacagcgtagccatggtcatgtgagtccctgcccaccccgctttgggctctcatccaccctcccctgagtgtttcagggatgcagctggtgaagaagacaggagatattcaacctttgacccctctggtcagtagcctagcccaagctgggaggccttcttaatctttagggctttagtgaaagcagctggtcagggggagcacttaaaagggagggccacggggtagatgcagctgcagaggtaagcagacccagagaggcaaggctccccaggtctgccctcctcgcctacctcacctaccgatggagccttacctgagcaatgagctcttcccaccccccactgaagcctggctccagacggtctcctcagatcctgaggcccaaggttggggggcctggggcaggactgaaaagacctccttggtgccaagggctgggagtagagcaggaagtgacaaggaagcagaggaaaatgaagatgcgagcttccttctctccctgctggaaccagagaacctggccaagtccccagtattcaaccaggtagcaccccgtcacaaaccgtgcaggaaggtgtggacctgggcatggagggaggagcacaggtgactaggggcgaaggagccagtgcttcagacctcagaggcctctctgactagggggaggtatccgggcaggagaggtaccaggggccttagctcctagtcctggactatggctacaggaacaacagggtgatcttggttatcccctagtagctatggctttctgccggcgctggctggccacacctgccctccattctagaggggcctgaaggccatctcaaacttactgtggcgtggccaacaggagttggaggccatcaagctgaaactgtgggccatggagcatgctgaagcccagccggagccaccctgtgtacagagaaaggccacagaggaagagagggctgaggtcagacagctgctgagccctgagaccgtaggtaggaacctgggactctcgccaaccctgtcctcagatggacaactgtccttctaaatccttgaccacttagctaagactctaaacccacctgtgttcagtggaagagtactcggcatgggctgcatatgaggacaattgagggaatactctgaatcgcacccacaatccacagtgtgaccgcgggagcctgggcgaccttccctgggggtcacgaggaatgggctcctcaatgaggtcctcccgctagttctgaggttctctctccctacagactgcttcttctctaggacctccaaggaaaatgtggaggctgaccacagatctgtctttgtaggcaatgtgagtagagaggggggtggcgtggtcatagccctcctagggtgtctgcccccaattagggcatttagctgggcagacccctccacgactggcctgggtggagctggctatgagtttgaggcaggaggctatggagttgtaaatgcaagtgtctccaaggccaaagtgggaggcctggtgcagagggaaggtaaaacccacggggccgaatagtgcccaggccttgactgttcattcaaccgaaggtgaggtcaagcattcaggtttaatgggccacatacccggcatgtgctaattcctgagacccaaccagctgtccacacaggaaacacttaactgtctctcagcactgaaccctgggcaggagtggatacaacttcagcccatgcccagccaggggccaaccaaccttggggggggggtccctccaacccctttctgccacaacgcctcagcaggagggagacggggatagcccagcacttataccaggtaccctttctgtgagcaggtggattatggtggctcagctgcagagctggaggcctacttcagtccctgtggggagattcaccgggtcactatcctgtgcgacaagttctctggacaccccaaggggtcagtgtcgggctatggcaggctgggtagtgtggatggggctggagctggcccctcactccttgctccaatgttcaccacctctgtcctcccccagctatgcatatatagagtttgcttcgcacagatctgtcaaggctgctgtggggctggatgagagcaccttccgaggtcgggtcatcaaggtatgtttccccaggggtctccatgcgcctgtgggccaccactgagccttgtgcaataactcacaaatcctccaccaggctcggagaggttagagtgcctgaccctttgtgcatcttagctgggtgggcattaatcagagttaggaagtgatgaaaactctcagacctagggtggggcttggcgtgggcggggcttggtgtgggcggggcctgccagaatgggccaggaagatgctggctattaccaggatgtcctgtgatcacatttgcatctgagaaaagttggagggattatttcagcctaagtgataccacaagtcaggagccccaagccctggtctcagcctgggccctggcttcaggccaccctggcaagaagggtacagaccagtgtcttggagtatgccatgggttccatccaggtacttcccaaaaggacgaacttcccaggcatcagctccacagaccgtggagggctgcggacacactcgggcagcagggctgccttcctgcacggtagcctccatcgaaaagctcggttaagagcccatggacggagccggtaagtgggcccgagtgggactctgagtctggagatctgagcagcaagattcttggagcctgacccttatgctggctgtagccaatctgcacagtgtcatgctaagggaagactattgtccctcacatgagccttaaaggttggggcacttggcaagggaccgagggggaggcctcgtggcttccagcagcctgtgcaggctctgtgtaagcttgctccctgcctggtggggctacttgttcctgggcactaggactctgcaggcgacaagcagcctcctctggcctgaagcataggctaactagtataaagaaggctgcagttgagcccatgtgacaaatt

SEQ ID NO: 360 - DNA, 2668 bp, Mus musculus
cagaaaaggtgcttcagggtgggctctggaggccggccagctccctccagccccaggtaccatcaatctccggctccatctgcagctccatgtcccaggcatccaccaccactctggagagtggggcactcctctcgggaccccggggtcttcagaatggaagcccagctcacaggaaggagaaggctgcagcaatgccagactccccggctgaagtgaagacgcagccccggtccacaccccccagcatgccgcccccacctcccacctcatcccagggagccacacgaccaccctccttcacacctcacacacatggcgaggatggacctgcgacgtctcttccccatggccgtttccacggctgcttaaagtggtccatggtctgtctcttgatgaacggcagcagccactcacccacggccatccacggtgccccatctacacccaatggcttcagcaacggcccagccacctcatccacggcctcgctctccacacagcacctgcccccggcgtgcggggcacggcagctcagcaagcttaagcgtttcctcaccaccctacagcagtttggcagtgacatctcacctgagatcggggagcgcgtgcgcacactggtgctgggcctggtgaactcaactctgacgatcgaagagtttcatgccaagctccaggaagccaccaactttccactgaggccgtttgttatcccttttctgaaggctaatcttccactgctgcagcgtgagctcctgcactgtgcccgcctggccaaacagacacctgcccagtacctggcccagcacgaacagctgctgctggacgccagcgccacctcccctgtcgactcgtctgagctcctgctggaagtcaacgagaacggcaaaaggagaacacctgacaggaccaaagagaatggatcagaccgggaccctctgcaccccgaccacctcagtaagcggtcctgcaccctgagccccgcccagcgctgcagccccagcaatgggctgccccacccgacgccacccccacccccgcactatcgcctggaggacatggccatggcccaccatttccgggactcctaccgccatcctgatccccgagagctacgggaacgccaccggcccctggccatacctgggtctcgacaagaagaagtgattgatcacaggctcacagaacgcgagtgggcagaagaatggaagcacctcaacagtcttctgaactgcatcatggacatggtggagaagacccggcgatccctcaccgtcctgcgccggtgtcaggaggccgaccgtgaggaactcaaccactggatccggtgctacagtgactctgaggaggggaagaagggccctacccccatctctgcccggtccctcaacagctgcagtggccctgaggggtctcagctagatgttcaccgggacttcacgcccaggaccctgtctggctacatgcctgaagagatctggaggaaggctgaagaagctgtgaatgaggtgaagcgccaggccatgtcagaactacagaaagctgtgtctgatgcggagcgcaaagcccatgaactcatcaccacagagcgtgccaagatggaacgagccctggcggaggccaagcgacaggcctcggaggatgccctgactgtcatcaaccagcaagaggactccagcgagagctgctggaactgcgggcgcaaggccagcgagacgtgcagtggctgtaacgccgcccgctactgtgggtccttctgtcagcacaaagactgggagaaacaccatcacgtgtgcggccagagtctgcagggccccgcagctgcagtggctgacccactacctggacagcctgacgccactgccagccccagcgaagccggctcggcagggccctctcgtccctgctctccggggccgccaggcccgctggacgctgctgtgccccgctgacctccagatctgacacccagcccatggacgccatgccctgccaacctcccggccccaccgtggcccaccagttgcctggagccattgctgctactgcttctctccaaaagaaaacacagatccaacagaactgcatccgtgcagccccagctacctgacaaggtctgccgggacctctacagcctctcgtccatcgcaagcaccctcagaaagcattgcagagcgtcagacagtggcaccagcaggagtgtggccagctccgccgctgtctgtcccctctgtgtccgtctctctgtgtccgtctgtctttctgcgtctgcctctctctgtgtgtctctccgtgtctttgtctcctgccgtttccctgactctccggcgtctctgtctttgtaaagtccacatgatctctctgtcatcagagaaacctagttggtagcttttcttttccatgaagaacttttggagattttgttttgttttgttggcaaacaagctacttagaaatggacaaagaagactgtggggttctccccattcctcatgagtaagggaagaaactgtgatttttctatccagagttgctgtatcgcccagccagccccaggggcatcagcgagcacacagcagagataatgagagcaactgcaatttccaacttaagaagcagcttttgtttcaggttttactcctttaatgtcaaactctttggctttaag

SEQ ID NO: 361 - protein, 641 aa, Mus musculus
EKVLQGGLWRPASSLQPQVPSISGSICSSMSQASTTTLESGALLSGPRGLQNGSPAHRKEKAAAMPDSPAEVKTQPRSTPPSMPPPPPTSSQGAWPSFTPHTHGEDGPATSLPHGRFHGCLKWSMVCLLMNGSSHSPTAIHGAPSTPNGFSNGPATSSTASLSTQHLPPACGARQLSKLKRFLTTLQQFGSDISPEIGERVRTLVLGLVNSTLTIEEFHAKLQEATNFPLRPFVIPFLKANLPLLQRELLHCARLAKQTPAQYLAQHEQLLLDASATSPVDSSELLLEVNENGKRRTPDRTKENGSDRDPLHPDHLSKRSCTLSPAQRCSPSNGLPHPTPPPPPHYRLEDMAMAHHFRDSYRHPDPRELRERHRPLAIPGSRQEEVIDHRLTEREWAEEWKHLNSLLNCIMDMVEKTRRSLTVLRRCQEADREELNHWIRCDSEEGKKGPTPISARSLNSCSGPEGSQLDVHRDFTPRTLSGYMPEEIWRKAEEAVNEVKRQAMSELQKAVSDAERKAHELITTERAKMERAEAKRQASEDALTVINQQEDSSESCWNCGRKASETCSGCNAARYCGSFCQHKDWEKHHHVCGQSLQGPAAAVADPLPGQPDATDSEAGSAGPSRPCSPGPPGPLDAAVPR

SEQ ID NO: 362 - DNA, 122336 bp, Homo sapiens
  misc_feature (1)...(122336): n = A,T,C or G
atatgtttaaacaaaaaaaaaaaaaagaaaaagaaaaagaaaaagctcatctccctggagctgacctagcgggagagacaggcagtaaacaacgttcagcacatcagagagtgccacctgctattcaagacaagcaaagcagggagggggctgcaaagcaggatgggggctgtggggctgtaggggggcaggcggatcttcacaagggggtcccagaggcgagggtctgagaggcccggggtgagccgtgggcagagttgggagtggagcgggctgtggctgggacagggggacaaggagcagacaagggccgagaccctcactcagagcagaccccacatcataccccccctgcagcacatgcctgagagaccccccggcttgtgggtttgctgagtcacccacagccttcctggggtttctgggtgtcccaggaccctcagatgccctgctacagaccccaaggccccttccccagggtccagcatccaaaccccctgggggctagcgagaaggaacttccaggaggagccgagtgagcagagggaagaaaggaagcacgactggagggctgaagcaggtccctggacatggtggggcagccggaaggcggttggaggccggacccctgcctgcagggccagcttgcctgggtgctgaatgataaacctcatgctgtgacagcaggaggcggctcaggggcccagcatggagccccctcccctgagctgcctgatggggggactcagcttggtggtcttccctgcccccacctctgagctgcccgatgtggggtttcagcctgacggtcttccctgcccccatttctcctccatgaccttcagctttctcccaagaagccctaccctctcgggccggccaggttggacccccttagacggataaggccaggttggacccccttagccgggtcaggcctgcaggcgacagccaggaaggggctggaccctggacccacccccacgccaagcaccacagacatgtgctccgagctcaggtggctggaactgccagggaggtcccagagcctcagggaagtccctccacccacccatggggagagacaaccgttgcaatgacagagtcacagtgctggctcaccctgtccccaagcagaccccggggcaacctcgtccctccagatcccctcggggacaatcggagcagacccaggacagccccaggtgccccacgcacagatcctgggtgggtgaggatttctgacaagctcccagggtcagggactgcgctctgagaaccctcggactcccctcccagacccctctcactttcctcggtgtctggagtcgggactgaacatgggcgcagggtcagggactgcgctctgagaacccctggactcccctgcccgacccctctcactttccgcggtgtctggagtcaggactgaacacgggcagagtgggaagggtgttttaggccagggcacccaaaggcgccttaaaagaatctgatgtttaaaatgtttcaagttcagtgaagcagagtgcttgatccacaagcctgtgttatatcctctaagcttgtgtgtgtctgaaaacaaggtcaatagaaacctaactattaaaaagccatgaggccgggtgcagtggctcatgcctgtcatcccagcactttgggaggctgagacaggagaatcgcttcagccacgagtttgagaccagcctgggcaacatagtgaggccccatctctacaaaacataaaaaattaaccaggcatggtggcgggcgcctctggtcccagctattcaagaggctgatgcaggagattcgcttgagcccagggggtggaggctgcggtgagccaagatcgcactgctgcactccagcctgggtgacagagcaagaccctgcctcagaaaaaataaataatggaagcaaaacacaaagtttttttcttattggatacaggccagtttgtcttccagttcagctctaagatacaataacagtgctgtgatcgtccatcacactcacaatcgcccaggacgcgaatggttagggtcctgcagcctcttcagggacgaagtccacgtttggagcaggtcaggctgcatggttcttaacccaagactcccagatccttccggatccttccgggtgcctggaatatccttgggcctcttggccagacctagctgggtcttccgtggccccaggccccactgcagcccgaagtagccactggtgggaggcaggagcttggcactgcttgggggaggtgtctatgacgcaggaggtggcaccctggctctggagggcgggcggctgcctctccccacgcaccacgcgccacgcgccacacacacagaaccacacaccagcctcttggtattttcctcatgttggatgccgctcgatggcccaggtttacccagttcccaggctccgggctgagaacagaatgttccagaatgttctagaacattggtgggtaggccagggccacgttcttccctcttaagctgctgtgaacacccaggcaggacggaggggaggagaggaagagcacagggcaggggttccctcgttcattccttctgctgcacacacaccaccccccgtcggcagagccgtggactcgcggactcacaggagatgagatgagggcaggtcaccggtgtggggcctgcggactagacatggcaccagcacaggggcagccgcctcagcctgagtcagagggaaaccggggcggcaccggcacgtcgcagccctcaccccgcctgggctccttacagggaaagtggcctccggacggggcttccccctttgcagctggggtgcagcagcccaggaccctgggacccccagggaggctgggactttcccctctgggagcctcggtttcctgttctgcagaacgggcagccttgccgggtcttgatgcctcctgggcgctggggaggagcagagaccacggtgggcagagggctccgtgtcctggaagctgggtgggtgtagccacagcaggctctctgcctcagggagaggactggcttagacccagcctgagtcccaaatcccaccgctggtgacctgggaaattgcttaacctctccagtcctgtcagacaccgaatatatgccaccaggtcaccagcgtcccccgcaagtccagggtgctcaggaagcgggggcgacgctgttgctgccctgatgctcaaattcctgtctctgttcagactccaccctgctgggctcagccccatgcgcttcaggaggggaggaggatgccagccaagggaacagcgggtcctgtggggctgtggcctctgactgccgtcagctctctgtcccacacccactacccgcctggggtggctgatgagctggggaaggccctcctgtccgggcaaaggccactgagccccctaggccttgggggctgccccagggtcccaaggctgcgctgggcggccgggcctggagtctcagcccatcctgctcttcggaagcagctggggagaccggccatttcctctgtgttccctgggatgtgtgtggggcagagccccaggggagtcctgagggcgagagaggtggaattcagcctagagaagttccaggtgtcgtgtgggggacccagaggtgggtgtgccaaactccgccagccagtcatcacccatggagccctgcgccttgtgccgggaacacagcccttggagacaggcaaggttcccgcccagggctgctttcctgtgggtccaaggaaaccagcccacagcaactgcaacccaaggtgctaatgctgtgatggaggcgtgcagggggcatggagcccaggaaggtgtgaagggggtgtggaacccaggaaggtgtgcagggggtgtggagcccaggacaggacagggcacttcctatgggctctgagggctgggtaggagcccgccacgtgaggcaagtttcgatgggagggctggggaaggcccagagatgaggaaacaccctcaggagaagcggctctgatgtagggttggggcagagtgtggaggggcccccagccaccttcagggtctggccttgatcttgagggaggtgggcagccactgaaggtttaagaggaggggcggggcagccacatcacaattgaagcaggtctcttgccatgggggcgggagggctgtgggggaggaggctgtgggggaggaggctgtggctgactccagggggcggcggtggggctgggagagccctttctcccttccaaagcactcttccggagaggggccgcatctgcagggatgccgacctgagctcaatttaggaagagctttctagcagcaacgcgcctgccccggaggcggccatggccagaaggcggtgtggggattccactgtccccctgggctggccccttcacggctcagggatctcgcaggggtcacagctgcccgtccgtgcttgcccaccttcacgggcaccataggagagtccaaacgtggacggttttattaaatcctcaccacacccccattcagctgactctgttaccttcttactttacagttggggaaacgggtcaagacatttgcccaagcgtacccagcacagacaggaaatgctgagtgtgaaccaggggcctgtgacttcgagaccctcagtggggttccggctgtcccaccggagactcctggaagctgaggtggtgagcgggaccgggggacaccttcgagggaagctggaaccgcggttctttccttggaattcaggggatccgtggacttggatgagtttcatctggcattgtgtcgtgtctctaaccaaaatttagcctttcctgtaaccaagaacgtgggcacctccccagggtgtcagccgcgcctgtgccgttgacaccgatagagctgccccagggccactttggtgggccccaagcagccacgccttgggagggtccagggctccacaaaagacccccctcgccttccactcaccaccacgtctcctaatgcggttcccacgcctcaccactttaaatcatggcttaatgaaaagcacagtgctcactacaccagaatgttctaacggggtggtagctgtattttggtaaaatgggtttccttcataattctgtgaacttatttgcttactagatgcccaaggagtccacacaccgggaaggtgaagaccccgattccagttccgtgctctcattggggtgtctccggcctgcgcctcggctcggactccccaggtagacctgctctttctgggggtggcaggagcgcccagtaactgcagtctcagagccctggaatcctgcaccactttgtaccaggtttccccaaatcaccccagccctccggccatggcaccttctccgtggttctgggtttgctcagccgtgccctgagctggggagtggctgagcatccagctatgagccgcttcacctgcactgccttgaacacccggggcaggttttttcctgcctccacccccggcccccactccctctgtggctcaccccaactgtccacaccttattcaggaccagaaagccggggcaaggctcctccgtacatgacactgttcagcatcctctggagcggcttcgcgacttacattcctctctccaggctttgtgactggggatggcacccttgtgggcctcctccctcctctgtaaagtgggctggcatgagacttacataaaaccatattaccacttattcattgatccacctatccacccacccacccatccacccatccacccacccatccacccatccacccatccacccacccatctacccatccatccatacatcgacccatccacccatctatccatctacccacccattcacccatccatccatctatgcacccatccatccatccatccatcaacccatccacccatctatcctcccatccnnnnnnnnnnnnnnnnnnnnnnnnnnnnnnnnnnnnnnnnnnnnnnnnnnnnnnnnnnnnnnnnnnnnnnnnnnnnnnnnnnnnnnnnnnnnnnnnnnnnnnnnnnnnnnnnnnnnnnnnnnnnnnnnnnnnnnnnnnnnnnnnnnnnnnnnnnnnnnnnnnnnnnnnnnnnnnnnnnnnnnnnnnnnnnnnnnnnnnnnnnnnnnnnnnnnnnnnnnnnnnnnnnnnnnnnnnnnnnnnnnnnnnnnnnnnnnnnnnnnnnnnnnnnnnnnnnnnnnnnnnnnnnnnnnnnnnnnnnnnnnnnnnnnnnnnnnnnnnnnnnnnnnnnnnnnnnnnnnnnnnnnnnnnnnnnnnnnnnnnnnnnnnnnnnnnnnnnnnnnnnnnnnnnnnnnnnnnnnnnnnnnnnnnnnnnnnnnnnnnnnnnnnnnnnnnnnnnnnnnnnnnnnnnnnnnnnnnnnnnnnnnnnnnnnnnnnnnnnnnnnnnnnnnnnnnnnnnnnnnnnnnnnnnnnnnnnnnnnnnnnnnnnnnnnnnnnnnnnnnnnnnnnnnnnnnnnnnnnnnnnnnnnnnnnnnnnnnnnnnnnnnnnnnnnnnnnnnnnnnnnnnnnnnnnnnnnnnnnnnnnnnnnnnnnnnnnnnnnnnnnnnnnnnnnnnnnnnnnnnnnnnnnnnnnnnnnnnnnnnnnnnnnnnnnnnnnnnnnnnnnnnnnnnnnnnnnnnnnnnnnnnnnnnnnnnnnnnnnnnnnnnnnnnnnnnnnnnnnnnnnnnnnnnnnnnnnnnnnnnnnnnnnnnnnnnnnnnnnnnnnnnnnnnnnnnnnnnnnnnnnnnnnnnnnnnnnnnnnnnnnnnnnnnnnnnnnnnnnnnnnnnnnnnnnnnnnnnnnnnnnnnnnnnnnnnnnnnnnnnnnnnnnnnnnnnnnnnnnnnnnnnnnnnnnnnnnnnnnnnnnnnnnnnnnnnnnnnnnnnnnnnnnnnnnnnnnnnnnnnnnnnnnnnnnnnnnnnnnnnnnnnnnnnnnnnnnnnnnnnnnnnnnnnnnnnnnnnnnnnnnnnnnnnnnnnnnnnnnnnnnnnnnnnnnnnnnnnnnnnnnnnnnnnnnnnnnnnnnnnnnnnnnnnnnnnnnnnnnnnnnnnnnnnnnnnnnnnnnnnnnnnnnnnnnnnnnnnnnnnnnnnnnnnnnnnnnnnnnnnnnnnnnnnnnnnnnnnnnnnnnnnnnnnnnnnnnnnnnnnnnnnnnnnnnnnnnnnnnnnnnnnnnnnnnnnnnnnnnnnnnnnnnnnnnnnnnnnnnnnnnnnnnnnnnnnnnnnnnnnnnnnnnnnnnnnnnnnnnnnnnnnnnnnnnnnnnnnnnnnnnnnnnnnnnnnnnnnnnnnnnnnnnnnnnnnnnnnnnnnnnnnnnnnnnnnnnnnnnnnnnnnnnnnnnnnnnnnnnnnnnnnnnnnnnnnnnnnnnnnnnnnnnnnnnnnnnnnnnnnnnnnnnnnnnnnnnnnnnnnnnnnnnnnnnnnnnnnnnnnnnnnnnnnnnnnnnnnnnnnnnnnnnnnnnnnnnnnnnnnnnnnnnnnnnnnnnnnnnnnnnnnnnnnnnnnnnnnnnnnnnnnnnnnnnnnnnnnnnnnnnnnnnnnnnnnnnnnnnnnnnnnnnnnnnnnnnnnnnnnnnnnnnnnnnnnnnnnnnnnnnnnnnnnnnnnnnnnnnnnnnnnnnnnnnnnnnnnnnnnnnnnnnnnnnnnnnnnnnnnnnnnnnnnnnnnnnnnnnnnnnnnnnnnnnnnnnnnnnnnnnnnnnnnnnnnnnnnnnnnnnnnnnnnnnnnnnnnnnnnnnnnnnnnnnnnnnnnnnnnnnnnnnnnnnnnnnnnnnnnnnnnnnnnnnnnnnnnnnnnnnnnnnnnnnnnnnnnnnnnnnnnnnnnnnnnnnnnnnnnnnnnnnnnnnnnnnnnnnnnnnnnnnnnnnnnnnnnnnnnnnnnnnnnnnnnnnnnnnnnnnnnnnnnnnnnnnnnnnnnnnnnnnnnnnnnnnnnnnnnnnnnnnnnnnnnnnnnnnnnnnnnnnnnnnnnnnnnnnnnnnnnnnnnnnnnnnnnnnnnnnnnnnnnnnnnnnnnnnnnnnnnnnnnnnnnnnnnnnnnnnnnnnnnnnnnnnnnnnnnnnnnnnnnnnnnnnnnnnnnnnnnnnnnnnnnnnnnnnnnnnnnnagtggtgcccacacccccaggtggccgccaaagttggggggcagctcctgcccccaacttgtgggcaactttcttctcttctctttccaaccccacctccgtcagaccccctgattagacaccaggcaagacggggccaggcggggagctcagggcctcattgcgaaagtggaagtgtcccatctgtggggggcgcaggtgcaggcctcgaacatctgcctcagggctgggggcagggctgcctgtctcctaccccgggtggggggagccaccaccctcacccagggtgctgtcctgctgcctcacggagtgggggctgtgccccctgagaccctcagttccccgactctgagactctcactgcacacagctggggaataggcactgacacagaccaaccccagccacatgctcacggtggccccggcccatgtggcggctcagagcctctgctgtctccactcccggaaacgctgtaggagctgacgccgttaggatcgtgcaccctgcacaaatgaggaaaccaggagggtcagggcccccaggaccctcactgtgaatcccaccctgagccagagcacagggaacagcaggggacgtggggaccgaatgatggcaccaggggatgggccccgggctggcaggaatgtcccctccagcctcagtcctgggggcagaacggccgaccacccagggcaggggaggccccgggtgggcctggcgtctgggaagttccccagcaggaacaaacacatccccactgtaagctggacacacacgctggcatgcagcttgttgtcaccaactcgagaaagacactcgactattgggacagggagacccgggacacctggagaccctgcggggaaggagtcggcttttactcctgcacggcttgaattattaactgcgtgcaaacgtgacctaaaactcaaatcaaatcaaatcaaaatagcacagatgcccgtgagccggccctgggtctgcgggctccacacctctggcctgtctgaggccgggaaacctccagccatggcatcagaaaagccaccgaaccagggctgcagggccgaagggtcactgtcccctcccaggaagctcctgccctttgacagttgtcagggagctttagaaagtggctttttttcccagcatctgggatgtgcctcactctctcagcccaacggccgctagaaaggggtcctaggactctccctagggtctaagtagtcccaagagtgctctgaggtggcttctggaatttcccagactggagaagccacctacccccgacccccgcaaactccaggctgctcaccggaggcggccgctggggcgtggggtgagggtctttctgaggcacccccggagagtgggggagccctgctgtctccacagagggccaggagccctgtgcacgaggccaagcagagagagagggtttccttcccagcaggcgggaggtactttgaggacaggtcaggtgcccaagaaccccggagcaggggctgaggagaggctggtcagaggccccgccttgctcaagggcacagtcagcagacacaggaacacgggcagggtggcccctggagcgggggcaaactaaaaggggtgctggggaaagctcggctgactgagggctagcggagagggaggacacccccagataccccaggctgaaggaagggccaagccctggggggaagatgggtgggcgggacaggccaagggctctgggccaggatggagctgccctcaggcctgcacacctgccctggggccgaggaaacacatgcccagtggccacgctgtagggctcagggtgggtgggacgtcaccagagctgcctgggaggaggaagttgttggaaggtcaaaccggaatggcccgagggaaggccgcgcagggcagggccccagatggttcctgtcagggaagtggcgggcgcagctgcaggcctccggccccggcattatcacggggacacagctggctgcctcacccgcaggctgcagggagaccttccccagcctgcagccccaggcccgccccgcgtcacatgagccccagggctcccaccccctccccagggcagaggacacccagttggtggccgggagggcctcggctttccagggacagaggcccaactccaggacgccccagctggcccagcccctcctctttccctcaaggctgcaggaggtcgggaaaggcagtcctggtagaggcctgtcctgggctccaggttggcccctgagggtggccctcctcatgccggcttcaagactgagggacagggcagccagttcagcctcgggatccacctgtggctccatgtcccagacgcaccctgtgctggagagcggcctcctggcatctgccggctgctccgcaccccggggtcccaggaagggcggcccaggtaagaggctcgaggggaaggtggtggggtgggggcagagagcggcagccggtgccggggctgtgactccttagagcttcgcggggcctgcccagcttagttgacagtgccggcacggatggccgtgttgactcacctcagatatcaacagggccaccccacaggcaggtcctgcacagctggggcaggtgggctggtgagggtttggcaggtgccagccaggtgccccagccccacccagaggcagatgctggagggcgggcctgctcacccccggcaaggaagggtgggctgggttctcctggggggtggaaggcccgcagccggggaaatgaaggggggggtcctagaaaaagagcccttctcctcctggaatggccctccgggtgtgacacctcacagcaggttggatgaggaaactgaggccagaggggagggcactggcccaagaccccggtgaggaggaaatggacccaaccctgggcccctgtccgaggaacgattccagccagggcagtgggggtttacggggaacctgggcctgcccttctgggggcttcgggctctggggaggggtccagtccagcaggacgccagctattgctgataccccccacccgagcctgcgaagtcccaggacaaggatccccggacgctgggggctgcagctgcaggctggtggccccgattcccagtggccctcgtggccacactcccagcagccgtcggaaccttcaggagctcacagtctcccgtctcgcggggctctcactgaggccgtcaggtccaaggtctgactgcacccctgacactcacacacagaacccgggaccgaggggtgtccccatctctggagaccacattccctgagcaggtcctggcggcggctgcctgaggctgttcccacctgcagctgcccgtggggccccagggccatcccccacaagggccccagatgtgagcaggaacttcccaaccccgggtgcccggaatgcaaaggccggacctcaccacagccagtgctactgttcgtttctcccgaatgggtgactcagagccaccttcaaggcagcaccagcccactggccctggcatctgccatcccgtcctctctggagcggccctgtctatcccctggcgctgagtggccttgggccaggtgcttcctccctgggcctcagtttcctcatggttcagacccttccgacctgctccccgcgtgagagcaggttctcaccggcgcggagagagacgggctctgaggcgcatggagagccgccgctttgttaggatgggggcgtctactgtggaaggacgggggtgtctaccgtggaaggaggttagggccaagaggtggccccgtgcctgagtcatgcgaggggctgctggctagaggcatgaaacagagggtcagggcgggcctctgacatggctgcaggtgaggagcagaggtcagggtggacctctgacatggctaaagatgtggagcagagagggtcagggtggacctctgacatggctgcaggtcaggagcagagggccagggtggcctctaacacagagtacccagccactgtgcccacccccagggagcccctgcttaggggctgcaatgtgaggagggagcagggtctcacttgggtgcggggtcctgcccctggcttctaggggcttctgtccgtgcaaccacccggccctattccagggtacccatgggacagccttagccacatcaggcagcagagttacatgtgaataccagcacttggggcttctcatcctgtaccccaggggcctcccaaggcccccaggggacagatgtgggagccttgtgatgccagaaagcctcggcatcaagcctcgcctggctggaggagcgggggccatggggggcatgggaactgcggggggtcctggacagacctgagggcacctcagccccactgtgtggctgtcaggcacacaggcctcccaagagttcctaaaacctttgaggcctgaaaacaggccgattggctttaaactctggggagaacagtaatatttctaaaagctgaagtagaagaaccttcctgtctttagaccaaaggcgtactgagcagggctgtgttgctgcgcgtttggtggcgggcaggagagacgtctgtgtgctgtgcagggggtgggaggacctcagcccctcgtctcctctgacagcgtcctgggggctgaggtgtaagcaatcagaagatggccacagagcacacgccgccgtctgggggccgggaccccttccctgggctccttcaccagccccctcacgcggagggtctggatcctcactgacccctgggcccagtggtgcagaaggaacccctgaagacggtgcttgcggtgctgggtttacgaggcgcccgctgtgtgtgctcggagctgtgcaggctctcaccgccttgtccccccaagcccactttgcagaagaagaggcggaggtcagaaaggtgacctgactgcctcaggagagagggatgggaaccaggtcacccgaggagggtgccggggacagagattttgaaatccacctggcaagtgtaggctgaggcagagaagtttcagtgccatgtgctgggacctccatgggggagaaactgagtcaggcctgcctggtgtcaccttagagggacgacgtgggatctcggggaggtggtgagcactatcagtggaggggtgcaggcaaaggcgggcgggtgttatggggaccgggcaaggcgggcagatgttatggggaccgggcaaggcgggcagatgttatggggactgggcagatgctgtgaaggcaccatccgtgcaggaagcttgagccctggctggagcccacctggcaaaggggtcacgtccagagcctgcggtcagcctgggctccctctacccgaccttgcccttggggctgggctttgccaccactcactctccatcctccatcccctcaagtggccatccaggcccagctgtcctctggaatgttgtgggtctggaacgtcctgggtccagaatgttctgggtccggaatgttctgggtttggaatgttctgggtccggaatattctgcattggaaggttctgggtctggaatgttctgggtctggattgccctccccgggtgtttctatctcctggggctgcagtaaggatgggctgcaagctggctgggggctcagaacaacagaggcttctgctctcacagtgccgcaggctggaagtccgaaactaaggcgtcagatggccgtgctcctccaggtcctgccttctccaggtcctgctggtcccaggtgttcctgggctgtggccgccgtgccgcagccactacctctgtctttgcaaggccgtctcctccctcccaaatcttcctctgcctccttcttctaaggcccagcccaccctaggccagagctccagccactcactctgcactccaggcggtgggacacagggaggcactggagaggctgcaggcagccccggttatgggaggtgccccatcaagggggcgcggtgggagggggagtggacatgagcagccgggcggtctcagcccgactcctccttcagccgcaggccctgtgtctgctgggctatggagctggtggatcatgcagagctcggccagggtgtctgtgggctccagccagaggcagggaggtcagtgtgtgcatgacaagacgtctgaggccacagacagacagacaggcagccccaagggtgcctgcaaaggggccggatggtagctgtcagacctgtgtctgtgagcaaagtgccatcacagccatcatcccaaggtccccagcaccctcagacctcacctcccgcctcctgtccccccttttgttgaccacatggtgttggggggctccatgtcggggagccagcctgggagtgctgctgttactgctatcacagaagaagagactgaggttctgagaggcacacagcaggctctgctgaccctgtggggcagaggcagatgggctggagatgtgaggatcttgctgctgtgaaatcagactgaccgtggagtccagccccaggctcggagggaagcttgccctggaatccctcctgggtcagtcatggcagaaagccagcagcatcgcaaggggacagggctgccagtgcatggacagctccatgagggaggatttacgaaggtcagacagaggcggcagagtgcagagctctggggccagagggtgaagaggaatggatgagctagtaatagagagaggggcatccacagaggcaggaagtcctcaggagagtggacggtgggacaaagcctgactcccccccaactatctccccaccggaggctccactggcacagagcagggagcaggggctctgggcacgtcctcactgccaggtgcagccagctttccaggtcccataagtgcacctccctccctccctccccagtaagcgtggcactgcttccctgaggcctcagtggctgctggaatgctccgctccttccccataccagcccatccccacacacaaggacagcaaccagccatgtcctcctgtccagcagaaagaccttgaatcagcacctaggaagacaggggcggtgcctagggtcagggtgcaatccgggccagcttcctggaggaagtggccccatgggggcggctctaggaggccactctttaggcgaagacaactttcacttctcaccacatgtggaccgagaagcagtgcgtcccgttaacctgcctgggcgctgggcaggggttttccggcactttcacttccgtgactgcagttgaccggggaggcgcaggcaggaagagcggcctcagggagaggccgattggtcacagctgagccaggactcgccggccagtgctcctccgaggagacgtcggccaggggcagctggagagaagcagggaaaagagaggcctgtctgagggccgcccacccaccctttgaaggaactccagctgggagctgtggactgggtcactcaggtcgactgttacaaagccagaggccggcctgcagcaggcgccaatgaagttctcagcacaaaacccccaagtccacccccaggacggccgctcccaggcctgtcgggcagttgcccaggacacaggtccacagcggggaccccaccgaggggcttcctctcccagctctgcccaccccaggccccaggcagctctctcaggtgggcagagagtggctgggtcaccatgtcatttgaaaaatcaaggccaggtgccgtgactcatgcctgtaatcctagcactttgggaggccgaggcaggcggatcacttgaggccaggattccgagaccagtctggccaacatggcaaaaccctgcctctagtaaatatacaaaaattagctgagtgtggtagtgggtgcttgtaatcccagctactcgggaggctgaggcgggagaatcgtgtgaacccaggaggcagaggttgcagtgagccaagattgcgcccctgcactccagcctggatgacagagggagaccgtgtctttaaaaaaaaaggaaaattgagttgatgaaaacacgtcagccacatcacacctgcgcacacccacggcccagccctcccggcccgaccccaccgcgtccgcctccggcactcacagccccggctgcctggcggctccacaagcctcccgagcccgtgcctgtgctatgccctcgccgaggagccccctcccgaccgacctccttccctcggtgttcctctccttcaatctgtcaccccatgagaaaaaccagctgcccccttacgtactactcatcccccggcccccagcgtcggctgcacgagacaggggctctggtgcctgcttgcagcagggccctcagcagacggtgctggcccaggagggtgctgagccctggaaggcgtgagtctattccatctccaggcaaggcgaggcctccgtgctcctggtccttcagttgttacttggctgtgtgcatcctgctggtgctgaggcagggactggctccacagttttcccaggaactcaggccctgtggccccggagggaaggggcagacggcaatcccttcccggctttcacccggcaacacttcaagggcatcgctgacctcagatgaggacacaaatcagaaaggtcaggaaaccagccgagctcacacagcggggctggggtgggccacgtcctcccaggctgtgcatctctgccagggaccctcccagaggcaaggcagctgaggtcgcatctcaggagagggaccccactgcacgccctgctctgagacgagagccgcgccctcagctgagcccctccgaacccacctctccgtctccttgcttcacttgaggaagccccacgcaggtgctgcctgacacccgcgtcgccgacccctggatcaagcacatcctgacacccagctgatcacacagcaaggctgccggcttggggccgccgccaccgcctcctggagtgaaatcctctctcggcccaggacagctgcagagcagccgtttcactggcagcttttggagagtgggccaacccctcccccaggcctgcctcccactgacgtgaatttccatcagcttttccaggcgccccctttgtggagacgaggactcctggggtgagggccccaagtgtggctttctccctgggaggagtggggccagaaggcatgccctcctgagaagacatggcagaagcctccaacagccacagcttctggggctcattttgggaggcccctgtggagggggatggggtgaacccacagccttgcagaagatcgggggctctgccaaatcgcaaccccccaggccatgctcaccctaactggaccgggtccacggtgccctctagtagggcccaccgggagccccagcacctgccccccggcacctgccactcgcaccctggcagccaagcctggcctgctgccctgagcctgcaagatgcagccccacgggcggtgctgaggtctgtgcgtcgtcaggccggccccgcccccctctccctcggctccctggtctgtgaggggcagtggctggacccgaccatggtgggaatggaaactgctgtccaccggccacgctgaccccagcctgtctcctgtttgtaaaacggggtggcggcgagcccctcctgaaggctggggtgggatttggtgaggaaagaccctcttcctggcactccttcccaaggggccccgctcttgcgacccccgcagctggccctgcagacaccaggcctcccacccctgccaaggccaggaggcaccagccgggagggagcccagtagagaaggaactggagaattcaccccaccctgtgggctcccggagcttcctcctgagctcccaagtccaggtgtgttttgagtgtctagaaagtcccgacttcacagacctgagggggacagagtgggggaggggaccttgcaaccgtccctccagccgtgtccgctgcagcccctcactccagatggcggtgaccccggcggcatccgggccaggctgcagccgaatcccagagccggtggagccagcctgacccagccgactgctcacgagaggatgggggattcctcaaaacgggggcaccaggccgcacactggggctgggtctgctgagggcttgctctggctgggctcccagatttagagagcagatcttaggctcctggcccccgatttgtgtgaggcctgcagcgctgcagaccctggagctcagaggggttatggtccatgggggtcacatggcactcaggtccagggcctcgccaccctgtcactgcaagtcacccagtcagcccccacccgctgaccgcacacccctccgtgccaggcgcagggtgcagaaatgaaagaggcgtccccgctggaggggctcggtgcaaactggaccccgaagcttcttgccgcttattcccaagggggcctgcagtggtgggtgttgtcctgacacccccagccccagacagacggactgacaggcgggggacggacagccgtctcagctgcttctgcccctccaacacggcagcatattctagaccaagggttgggaccacgtgttctaaaaggtcaccagcaggtgacagaagatgccagtcagatctgccctcatctgctctcggcccccaggggcttctcccaccccaggtcctcctgagacgcagctgaggctgggcctggctctgtccccactgccaggagccgtgaggcttgtcctgcggcccctcagctggggcttcctcgtctgcagtgcaaggggccgtccccacctggggggctctccgggcggcgggtgggaagggagacagcaggcagccgcttcctggcgaaactgaaactgccaggtgcttcccgcccctccctgctgagcccctccccagggccagagacagctgggacgggcagtcctgcggccagggcccctggcagtcccctgtggtccacccttattcggcctctcaccagggcgtgcctctctgggcctatttcctccaggtgggccccagcaagggcggtatggggggttcctcatcaaagccctgtggtcacatggtcccaactcagccccatgacccgtcgaacccacagaatttcagtcactttagtcatggtgcgaaaagaaggatgcagaaagcttaaaagtttataaactgaacatgtgtgaaaatggtgacattctggaggccacagagcgacctctcctctttcccttctacttcctacctctggctgcaagggagggtgggcgcctccacacagctcacgccgacccccgctggacgcgctgctccggggcagggggcgtcctgagttccccggtgccctggacaggaaggggcagtgtgagggctgagccgcgacgagcccccaggcagtgtgcgcctgaccctcacccctgtgctctgtggctgatctttaaccccccaggagaagccaggtcgcgggagccacgcagggcagcacgccgtccccgtccccggcctgctccttccttccctcttctttatagaaaggaattcctgtaggtccagtgtccccagcccggaaggccaccccacctgggggcggcgagatgggatcaaggggttggggggacctagctcagaggcttagccaccccacaccccaccacggcttcctcatcggtaaatggggcaatagcagtccccgtctccggcacatctgtgaaaactgaacaggtggacgcatggcagcacttagggtgtggaaagccgtccccaggcatcctgccccgtccccgtcgctcccaggcagtgtgtctcgcacagttacagaaaaggcatcgaattctcattttcctttgcaatttcctctctcgacacctgcgaggctgactgcattgagcatggtgctgcctcgtgtcggggccgagtggcacctcgggggctgggggggtggcatggcgctgcctcgtgtcggggccgagtggcacctcgggggttggggggtggcatggcgctgcctcgtgtcggggccgagtggcacctcgggggttggggggttgggggtggcacacaccagcgcactgttctcagcttccctatggagagaggttgagtgcgtcaatttcccgtgctacaaacaatgcttcaatcaaggatgctttccctcgtcccctggggcccacatggtttctccaaggcaaacacaagacattggccacagggactagagtgtgatacgaagttctcatcctgggcttccagagtccagggtgggtgtgggccctatcccggcttcctgggggaaatgagcgcctggtctctgaggggcagcagtgggcgtgctgcatccgacttccatctgggtggctctgcaagccaggcagggccagggcacgggagtcactggagacgccccccaccccaacccacccagctcgtgttcagaaaggcctctgtccagcgcaggtgttggtgatggcaggcagtggttctggaggtcaagagtgtccattgctcctggaggaattccttgtttgtggaaaccagggccggcctccaagggaggctgggaagctgggcgctgggcagggcctggcaccgggtgcttctactgcttccactactgagttcatgggaggccagaggttgattgggcctggtcctcgtctggacatgggtttggtggtcaccccaggtgggatgagggtgtggcaggggaggtagcccagccatgctgcacaggtgggagaggggccgggaggtctgtggactcgcgatcccccgctctgctctcctctgtgggcactcacaggggctgccacccccctaccccggcacaggcctcactcctgccaaggaccagggtaaaatggcagccctgttagctggctgctctggagtctgtccctagagacggcctaatgtggccaagatgtgtttcagggagccgtgctgtgactcaggtcggggaagtcctgggactgtgcaggccagtgagcagagtgaccctcagagcagagcgacccacacaaaccgggaaagcccgctccgtccagaggggccccaccttgcagctacgagaggaggcgaggtctgctttccctggccaaggagtggcccagggggaactctgtatgcacccatgctctgtggggtctctctgttcctgctgccgaatgggcccccggcccctcccctgacatcagcccacagaggagggaccgggcacagtggagaggacctgtcaggtgccaagcaccaggcccgattctcaaagccggtggttctgtgggcttttaatgcttttgtttgcgagctccctaaaacttttttttgacaagccaagttcccctataagatgaaattgcttacaaagcagcctcacccagcctggccacacacagaccttatgctgcttcgtttttggcagataatggtggcccaggagccactagagaggttttcaaacatgacaggtatctgtggacaagacgttgttaaaataaataaggtgacagctgcaccccgcaacctcaccactgggtcacagaagaacagctgcatacagtgtgtgaggcatgtgttggccgtggcacacacctgttctgcaaactctctgccccgcagggacctagccccctgggttgtagaagcaggattcggggcctgtggctggcgctgcgcaccaagtatccttctaaaccaaaggctggacacaggacccttggcaatggtgccacatgggccaatttgcagcctctaaacattgattaaacagtctcaaaaactgtattttctagcatacctaatatgttaccagtgtttggcatctggtcttatgaaaatctgcacatttagctcacttgatttatagaaatgctgccttaaaaacaaagggcagaactggtcctcactgaaaaacaatctgcccagactgatgtttgtcagatattaattcaaataagcatgttattaaatgatccaaatgcctcactttgaattctaattgtgatatagatggatggatgtgtgggtgggtgggtgggtggatggatggatggatggatggatggatggatagatgggtgggtggatagatggatggatgggtggatggatggatggatggagaagtgcataggtggtgggtggatggatggatagatggataaatagatggtgggtggggtaggtggatggatggatagatggatagatggatggatggatggatggatggatggatggatggatggataagtggatagatggtggatggatggatggatggacagttggatagatggtgggtgagtggatggatgggtgggtggatagatagatggatgaatagatgggtgactggatggatagatggtggatggatgggtggatggatggatgagtgggtggatggatagatgggttggtgggtggatagatggatgggaagataaaaaggtaaggaagcaggaaggaaaggtcaaagtatatttttcaaatcttaaaaacatagttcttatacacacatacagtaagcatgtgtgaaaggtgtattattccgcgatgagggagccagtcgggcagcccaggtgattcagaggggacgagggacattaaagaccccatgaagaaggaaagccacacggaacctgacgagtgggaattagtgaagtgcaatctttcttcagaacaacaagtagcttgcaacttgtcagttttctgcaccctaaccctaactgaagcctcaccagcagtaaattaaaagtcaaaagaggccactgggcccttggcagcctggctaacaccaggagggccagaagtcaacgtgattttttacacctttgggtctgtggtttccgaacaggaggcaggcagggcatggggcctgccccaggttttcactggtgggtcgaagccctgtcatcagactcatgctagagagaggcaacccatgaattgggggaagagcaggcaggagcagcacacagctgaccccaagccgtgtttgcagaacaatctggaaggtgaagacccacatatggattcctttaagccgatcggcccaggtatgcagatggtcttgtgtgcgtggccctttaaagacccccatagagctgtgccacctacctcacaggtgcagggctgggagctctgggcagctctctgtcctctcctcactgcagacagagctcttctctttctcaagatgcactgcaagcgagatgcagagtcccctaagtcaccacgaagagacagaggctcagagggatgaggaacccacgcccgtgtggccaggccaggcctcctgcctcagacgtgcacggacccgagcctccctgcattccaggatcccgcagaaccctgagtcacagaatgcggctctcctcgggccgctgtgtgcctggctcacgaagtgtcagctgagcagggaaatccaggcatgacgccgctaaagtctattcctgatgcgcactgcagcgcggtgcttcagctctgagaacatcacactaagtgaaagagccaagaggccgcatacggtctggtcccattttatggaatgtccacgataacaaatccacagagacagagtggatttggggtcaccatggggagggtgtggagaagacagtgacagctcctggggccgggattcactgcgaggttgatgatgtgctctggagttaggtggaggcgctggttgcagaacgttgtcagtgtactaaataccactgaattgtgcactttaaaatggtgaaaatagtaaattttatgttctgtttatcacaaatttttaaaagatcttaacattcttaaaaaaaaaaaaagcctggcagaagatgagcgcccgcccctggcagaagatagcgcccacccctggagaagacgagcgcccacccctggcagaagacgagcgcccacccctggcagaagatgagcgcccacccctggccttcccccactgtccctggactttggtagaaactccttacagcctctgtccaagcccccaccttctctccctccggccctgggcctgtgtctgcttcttccagctccccctccagatttgaagaagcacccccagcatcctgccaggcccagctacgcatctgcccagggcccctggcactgactgtgtccctgcagctcaggtgctgaggatgtggctttggacccaacctccgttatctcccctctgcaaaccacagagtggggtggcgtgccctgtgccctcctggaggccctgtggaaatcaagcaagtggaagttttcagacacgcggggtggggttgcccagctcccttccgagtggacctgggaattcacgtcggtgctcagaagccgtgcagggtcagcgcccctcatctccagggttcagggcacagacgagaaagcagcagcaggctttgctccccctgttttcccaccaggcgacatctaaagacacccatgttcgtggctgggccgagcaccgtgaggaccacaggaggtgctgggtgggaaggcactggctccggctacgtggctgtctccccccgaaacgtggtccaggggactcggcatctgtgttcagtcctcccaaatgtgccctttggtgatctggccccaccatgtgccctcagggtgcagagtggcctgggccctgggcctctccttcgggactcacgacaggcatgggtaatggatcacaatgcttttcctgctgagcacagaggaagcctcagcatcccccacaggacagtgaccccagcagacacagtggacacagcagcctgggaagtgcattcaccttcgaggctggttcatggcgtctcatgttatttgtggaaaataaatatccattggcaattgatgcttttgtaaaagtaaaaaagtacgagtatgcagtggaaatctccagtgctgagtatcagttactatggagtgggaaagccgagtgctgagtgtcagttactatggagtgggaatgtccagtgctgagggtcggttactatggagtgggaatgcccagcgctgagtgtcggttactatggaatgggaatgcccagtgctgagtgttggttactatgcagtgggaatgtccagtgctgagtgtcggttactatggagtgggaatgtccagccctgagggttggttactatggagtgggaatgcccagcgctgagtgtcggttactatggaatgggaatgcccagtgctgagtgttggttactatgcagtgggaatgtccagtgctgagtgtcggttactatggagtgggaatgtccagccctgagggttggttactatggagtgggaatgcccagtgctgagtgtcggttactatggaatgggaatgcccagtgctgagtgtcggttactatgcagtgggaatgcccagcgctgagtgtcggttactatggagtgggaatgcccagcactgagggtcggttactatggagtgggaatgcccagcgctgactgtcggttactatgcagtgggaatgtccagcgctgagtgtcggttactatgcagtgggaatgcccagcgctgagtgtcggttactatgcagtgggaatgcccagcgctgagtgtcggttactatggagtgggaatgcccagcgctgagtgtcggttactatggagtgggaatgcccagcgctgagtgtcggttactatggagtgggaatgcccagcgctgagtgtcggttactatggagtgggaatgcccagtgctgagtgtcggttactatggagtgggaatgcccagtgctgagtgtcggttactatggagtgggaatgcccagtgctgagggtcggttactatggagtgggaatgtccagcgctgagggtcggttactatggagtgggaatgcccagcgctgactgtcggttactatgcagtgggaatgtccagcgctgaggtcggttactatggagtgggaatgtccagcgctgagggtcagttgctatggagtgggaatgcccagtgctgagggtcagtcactatgtggtgggaatgcccaggggtgagtgtcggttactatgcagtggaaatctccagtgctgtgtgtcagttcctacagaaggttccgtcactccccgtgcgccccctgtctgggaaccacctctcacgggctctggcggcatccacaggcccccttctttacagatctgttacagcaggtttagaaagctctagagacaccagatcaggatcaaagcaaggagaggccgtggaagacagaaggcagagccccatccaccacctgcccacagcgagacctcagacaggtctcacagcctctctggattctgtgacttcatcagtgaatagcattacagttaaagtcaaatttcagataaacaaatttttaaatcgtaagcgtatctcaaatattgcctgggacatgcactaaaaatcagttatcgtttatctgacattcaaatttaaccaggcattctgcatctgtaatctccaaaatctggcagacctccctgtgatggatttgatccctgtagccaataggattatgtcagctgcaaatcacagaaaacctaacgggggtgtaaacaaggtttgtttctacatgaccaaacccagaggcgggtggcccaggccagtgccacaacgacactgtctggtacctggcatttctgctctttcagcttcactatcctcttgcttatggtttcctggctgcaaagtggctgcccctgctccaggcatcatgtctgcattccaggcaggaaggaggaagaaggggcagaggacaaagactaggccagcctcttttcataaggaaaattgagattcttgtggaggcctcactcagccgacttctgtttatgccccatgacaaatggattcgttccggtaggttccagtccacaaatcaatagtgttcaaatgtgacactcccgagggccttctcacaccaggattttcaaacttctttcttcacatcttctctgctatcttcaaacagcctctgcacccataaccccgtcgacctggcacctggccccgtgagttcagcagagcaggtgacgcagtcccatttcacagatgccgtccacattgaacttagagcttgaggcagaagagtgccctgccctcccagcccagcaggtgtaggcctgagtcattcaataccactcacatctcgtgggctgtcctgggagggcagacaaacctgggaatcaaggactttgtcttatctctgcctgttttctactgaaaatcatctgagggaaacagactcatctttccttggaaccttaatgatttatttatttattttaatttattattattattttttggaaaatctggctctgtcacccaggctggagtgcagtggtgcaatctcggctcactgcagcctccatctcctgcgttcaagtgattctcgtgcctcagcctcctgccaagtagctgggattacagacgcccgtcactgcatcctgctaatttttgtatttttagtagagatggagtttcaccatgttggctaggctggtctcgaactcctgacctcgggtgatctgcctgccttggcctcccaaagtgctgggatgacaggcttaatgatctttttaaacaatgagccacctttcctcctgtaatcccagataccgtctctgccctgctcccgttttctctccatcgcctttcccagctgctgggaggaaggaggaggaaaaggagggtttccccgggaccttccctctcctgcacctgggttccctctcaggcaatcgcagcatcacatttatttctagaacattctctactgcgcctggcttttacaggtggtatgacccatgccacctcctgcctctgcctgcacctctgtccaagacctgcaggctctgtaagcgctgggtgctgccttggtgcccgggcctcctcacaggccctgaacacccacgtgcctccagccctgggcgtgcatgcgtgttccctccacctctcctgggagcccaccatcatcgccaggactacttcaactctctcccgcaaggagacccctctgctcccccaacagggtcatgccctgtccccaccacccgtccgcggccacagcagctgctcatgtgactgtccatgtagcgtgtatgagaccaggacacagcaggcccaggccagacctgaacacatggcacacagcacatgtggcgtgcctgccagtaaggacgggggcacacgattcagcgcgtcaatcagcagggcgctgcccctccagctgctgggaccttggcatcgcgaggatggggcttcctctctgttcccctctgaatcctggccctgggttggtgcggcacagcccgggcacacagcacttgtctattaggtgaatgagcagctgacagggttgccaggggtcggggcagagagaggaatcagccctctgggaactcaggcccgctccatggaggcaaagggaaaagggcggcagaggcggtacagggtcccactctgaccatacccctagggagccaggcctgtggtgtgagagctgcccacgggggacccacacctgcagcgggaagagcccagagccagcgcagacctgggctacgctgaggccctgaggccccagccctgggagagcaagttcatctccttccaaaggccacaccgaggcccccagcccccggccctgggggagcgagtttgtctccctccaaaggtagtgctgggctgctgggcggcgactgtgcttctccacctgcccccacccaggcctcagtctccccatctgagaaataggaaggacacctctccaccagcttctgctccagacgacacgcgtgtgatgcccagggatgtggggcactcacgagcgctgcaccgggacctggtgtcactctaacgccccgccccagaaccttcttcccccgccgccccgcctggcattactctaacacccccaccccaaataaaacttctcctttccttcctggaggagttccccattcgaggtgaccacatcaacctcaacttctccctgggagctttgggctcttgaagctattttaggctcaaaatagctttttgaggaagctcaaagcttccctgggagctttgggctctcgaagctcttctgccatagcctgtgcccagggccctttcctctcgggataggtttctgccgtctgaggccccgacagcctgaccaggcttcctacggcctcgtgggtgtgcacggccttgacacccatcccgctactgccctggtgcgctgacaaagttccgtggcctctctgtgagcgagggattgtgagcagctcacaggtactttcgttccgggtctactgtggttttccagcagccttgttgaggtataacccacacatcttacaactcacccatctcaagtacacaagtcagtggcacttagcaaagccccagaggtgtgcaaccatcattgctaacaagttttagaacattttcccccaaaagaaaccccatgcccacgggcagtcaggcccgttccctccctctgccctgcccaccactgatctgcttcctgcctctgtggatttgtcttttccggtgttgtgtgtaagcgggatcctgtgtccagctcttccactcgcccgtgttttctgggtccatccccactggagcgtgtgtcggacctgccttccttcttatgtctgaataagtgtgcactgcatctgcttttgagtttatctgtgctcggctgacagtctatggagaaccttgtctcaccacagctgtgtgtctcaggtgagccactgaccctctctgggcttcccagatgtacactgaggacaggtgtgggggtcagcaaggggatgtgtctgggggtggagggactagctatcacctttgcgtcgtcctccctgggctgagggggcatcgtggtctctgtgcaagctccgaccccgtttgtgctgtgtgagtagcactgttatcccgagtcaggtgacagccccacggagagtgctctgccatgtctgctactggccctgaaaggcagtggcatctgccgtgggggcgggggtgtcccgagggcagggaaaggcagcacttctgaccaggaacctctggggccatcagctggctgtccagactgtgaggttagaaccaccggcagcatttggtgagagggaagatgccggggagtgggtcgatgggggaggagtgagcaaccaatctcgtgtgatgatggttctgctgggcagctgcccgtgggcataacctctggggcctgaagcccaagggcggttttgttccgggagagagcgtgacaaagacgtagagggccccgacttcaggctgccgcagtctccgggtgagccactcatcttctgtggttcagcctctgcatttcagaggccctggcaaagtacagtgtggactggagggtgccaggcagctgagaaccccaggggccgggcttggtgcagctgctgcaggcccctgtgacgccacctggagaaggcacagagggagggcaagggccatgcggtccagttccaaactcggtcaggaaagcagccgaggagcagatgccagcccccgccgcccacgcctggagcgcctctttctcccagggctccgccagcagggtccaccagtaacagacaccaggccaggtggggcagctgcaggttggggtaatggagacagagcctatgggtcccagcctcgcctccctctgccacggtattgtgtgactctagacaaatgctttctgggcctccatgtcccctgctgggaagccccgacctgtggaactaaatgaatggggccatgcctgtgaggccagtagaagctccgcgttcctctaccctccaccctccgggagctgctgggctctgagcctgggggagcagggtcatcctgggctcaaagagcagagagccctgagacccctggggaagagcaggcggacacgctgtgtcccggggacccggcgggtgggtgaaggtctcccgcccaccctggcacaggccatgagctccgtgtgcgtggggttctcccgtgatgcaggtcttcgccctccgtcacacgcgtgataaacaggctctgactcagtttcctggccattctgtctggaggctctacatggcctcgggctggggccaggcggctgccctccacggctctcctggcagacaactgacatggagtctttcccaaagcctttgagtctttcccaaagcctcagggagcaggaactcggcaggcctgggggttggcagccctgggcagggtcgggagccctgggtggggtcaggatccttgggtggggtcaggagccttggctggggtcaggagccttgggcggggtcaggagccttggctgaggtcaggagccttgggtggagtcaggagccttgggtgaggtcaggnnnnnnnnnnnnnnnnnnnnnnnnnnnnnnnnnnnnnnnnnnnnnnnnnnnnnnnnnnnnnnnnnnnnnnnnnnnnnnnnnnnnnnnnnnnnnnnnnnnnnnnnnnnnnnnnnnnnnnnnnnnnnnnnnnnnnnnnnnnnnnnnnnnnnnnnnnnnnnnnnnnnnnnnnnnnnnnnnnnnnnnnnnnnnnnnnnnnnnnnnnnnnnnnnnnnnnnnnnnnnnnnnnnnnnnnnnnnnnnnnnnnnnnnnnnnnnnnnnnnnnnnnnnnnnnnnnnnnnnnnnnnnnnnnnnnnnnnnnnnnnnnnnnnnnnnnnnnnnnnnnnnnnnnnnnnnnnnnnnnnnnnnnnnnnnnnnnnnnnnnnnnnnnnnnnnnnnnnnnnnnnnnnnnnnnnnnnnnnnnnnnnnnnnnnnnnnnnnnnnnnnnnnnnnnnnnnnnnnnnnnnnnnnnnnnnnnnnnnnnnnnnnnnnnnnnnnnnnnnnnnnnnnnnnnnnnnnnnnnnnnnnnnnnnnnnnnnnnnnnnnnnnnnnnnnnnnnnnnnnnnnnnnnnnnnnnnnnnnnnnnnnnnnnnnnnnnnnnnnnnnnnnnnnnnnnnnnnnnnnnnnnnnnnnnnnnnnnnnnnnnnnnnnnnnnnnnnnnnnnnnnnnnnnnnnnnnnnnnnnnnnnnnnnnnnnnnnnnnnnnnnnnnnnnnnnnnnnnnnnnnnnnnnnnnnnnnnnnnnnnnnnnnnnnnnnnnnnnnnnnnnnnnnnnnnnnnnnnnnnnnnnnnnnnnnnnnnnnnnnnnnnnnnnnnnnnnnnnnnnnnnnnnnnnnnnnnnnnnnnnnnnnnnnnnnnnnnnnnnnnnnnnnnnnnnnnnnnnnnnnnnnnnnnnnnnnnnnnnnnnnnnnnnnnnnnnnnnnnnnnnnnnnnnnnnnnnnnnnnnnnnnnnnnnnnnnnnnnnnnnnnnnnnnnnnnnnnnnnnnnnnnnnnnnnnnnnnnnnnnnnnnnnnnnnnnnnnnnnnnnnnnnnnnnnnnnnnnnnnnnnnnnnnnnnnnnnnnnnnnnnnnnnnnnnnnnnnnnnnnnnnnnnnnnnnnnnnnnnnnnnnnnnnnnnnnnnnnnnnnnnnnnnnnnnnnnnnnnnnnnnnnnnnnnnnnnnnnnnnnnnnnnnnnnnnnnnnnnnnnnnnnnnnnnnnnnnnnnnnnnnnnnnnnnnnnnnnnnnnnnnnnnnnnnnnnnnnnnnnnnnnnnnnnnnnnnnnnnnnnnnnnnnnnnnnnnnnnnnnnnnnnnnnnnnnnnnnnnnnnnnnnnnnnnnnnnnnnnnnnnnnnnnnnnnnnnnnnnnnnnnnnnnnnnnnnnnnnnnnnnnnnnnnnnnnnnnnnnnnnnnnnnnnnnnnnnnnnnnnnnnnnnnnnnnnnnnnnnnnnnnnnnnnnnnnnnnnnnnnnnnnnnnnnnnnnnnnnnnnnnnnnnnnnnnnnnnnnnnnnnnnnnnnnnnnnnnnnnnnnnnnnnnnnnnnnnnnnnnnnnnnnnnnnnnnnnnnnnnnnnnnnnnnnnnnnnnnnnnnnnnnnnnnnnnnnnnnnnnnnnnnnnnnnnnnnnnnnnnnnnnnnnnnnnnnnnnnnnnnnnnnnnnnnnnnnnnnnnnnnnnnnnnnnnnnnnnnnnnnnnnnnnnnnnnnnnnnnnnnnnnnnnnnnnnnnnnnnnnnnnnnnnnnnnnnnnnnnnnnnnnnnnnnnnnnnnnnnnnnnnnnnnnnnnnnnnnnnnnnnnnnnnnnnnnnnnnnnnnnnnnnnnnnnnnnnnnnnnnnnnnnnnnnnnnnnnnnnnnggcagggctgtaggggaagggggctgtcagagtagatgggtggccggcctatcatggtggtcagggtgcctgttgtggtcaggggacctttcatagcagttggggtaccatcgtggtggctgggggagcccactgtggtcagagggctatcttggtcagtggtgagatttggggtcttcagaggaggagtgggagctcctgggcagttctctgactggcagctgtagaggggccatgaccacacccaggcatgaaggaccaggactctagatgaaagagcttcctgctaggtagccactgtcctgacatggtgtcagctgttagaggccgcctgccctcatttgcccagggcaggagcacagcccacctgctctgtgggcatctctgtccctgtcctcaccagcccaatgcaggtgacaaggcccatggcagccccaaagtcatcttaaggggagccatcccccttaagggaaacccagagacacatatgattaagattcagggggtgcagtcacagcgaaataaacccaaatgtttattttcccgggagtaaactgtgccttcaataggcagacataagggtctcagggtgccgaatacagcaaaaggcgctttggcatccaagccacacacagcctgggagcagacacctcacctcgtcatcgtcccggccactcctgctggcactgtccccagccgggagcccccaggcctctacattccgatcctgccagatcctgatccccactgctcaaccccagcctccccacactcagggtcccaagagtgggcggcagctgtggggaccattttgagggctccgctgggagctgtgggaaccgttttgagggctatgctggcctctggacacagtgtctccagggcagggccagctcaccatctgggtggacatggggagcctggctggctctccccacgctcactccttccttcgttcttccgtgaaccttcaccactggctgtgtgcctgtcagccccgcaggccctggaagaaagggatgcaaacgtagaaatgagggtccctcggcctctccaccgggagcgggtctggctgagcatgacaaacccagccgagggagagaggcgatggcccagcccaggcacggcactcctcattcctcctcctctgtcatcgctggggccagcaggactgggggccgatctaaccggcagacggagaccaggttgtgttttttctcgtgggtgaggacggtcactcattagatcatctgctcattcagcagcaaacccgatggcgggacatgccgtctcgacacaggccctgcgtgggggtcctggacatgccgtctcgacacaggccctgcgtgggggtcctggacatgccgtctcgacacaggccctgcgtgggggtcctggacatgctgtccccagggtgtgggggtgggggggaaggaagccttgagctgtggctccagggggtccgccaagtatttgttgagggagaacacagagatccgtgaacaattgtgatgggctgtcatgggggtatgggaggcgtctctcccagactcaggaagggtagatcagggaattcctgcctcccagcaggaatggccactcagcagggacctgaggctaagaggagtttgtgggcagaatgttctgggcaggggagcggtgtgtgcctgtgaggctggagctcagagaggcgatgggggcgagcagcaggcaccccaggctcaggagctgagactttatctcggtcagggagtggcagggccgcatttgtcttgctgaaagccgtctcggtgccccgtgggagaaggactggagggcggcaactccctcaccccatggcctgggcatttgtcctgctgaaagccattttggtgccccgcgggagaaggattggagggcggcagctccctcaccctgtggcctgggcatttgtcttgctgaaagccgtctcagtgccccacgggagaaggactggagggaggcagctccctcaccccgtggcctggcacagcctccccgggtgtcctggctccagcaatgatagacggctttgtcagtgccgggatgcatgcggtttggagattgtccaccctggggcctggccaggtatctggctgataaaaattagtctctctgtctctgcatagtagcgagcctgttcccatcactcgggctgtcagcactcaggtgcccagagcagcttccggcttagatctcacaggctcctggggctgctggggccggggagacccaaacccacctctgcacaggggtcctgggccaagggtctgtgccagaatgctgcagctgcgagtgacagaaacccagctcggaggcgtcagggacacctgggactgtgctggctcaagcaccaaactataggatgggcaggggcaccggtttcaggccccacagacccaaccattagcacaccctccgccgctctgcccaccttctcttcccagcggctgtccaggccactctgggcttgcctcccacgcagatcaaagaagaggtccttcctctcttgttccagttcaaaaactcccagggaaggattgtgattggccgcgtgtggtcacctgccctcctcctggaccaatcgctggggccgcggctgcctgcatgactgtcctgctagccctgtgcccaccctggggccgtggcagcaggtctgtgacccgagctggagctgagaagccacagacccgaggggagggaatggcagcaacccggtcgccaccctgattttgtactgcaggtgcaattttaaaactgattttttaatttaaaaaagcaaagatgaaacaaaaatacttataggaaaattcaaacatacaggtaacagaaaagaaggtgaaaataaaataagacgcagctaatgatacctctcaaagaattgtatgataaggaaatgagaacatgcagtcactcaacaaacaaagggagggatggagacccagaagacaggtgccaacactcgaccctctgtgctggtgccagtccaggggacgggtgaacagacccggaagacaggtgccaacactctgaccctctgtgccggtgccggtccaggggacgggtgaacagatccggaagacaggtgccaacactctgaccctctgtgccggtgccgatccaggggaggggtgaacagatccggaagacaggtgccaacactctgaccctctgtggcggtgccggtccaggggaggggtgaacagatccggaagacaggtgccaacactctgaccctctgtgccggtgccggtccaggcgaggggtgaacagacccggaagacaggtgccaacactctgaccctctgtggcggtgccggtccaggggacgggtgaacagacccggaagacaggtgccaacactctgaccctctgtgccggtgccggtccaggggaggggtgaacagaccgatgtggttcctgccctggagaacagggaaacgcagaacaagcagagacagatccagataaagagaggtgaagagagacgggagaggaggagagggggccagtcatgaggaagagaagcagggaagccgtgtgacttcgagagtggcgggggttttcgttccttcgttttcttttcttttttttcagacagaatctctgtcacccacgctggagtgcagtggcaccattttggctcattgcaactctgcctcccgggttcaagtgattctcctgcctcagcctccccaatagctgggattacaggcacccaccaccacgcccagctaatttttgtgttttagtagagacggggtttcgccatgtcggccaggctggtcttgaactcctgaccctaagtggtctgcctgcctcggcctcccaaagtgctgggattacaggcgtgagctactgtgtctggtcccttttgttttcttcttgtgggatttgcctactcatgaagtttgttgagcgttattttgagtgcttgtattgttcttctctgtagcaatgtttgtgtgctggggccactgtcgtttgtccccacacccactcccagcccatcttctttctttttcttttttttttttttgagacagagtctcgctctgtcacccgggctggagtgcaggtgactcgatttcagctcactgcaacctccgcctcccgggttcaagtgattctcctgcttcagcctcccgaatagctgggactacaggcacacaccatcacacctggctaatttttgtatttttggtggagatagggtttcgccatgttggccaggctggttttgaactgctgacctcaagtgatctgccctcctcggcctcccgaagtgctgggattacaggtgtgaggcgccgcgcccggcctcccaacccatctcttatcggggtcccctgtctctttcaggacatggaagttgctcatgcctacacggccaaacccctccagcttcttaaaattttttcagagtttctcggctgccttaattttaaactggtattatataaattgctctgcttttttctcctaatcctttcactgttccagtttttcacattttattctttaacccaagtggagtttatttttccaagtgaagtaaggagtatataattcattttccccacatggggcagttgtcctgacaccatctactggggagtttgtgcttctccagggattttaaatgccacctcaatcccatccacattcccttttacacacgagcaccggctgcttttcctacgggacacttccgatttccaactgtttgtgcttggcctggttctcgtgtgaacttcaacaaagacaagagagaactctgaacttgtctttgagccacattgcaaatgtgtaggccagccagctcttagccccgttttacaggaaaaactgaggtttggcaagcttcagtaacttgctttctattggatatggagagtgaaggaagaaagaaatgaatacgtgaatgaagccacttcacaattaggaacctcattctgcaaaagcagcgatgccgatgtgagtcaggggagaaagccaagagacactcctgaggcagggaagcctcctgtccggagcccggactccctctgctttagggttcctccctgcctccgggagggtctccttgaccttgtgggcaacttgaagccgcgtcatctggtgcccacaccagatggcccaggctgacggccaaggcagaacctgcttgggccagtgtgggtccttttcccagctacccctgcacagtcaccctctcccagttccccaagaaagaccaacgtctctctgcctggggccagcctggtgccttgcccccagctccccactcgccacgaatgtgtctctgctgcaacctgctgatttcttgtctttgcatgaaacagaattgaggggggacagaaccgatttgtcagctgatagttattaaaaatgactttgatgaccaatcaccacgtggcttgcggcatctgactctcagaaggaggtcacagtgagatggttaggacacagctcccgttctgatcgagttatttatgggactgaagattctctggctttcacattaaacacccaccacgggaatggaattaatgtcaaatcctgtctttttctggcagtattattcatgcatgaatacacaaactactaccaaaaagtgcccctccctccttttacgagatgtcttccaacaaaaatttactttgtatctttatttttatttttgagacagggtctcgttccatcacccaggctagagtgcagtagcgtgatcatagctccctgcagccttaacctcttgggctcaagcaatcccactgcctcagccccctgagtagctgggactacaggcacgcaccaccacacccggctaacttttttattatttgtagagatgaggtcttgctatgttgcccaggctggtcttgaactcctgggctcaagcgatactacttccttggcctcccaaagcattgggattacaggtgtgagccaccaagcccagcctactttgtatccttattagttctcaaaatgtgtaatacattcacattgtttgtatcggttgtatactaccaataattataacgataatccagcccaggaaataaattttaacataggaaaatgtttaaatcttgacattccaactatgtacctagttttgtacgataggggaatcaaaagactttcaaacatgaaaacatattaggataaaaatcggctgggtagaatggaaggaggcattaagggagagaagggccatgtagagattcaggcgctgcagaagagtctgtttgtatctgtcttttaaacggcaaataaaatgtcattgatatcctcatttttgtctgctgaattttttaagttaatagattttattctttagcgtggttctgggtttacaggacaactgggcggaaagcgccgagttctcattactctttccgacttgttccctagtggggggtccctacattgcacctggcactggtgtgatacattcgttacaaccgatgaaccaatactgacaccttttcattaactgaaatccatagtttacattgggcttctctcttggtgttacattctatgtgtctagacaagcatatgacttgcgtctaccattagactgtcatacagaatagtgtcactgccctaaaaatcctctgtgcagtctgggcaacacagcaaaaccctgtctctacaaaaaataaatacaattagctggggctgagatgggaggatcgcttgagcctgggaggtcaaaggatgcagtgagctgtgatcacgctactgcactccagcctgggagacagagtgagaccctgtctaaaaataaacaaacaaaaaaactcagccagaagcagtggctcgtgtctgtaatcccagcactgtgggaggccgaggtgggcagatcatgaggtcaggagttcgagaccagcctggccaacatggtgaaaccctgtctctactaaaaatacaaaaattagctgggcgtgatggtgggcgcctgtaatcccagctactcgggaggctgaggcaggagaattgcttgaacccgggaggcagaggttgcagtgagccaagatcatgccactgcactccagtctgggagacaagagcaagactctgcctccaaaaacaaacaaacctctctgctctccctactcaaccttccctattctataaccccctgaaaaccactgacctttttactacttccatcattttacattttcctgaatgctattgagttggaatcagacagtatatagccttttcagattgacttcttagcaatattcacttttttttttctttttgagatggagtgttgctctgttgcccagggtggagtgcagtggcatgatcttggctcactgccactacaacctctgcctcctgggttcaagcaattctcctgtctcagcctcccaagtagctgggattacaggcaccgccaccacgcccagctaatttttgtatttttagtagagacgaggttttgccatgttggccaggctggtctcgaactcctgacctcaggtgatccgcccccttcggcctcccaaagtcctgggattacaggtgtgagccaccacgcccggccatcaatgttcactttccatggcttgatagctcactacttttgtcatggataacactctatcgtctacatatgccacagtattttatgtattcacctgttgaaggcggtctcagtcgcttctaagttttggtaaaaacgaatgaaacttctatcaacattaatgtgcagggttttgtgtggacattagtttttaactcatttgggtaaataccaagaaacgtgaatgctgggtggcgtggtaaaagtgtgtagtttcataagaaacagtcaaactgtcttccaaagggctgtaccattttgcattcccgtcggcaatgaatgacagctcctgttgcctcacatcctcaccggcatctggggttgtccgtgtgttgagttttagttattctaacaggcgtgtcgtggcctctcgtggctgtgctgacccactctctagtggcaaggctgctgggcatcgtttcctgtgcttatttgccagatcatcttctagatctcttctctgatgaggtgtctattcagatcttttgctcatttttaatggggctgtttgttttcttatggtttggttttaagagttctttgtatattttagataacagttgttcatcagatatgtgtttcccaaatattttctcccagtctatggcctgtcttttcattctcttcatagtgtcttttgcagagccgaagtatgaaattttaatgaaatccaacctgccaaatttttattgtatgcatcatgcttttggtgttatatttaaaaactcactgttctaggtagggagctgagtgaaaatgcaggtgtttaagacgagtttattcagatatttttaatgaacgacagtggctatcaaattgctatggtatctagaatccattagccacccgcttatttttaaatatctatacctatagtgtatcagactttctattcttggcagctatctaaacttttgttgcagagttttagttataacagaaaatgtttgagagtctatagtgctcagaactattttctgaaggtcagcaacagtgatggcctggcctcccgctggaccacgctggcctggcaggactccagctctgccaaagaccagcctgtgttctgagattactcaagctttctgggtcccggtgttctcctctggcaaacaaggctggtggcaagacctacctcctagggtcacggagggcacatgagagggcctagcgcctgccctttggccagggccccacagacagcgagtcttacctggtatcagaagaaggggccatgactgcggggaggtgacagtgcagggacgcctgtggcaagtgtttataaactgcgtctttatccaaaccttgagctgggcactgttgggtggttgagagggaaatcagatgtgggtgctgccctttggggagggggatcaggatggccagaagtgcagttggcaggacagaaggctgcagttgttttcctgagggcagcagggtggggcctcagaggcacacccagcacaggtcagcaaagctggggctgccccgctgtgcgccgcgggccctagagccaggcacggtctcccagggcttccatgggtgtgtgatcggggcaccagatgctgatggggagtcaactttacttggaaacgctgccatgccatgaggaggggaggtggtttcctttttttttttttttttttttttgagatggagtctcgctctgtcacccaggctggagtgcagtggcgtgatctcggctcactgcaagctctgcctcccgggttcaggccattctcctgcctcagcctcccgagtagctgggactacaggcacctgcaaccacgcccggctaattttttgtatttttagtagagacagggtttcactgtgttagccaggacggtcttgatctcctgacctcatgatccgccggcctcggcctcccaaagtgctgggactacaggcgtgacccaccgcacccggccgtggtggtttcttttaagtgaattgagctcctgcctctacagacagcgacacactgggagctccatgggcacaccctcgagctccctcctccacggctctgccccctcccgagccctgagtgtggccctccgaggtcctgctcgcccgtggtctgtctcccgcacaggtgacgctggccttgtcggacagactgcagacatctttcacatagggctggtagtctcctccttaaatgtcccctcgaaatgcccaggagctgtgacttggccgcatccagggcaagaaaccagttcttggataaggcagcaggaagtcggtgtggctgagaggctcagcctctccacctgtaaaatgggcgttccgggagcatccgcacagcacggggggaaatgcagagacggtgcccagctctgtgccagctactgccaggaccatctgaccaccctgtgaccgctgggctaggcgtcaggctgacccactcacagcactaaaggaagccctcctgcctgcgatatccctttcttctctaccacgccaccacagctctcctgagtagggaggaggggctgcggtggggcaggtgcagcgcctgggttgtggtgtctgatggctgcagtggtatcttcagtgccttcaggtctgtcactcctcaaatggttgtgagcaccctgtgtaagtcagagatgttgcaactggtcacttaacacccgaagcctgcggtccagagaaccgagaccacggacgtgccgctggtgctgggtgagggcttccggcccaggtccaggccagcttctgctcccaggccctgtgggcagccacagctgccgcaggcattgtttagctcacaacccgactgacttcagggtggttcgctgctgaattctcccacctgcccccactcccacgtttatgttgctttgtaaaatctctgaaacctgggggcgttttaggattatcaccggcagaatgttttcctttcttagtggcacacaaaataatggtgcatcttaaaatccactgtgcctcagagtccatgaagccagggagccaggatggataaatttcgagcataaaatcggtaaccttaggcaacacacccaccgcatggggactcgcactgtactgtggggtgggctcagaactccccctccattccacaaggactgggctgagccacatgggcaagcaccatgttacgcacagtctgaaaacctccattccacaaggactgggctgagccacatgggcaagcaccatgttacgcacagtctgaaaaccaggagaatgaaggtgcttggcgtttgtgtcacaattttcacggagtctggctggcttcagacagcacttcccacagccaggagctggaggaactggctgggccacactgcggttagtgacccagctgaccagaccgctgcccaggggctgcaggaggacatggtgctgtcctccccctcacggagcccccgttctgggtttccgtccccttcctctgccagctcaggtgggtagagccaagtccatgagagggacgaggggtggggggaaaaggcccgcggcacaaagctggaatgggccatgtttcgcacgttgccatatttttatattggggattggggacctcggaccttcacatgcaaaatttatgcgaaatgagaggcaaaccaaggccctgctgctctgaaggtctggcctcttgtgtctcctaatggtgacccctgggccccccagccgcttgtgtctaaagtaagagcacgtgtgcgttggggcaggaaacagggaaaaggcgccaattttactaaaatgtactaagcaggcaaatgcgccagacacgccacaaagtactttagggaaaggcaaagcgggcgggggagggggcctgccggcagagaaagtgcggagagggcagagcagcggctcggggcgtttctgcaggtggacatgaaacgcacgatatgcaaatgaatgcaaagtgtatgcaaatgacctggccccgggacccgcgggaagcgagggcttcgcatcggacccgcccgggaggctgagcggggggagcgcgacccctgccggccacgcacggaggtggccccgggccgggccaggcgccgcgctgggggcgagcgcggggcagggggcgggggcggcggccgaaggagcgacctcccccccaactccccacctccccaccccccccacaccccccaactcccgttcagcctcccgccggccgccagaagccgcggttctaaagctgcgagcccgcgggcgccgactgctgcgnnnnnnnnnnnnnnnnnnnnnnnnnnnnnnnnnnnnnnnnnnnnnnnnnnnnnnnnnnnnnnnnnnnnnnnnnnnnnnnnnnnnnnnnnnnnnnnnnnnnnnnnnnnnnnnnnnnnnnnnnnnnnnnnnnnnnnnnnnnnnnnnnnnnnnnnnnnnnnnnnnnnnnnnnnnnnnnnnnnnnnnnnnnnnnnnnnnnnnnnnnnnnnnnnnnnnnnnnnnnnnnnnnnnnnnnnnnnnnnnnnnnnnnnnnnnnnnnnnnnnnnnnnnnnnnnnnnnnnnnnnnnnnnnnnnnnnnnnnnnnnnnnnnnnnnnnnnnnnnnnnnnnnnnnnnnnnnnnnnnnnnnnnnnnnnnnnnnnnnnnnnnnnnnnnnnnnnnnnnnnnnnnnnnnnnnnnnnnnnnnnnnnnnnnnnnnnnnnnnnnnnnnnnnnnnnnnnnnnnnnnnnnnnnnnnnnnnnnnnnnnnnnnnnnnnnnnnnnnnnnnnnnnnnnnnnnnnnnnnnnnnnnnnnnnnnnnnnnnnnnnnnnnnnnnnnnnnnnnnnnnnnnnnnnnnnnnnnnnnnnnnnnnnnnnnnnnnnnnnnnnnnnnnnnnnnnnnnnnnnnnnnnnnnnnnnnnnnnnnnnnnnnnnnnnnnnnnnnnnnnnnnnnnnnnnnnnnnnnnnnnnnnnnnnnnnnnnnnnnnnnnnnnnnnnnnnnnnnnnnnnnnnnnnnnnnnnnnnnnnnnnnnnnnnnnnnnnnnnnnnnnnnnnnnnnnnnnnnnnnnnnnnnnnnnnnnnnnnnnnnnnnnnnnnnnnnnnnnnnnnnnnnnnnnnnnnnnnnnnnnnnnnnnnnnnnnnnnnnnnnnnnnnnnnnnnnnnnnnnnnnnnnnnnnnnnnnnnnnnnnnnnnnnnnnnnnnnnnnnnnnnnnnnnnnnnnnnnnnnnnnnnnnnnnnnnnnnnnnnnnnnnnnnnnnnnnnnnnnnnnnnnnnnnnnnnnnnnnnnnnnnnnnnnnnnnnnnnnnnnnnnnnnnnnnnnnnnnnnnnnnnnnnnnnnnnnnnnnnnnnnnnnnnnnnnnnnnnnnnnnnnnnnnnnnnnnnnnnnnnnnnnnnnnnnnnnnnnnnnnnnnnnnnnnnnnnnnnnnnnnnnnnnnnnnnnnctggggtcctgacggccgcgggcctcggcacagccgggtggcagcgatggcgcgcacagcctttgggaagcgtccatctgtgttgggcaggccccgagccaggctgtgggaacagcggggagggaggtgtgagcctctgtggagggacagatggctggaaacgcagccctagacggctgacttcacttacgtggagcagaaggcggccaggctggtggcggcgactcagagccgctgggctccgaacacactgcggggctggcgctcccccgcccctgcgtccgcccgtgtgtgctggggccgcggccgggctgtgcccacccctcattcaccctgtgggctgaggccggctgacttcaggcccattccagggcccaggaagaaaaacctttcccttgaaaagagagcacgtcgcgtgctcctgtgggtgggggcttgtcggtagctgtcaggcttgtggccccagccagggtgcggcttctgtgcgtccggcccgggtgtgcgtttcctctcctggacgaggaacaggaggttcccagggcagccacctcggcggacgggtcggccggggataaggggcgggggccggtttttcggtacctggcattgcccttcaagtttctgagaggttggggaaacttcttgaggctgggactccactgtgtcccccagacctgaaggggcgagggctgggcctgagcgcgtccgaccctcacctgcccctggcatcgctttcgcggcaggggaggaggcaggaaggcccagcccacagttcctgggcacgttcttccgtggagggctggctctgtgtgcctctggggtcgggctgtgtcctttgcccccgctccagtctgggcgttgggagtcagatacttccacaggggccagacaggcggatgctgtgcaagccggagctgccgggagggtcctgttctgtgcggccgacagcaccgtgcctggaaaagccatgctatttgggaccgtcctgctgggcaagcggccactcttccacactgaaagggaaacagaaaggaagaagcgcccagagcaggaggaacagatgtggcctccacccgagattggggctcagggagggaagagagtgtcgcatcaggatcagtcttccggcaggctccatctctcctgggatgtgctgggatcctctagtgacaggggagaagggaagttcacatgagtggttcgtggtgctggggccgtgctgtcaccacctgtgaagccagggctggtgagtgggagggctttccccagacatcgccttccagaaccctctggggctacgaagccacacaccagccgcccgagcccccctgagctcttcccctgccgcccgctatctgcgtaattcagttaccacctccaggaaatctctctggtttggctccacgtattttcatttctgcatgactggaagaaattaatttttctccctacgcgaggatctggagatgctgccagcaggctgggtcactaatccccaagatcccagccctcagggctgcagtggggagggccgggcctcgccgctgccgcctctggggtggcagggagggtgtgaggtgggtgaggcatttccctgccagcttctggaaccatcttggggctctccgctggcctccccccttccctgctgcaccgttagcaggttgactttggggttttctgattcatcctcagcctcccacagtgccagggtggaaggatggtgcttgaattaagtggctctgaatttccttccctggcagggaggaaccagaagcaacttcagcgtgccccagtgccgtgtgtgccacgcgggtgttcagacccagcatggagggactagcagggccttgttattggtgccacaggtgaaggcgctggcgtctccatggggctgctctcccggcccgcacttgctgcactgcctgcctgtggcctgtgtctcctgctcacagggtcgtggagccttcctgggtgggtcttagagcctacaacagcgctggggcttacacgcactgtcgcgtccctgtaacacccacgagggccgtggagcgttccccgtctccgacgccgggagaggtacagtcactccacaggtcatgcagggagccagtctgacggcgggccgcagcgagtgtctccaggcccctgtccagccccgcccagtccctgtccagccctgcccgggcgttcctttgcctgtgctgtcggtccccatccccagcctgccgggccacattcttagagcacctgagcacccccaagggactgggggatctggtggctgagggctcggtcatgactcggggttagcactgtaggtgcaaaagccctcacctggatacaggccctggggcccatctggggtcagggcacgggtgggagaacttgacctctgccctgcctgggtcatggagccccaaggccagcctcatcccggctgctctaggtctgcacctctggccagccccacctctgcttcctgccctgctgtgcaggggagggaggtcgttgttgctaaagaccctccagaagccactggaacattgcccggctattatcacagacatggcatccagtgttcatagaaatccacgtccaggcaaccgatgtcacctcccaggctggccccaggcccctggggacggaaaggacctaaactctacaatttgtcaatgccggagggtggctttgccaccacttcacttacaggacaaaaagtgcctgtcctccagtgctcattccctgggcaagtattgatcgaacacctactccataccaggcgggggcagagtcacatgcagtgagaggcacccaggccctgcattggatcctcacggcagccagccctgagggcaccgctgctgccccactttccagaccgggaagccgaggcccacagaagttcctagctcacagcgcaggagcccgacgcgggtgggtaccacggggctctgtctgtgacacatccagggtggtcaggcccctggaacttcccactgagttctgacacgggagggccagcgtggggacggcagggagtgggccgggagtgtgcagagtccagtgcacactgtgggctgggacccgctgcctcgcaggggcaggagaggggtggaaacacaactgctggggtactggctagggaggtgcaggccgcttgagggcagctcagagggaggctcacgacagcgtcaccatccctggtgtcagggccaggttgggtggacaccacgctgttcgtccacctcgtggctcagtctctctgggaaagcctgcgtcagtgaacgacaccccagatcctttcctgggggttttattctccacctcctgactttcctgggcagagtgagaaggcctggttctgcttctgcgcttccgtaggccgggaccttcctttcagcggagcccaggccgtgctgcgggaaacagcccaccgggcaggcctgggagggccgccttagccgagagcaaatgcaggcaagggctttgcttgtctggaaaaaaaattcctggagtggaaaccgcccttgtagcatcagtggaaaagactcaggcggagacctggcagttgggctggaaactgacgatgaggagagtgagagataactgctccccagtccccacttctgagctcgcagcttgccccgagggtgggagctggggactcaggacccgccgggatccggctttccgcctgtgctgtggcaatgagtttcctgtggcaataaaacagaagttcagacttctgctttttgtaattcgtgggacctcactgagagccagatgtcactgggaaggaaaacaaagatgaatttggccgtaataaggaagatgtctcccggagccaaggcaccagcagcccagccggcagctcaccccgcactgctgtcggccgcctgcctctgcgtttcccgcccgcttagccacccagggccggttctgccccgtcgggtctgggcagctcagagcctcctcggctgcccctgaggctgaggtcgtggtggatactcggctgcccctgaggctggggtcgtggtggatactcggctgcccctgaggctggggtcgtggtggatactcggctgcccctgaggctggggtcgtggtggatgcttggctgcccctgaggctggggtcatggtggacgtggcaggaggaggtttggggaggaagtccaggcaccggggcagtcttctgtttactcagcagaggaaagtccacaccggggaggcagcaggtgggacctgccggagaccaggatgggagatacctgggagacgcccaggaaatgcccggggcagtcaggagggctcctgcgcaccctggtggccccaggtcacacatggaactcatgaggaagtccccgcccagtgtacccgacctccctgagtacccgggaaagccagggtgccatcaagccagcaggggaagcagctccagctgcagtgagaccctcttacaggtggggaggggctccccacgagggccaggggtgactgcagccccctgccctgttcccggaggcagcgtggagggggatgggcagcccctcggtttcttggagcccccacctggattcgactcccctcccagcagctgcgtgacctacaccacatattcccatctgtccctcgggtctcaaacgcaaaatgcagtcacaaaggcatttaccccttcgggctgtgatgagctgggatgtgtgtgtctggactgggaccatcagcctcgtcccttttctggggggacacccggtggtgtcctgaggctcagtggtggatgcggcatgatgcagctctgcacccaggcccccttctctgcaggcccccgaacagaagttcattgtctgcacctttgcaaaatggggtggtccagagagaccacctcgatggtcagactctggcacagcccagaccccaggccctgtgcctgctccacccacgcgaggacagcctgcaagcttggggccaagccctgggcccccgggtgcaccacgccacctgcagacccatttacagaggggaaactgagggtaagatcagttgtactctagttactccctgtcagaggcagaattcccacttgggagccgaggccacctgacttgggccctccagagcctaggtatttctgcaccaccagggtccccacgcaggtggtggggggctctcaccaggcctggggattgccgggcccctccccttgccttggccaccacaccagggctccacagcctagtccagcccagcctgtactcagagcgcagtggacatggggcccttccatgcagcctctcctgcgccagagacatcagaacccaggactgcccctgaccgggggcagcgttgggtctctgggccgtggctgtgcccaagtggacagaacaggggccttgggtgctggactccacgtatccctgtgcctgatggaggcttgcagctccaccacgtggccttcagctcccttaaagaatgcgtccttctggccaggcacggtggcttacgcctgtaatcccagcactttgggaggccaaggcgggtggatcacgaggtcaggagatcgagaccatcctggctaacacggtgaaaccccgtctctactaaaaaatacaaaaaattagccgggcgtggtggcgggcgcctgtagtcccagctactggggaggctgaggcaggagaatagcgtgaacccgggaggcagagcttgcagtgagccgagatcgcgccactgcactccagcctgggcgacagagcgagactccgtctccgagaaaaaaagaatgcgtccttctgaacttcgggggtggaagagggcagggcacggcccttcgtgcctctttcgtggcatctctgcctcctttaccaggccctgccaacagcaagaataggcaggcagcgaggccagactcctctccgctcctctgggcctccgtgtccccatctgtcccttgcgggggttggtcagcaccacacactgtgcacagggaagatggagcctcgcctgtcgccccccgatggtgccggccgtgccggccaggtgtgtggctgagaccctctctgtgtggccctgctggctgctgtgtccccaccgtgcctctgcggccgagctgctccttcagggtccagcacttttcatgcccagaagcccaaagcatccaacaggggacctgggagcagagtgttcgggaacgtgcatggagcctcccctatgggcccaagtcggcccctcctgtgacctgagcagccactgtggggcagcccttctcgcccgtgcctccatgtgccgaggggcatggggcagcccttctcgccggtgcctccgtgtgccgaggggcggcctctcccaagggagcttcggcatgccagggaaggggcgtggatcatttcagactgtcttgtggccacgttgaaaaagggaagaagagaccgggcaaaattaatgtttataatatataatcttacttaacccagtgtgtccaaaactcattattttcgacatgcactgatttttaagcgactgaggtatttttttttcagctctcccgggggcagcgtgcagcttggctcactggggtctcgcctctgtcctcctcgtgccggtcttgtgcttgcggctgctgtactgcacagagcagagggacggggatttcaccaagtcacatacgcgtggcatgaagtggccactatggctgtggggacgcagacgtgtggcactgtgaggcgtgtgaggcgtatagaggcacgtgacgtgtgcagaggcgtgcagacgtgtggcactgtgaggcgtgtgaggcgtatagaggcacgtgacgtgtgcagaggcgtgcagacgtgtggcactgtgaggcgtgtgaggcgtatagaggcacgtgacgtgtgcagaggcgtgcagacgtgtggcactgtgaggcgtgtgaggcgtatagaggcacgtgacgtgtgcagaggcgtgcagacgtgtggcactgtgaggcgtgtgaggcgtatagaggcacgtgacgtgtgcagaggcgtgcagacgtgtggcactgtgaggcgtgtgaggcgtatagaggcacgtgacgtgtgcagaggcgtgcagacgtgtggcactgtgaggcgtgcagtctgggaccctgcactgggggagcgcaaaacagcccccaggagttgaccagtgaggcaaacgggaggtgcaccaggcagggccggggccacagggcaaagcctgtctggaaaggagagaaggctggtgacttgcacactgagggcctggcctgtctctgggcgtgcggacttccatcagaagtgacgtctccgggtcctggctccatgccgtcacctccctcgagctcccaggacctggcccaagaggccatttttcttttctttctttctttttttcccccagacacaatctcactctgtcgcccaggctggagtgcagtggcgcaatctcagctcacagcaacctctgcttcccgggttcaagtgattctcctgcgtcagcctcctgagtagctgggattacagccacacaccactgcacccggctttttttttttttttttttttttttttttttgtatttttagtagagacgggtttgccatgttggccaggctggtctcgaactcctgacctcaggtgatccacctgcctcagcctcccaaagtgctgggatgacaggcgtgaaccaccgcgccctgcctcttttttccctttacttatagtcggggtctccctctatcgctcaggctggaatgcagtggtgcgatcatggctcactgctgccttaacctcctaggctcaagcgatcctcccccttcagcctacagagtagctgggactatgggtgttcaccactatgcccagctaattgtttttttaatttttaatttttttggtagagatggggtcttgctacatcgcccaggctgtctcaagctcctgggctcaaacgatcctcccacctcagcctcccaaagtgctgggattgtaggcgtgagccgctgcacccagcttaagaggctgttttatggtcattgagtccagcgccagggcggcctctttcctggaagtgtgtgctctgcctgttttccgggatggggaagtgggggccgtgtgtagggggaagcgggggccatgtgagggggaagcgggggccgtgtgagggggaagcgggggccgtgtgagggggaagcaggggccgtgtgaggggccacctggcaggctgtcttcccgacgacagcagccccaaggtcactgcgtcgggtgccgttgccaggggcgcacgtgcaggtgcatgtgtgtaaagtctgagtgtgtgatggtgtgcacacgtgtgcatgcgtgtggggtaccacggtgtgaaaaccgggccaggaggaagcatgacctatgacctggctgtccagactcacaggggatccccacagccagcctcagagaatgttccacaaatgataagtgccccggcgaagtgcttaccctccccaaaccctcctccccatcccctctgcactgtgaccccttgagagcttttataaagcgtgagccgtgacaccagggctcactggggaccacagcacctacatccaaccaaacctgcccagacccagggaccatgctgccccaggactggggtgaccagagggacaagcagaggcctgagctgcaggccagtgcccccagcacctgctcactctgcaccatggggccagcccacggcccttctccacctctggctcatccatggggccggcccacggcccttctccacctctggctcatccacggggccggcccacggcccttctccacctctggctcgtccacggggccggcccacggcccttctccacctctggctcgtccacggggccggcccacggcccttctccacctctggctcgtccttggcacatgaaggggcttctgccgaggagaccttcgggttggaaaggtcacttgtcacttgccacagaccggtccttgtgagcgcttcccacccttaagggtgtgcttgtgtctctggaagggggttgtttgcagcaagaaggtcgctcagctcccactcactccagccagcagccttctgggcctggcctccaccctcctggtttccagcacagccaggctcacagagccagggctggagtcacagcagtgcctccgctacctgcctgcaagttggccccagttgacaggagcagggcccctgggagggaggctgagcccctctcacatttaaggtgcccaaactcagggaagaggcagcctggctccactcatcactcctgggctgttagcaacgtggatgggtcccctggcaggggcaggttaataggtcatgagctgcctgtctcagtctccccgctgtttttttaattgtgggaaaatacacataacgtttatcattttaagcatcgtggagttatagtgtcacttcagtagcacttagtgcactcacaatgcaacgccacgccccccgccagctcgctcccacacgtgctcatcacccggaaaggaaaccccactcccactgccactcactcctccacccccagcccacagtctgcccctccccatctcctcactcctccaccccagcccccagtctgccccctcccccatctcctcgctcctccacccccagcccccagtctgccccctccccccatctcctcgctcctccacccccagcccccagtctgccccctccccatctcctcgctcctccacccccagccctcagtctgcccccgctcctgcatctctgtgaacttgcctgttctggacaccgcggatgaaggtgacggggccacctgtggcccttgtgtctggctttgtcagctcggggccttcgtggctccccgcactggagcctagtggggagcctccttccctgtggctgagctgcactgcactgtgcagaaagaccacgttttgtgtgtccgttgatggacgcgtgggttgttgcccccattgttgttatggtggaccatgcagctgtgggcatgggtagcttttgcgtggacgatgcagctgtgggcatgggtagcttttgcgtggacgatgcagctgtgggtattggtagcttttgcgtggaccatgcagctgtgggtattggtagcttttgcgtggaccacgcagctgtgggcatgggtagcttttgcgtggacgatgcagctgtgggtattggtgacttttgcgtggatgatgcagctgtgggtattggtagcttttgcgtggaccatgcagctgtgggtattggtagcttttacgtggaccatgcagctgtgggtattggtagcttttgcgtggaccatgcagctgtgggtattggtagcttttgcgtggacgatgcagctgtgggtattggtagcttttgcgtggatgatgcagctgtgggtattggtagcttttgcgtggaccatgcagctgtgggtattggtagcttttgcgtggaccatgcagctgtgggtattggtagcttttgcgtggaccacgcagctgtgggtattggtagtttttgcgtggaccacgcagctgtgggtattggtagtttttgcgtggatgatgcagatgtgggtattggtgacttttgcgtgggtgatgcagatgtgggtattggtagcttttgcgtggaccatgcagctgtgggtatcggtagcttttgtgtggatgaatgtcttcatttctcttggttggattcctaggagtagaatccctggctcacctggtaactctgggtttaattgtccacggggtttcaagggataaattatcaagaaaagccactgtcctggtgggcagggggcttggccttgctgtcaccgggtcctcccgcaggcccgtgggagcagccctcaccacgcctctcacaggcgatggtgtgccggccccggtgatggatgccgttgcctgaggtcacgggctggttcaggggcgccctgggttgtttgcacagcggcagccagactgcctgcaagctgctgtcctgtttgattccacaaacagttatgggatctctccagcacctgctctctgaccgcgtgacttgtgccagattctgtacctggtttctttgcttctactcctgacccccatcccaggtctattttgcacttggcagccagatggaacccattaaaggccagtcacagctctccgggaacggagccgaggtcctcgtggggcctccaagaccacacaaactcccctcccttccaccacccactctgctccgccttgctgctggcccaccgtgcctggctgcagttcagggcctttgcgctgctggccccagtgcctggaatgctccccccgacgcctgcgtggctcccagctgccctccttcaggccttgctcagatggcaccttttcagtggccgtccagtcacccacccgtgcctctcccaaccaccacacctcccagcctcggtctcgtacgtttgcacagtgttcctgggctcccgtccgaggtcagctccgtggggcaggacttttgcctgtctgcacctgcacctgacacacgaggcgctcagtacacaggcaccctgtcttgcctgagggacggtccccataccccacctggcgggtgacagcgcccggggtcgccggctgcttcagggacgccctcactgggtgctggaagagggttgtttgcacagcggctgggctgcctgcaagctgccgtcgtatttgattccacaaacaaatacatcccctgtgtctgctttccagccctggggcttgatcatgggtctcgcctgtgtgggggcagctggacgtgtggccacagaggcagcttggagtgacctggcgttgtgactccctcacagaccgggcccgctccacctggtcatcggcccccaaggccagggagtaggggagcgtccccgaaaccacaggatcccagaaacgcccccaacaaggacagctgtgccacacaccgggcaagaagctgccccgggccccagtgctgccgaacaaaccaccccaaactcagaggcgtgaggcaaccctggtggtgctcagagaccctcgggccaaggagtcggaacagagccccgtgggacagtgatggccccgtggtggccagggtctcggccaggtggccttccctgctggggttcaaaggctcggcttgggggtgccaggggctcggtcagcagcggtgggtgccgggagccgctgcctgtggacagaggcctccgtgaggccctccctgcggctcccacttcagaggacgccccacactgggcagggttgcccgtgtcagcatctgcggcttttctgagctgaccgcagcgtgtcacgaggcgcctttccatcgtggcccgtgcagcccagcaggaggggaccggatcccacctcctgagggagcaggtgggaagtctggctgacctgtcttcgggtcagtgttggctcccgggtgtccgcacgggcggacggccagctgggcctccggggcctggggaggaggaggcggaagggggatcatcccaggcagtgctggcttccccggctccctctgtgacagctgaacccccctacagctgcagcctagccccagagcagcccggagattatcacctgcaggctgcatgccaggctggtacctgggtggcgtggcccccatggccagggtcgctgtctccctggatgcccagctctgacctcatgaagggttgcagggaggtccctggaggagaacaggtggacccacctcttccccagcccctcctccaccccggcaggattcagacacccagaaaacaggctgggtctggggtcaggatctggctcgaggaggatctggggcccccagtttccagctgcctctccccacagatggggcccagcggcctcacctcagcgggggcatcagtgctgcctggggaagtccatgcacccgagggcagggcgggacccggcttgtcacgtcgacctggccttgacgctgacatctctgagccacgcctccatctgacccaactcgttaggcggtgcccgttcattccctcgacaaatagtgattggtgcctgctgtacgcccggggctgctgctccgtctggcagagacagagtgaaggaagggagcagcgatgatgttgccccaccaagggccgtgggggttgacactggcttctctggtaaagggacgtggaacttagctgcgggaggagggaaggaccatgcgtgccaggcccgaggcaggagtgtgccgccacctccaggaccagtgaggagccttgtctcagagaaaggagatgagggcagggaggcagcgggggccggacggggctgccctgctgctgcaaggacctcgctgtgaggtggggcacaagggacaggcacggaaggccttgtgagctcctgggagcccacggtgcaccgaggcaccagcccaatccagaggaggaattcccagcaacccccactgtgaacacctccgtcccgtcttacagccgaggaaactgaggctcagcaggccccaccctggcacgcacgggaccatggccagcttgtcccttgggaagatcctgccctcgggcctccctgcagccatgcagtgggggcagcgctcacccacgctgtcctgacacaaagctcgttggctgacccagggccacctggtgtgacgcatgacaaacctctgtgtcacagccctgagactccggcctggtgactggccccgagcaggagagatagaaagagaggtcgctcagcctcgacccctgaaaaccacagcacagggctgagcagacaccgacattttggagacgaggctgggacagacgccccccagcccatagcacgccaggtccctcggagcgcttggggggccttcagtggtggattgaggaggtttgtccagctggacattggaggaggaatttgtcacaccttttaggtgccggaactccctgcacggaacccagattcactcctcgcctctgggaacaaggttaggctcttggaggcggcagcccggccccagaagccagttgtacccccggctgcggctctgctctgccctcctgggaattcgctcactggccccatcacagtgggattaaccccctttcacaggtggggaacgtgagaccgcccagcgcccaccaagtgctccctgcacaattcacgggggcctcccccgtctcacggagctgaccttccagggggcagaagagatggtgccagttcgaggctgcagcctgtgggagacaggacagccgtgtctttctggtcctggtccttctcagcctctcttttaaaaatcatcgtaaaaacgttcacatggcgtctggcgtagagaggatggcaccgactccgcagtgccacccatgtccttggtaccggggctccctatgccgcagcctggaaaagcccgtcgccggggagcaggagcagctctgagcccccgggaaagcacattgccatctccacacacgcaggggctcccggcgggcagtcgggcagacagtgaaggctgagggacggcccctgaagaaactagaagcctccggttaccctggtgccctggagggagaagcagcattcagagtcatccaggtggcctcaggcaggcctggagcctctctgagcctgtgtctgccactgcaaagtgactgcctgtcccgcctgccaccctcagagtcgtccttctgctgggatgagagcagcgcagggcactcggagcaggtctctggctgcctggcacaggaagggcctccctcccctgcagaatattccctgggggctgttttgactcagcagcaccaccccctggccccctgcagatctcctggaggctgcatgagagcgcctggtggatgagtcagggtacccggaaggcaccgctcaggagggagcagcagagcaggcccctcgtgggtctcccccgagcagctgccaccacggctgcggctgcaccgtgcccgagcccggcccatctgcctgcctggcaccttcccaaggccgggggctgggagaggaccaatccgggcagggctggaacccggccctctgcccactgcggacatggcctgctgccccagggtcagcgagctcggtgtccaggacgaggccgttgctgtgtgactccgggcgggtccctctctctccactgcttcccccttgggctggtgcagagctgagacccctcgcagacacagcaagccctgggcttggccacggtgaccggtggcttgtaatttcttcagggccgtccctcagttttcactgtctgcacccacacgtggtggcggggagtgtggctctgtggccttggtggagagagcactcagtgaggtgggaggcggtggcagcggcctccatcagcccgaagctgtgggcaggactcgccttcacagcccctgattgggtctaaattcaacaggtggtttcctgcacctgcttggcccccagtgcctggctgtccccgccgcgtccggccagctggggcaatgggtgagaccatctgcatctgggcagcagaggctgtctgacgagagtgacctcatgctcccggccatggggctctgcctctgggagccacaaggcttgtcctgtgctgccttgcaggggccactccctgcttccagctgcttcgaggccccacgacacagcaccgagagctgccctggtggcccccgcagccaccactgggccctccgcccgctcttctccccctggcctgtgtctgcccattgctggacccgtctccaaggccatcccagccatcgcccccgagagcctcgttccccaccttcctggaccccgggtccctctccttttgtctcagcagagtctagcctccttgtggtcggcggccccagggaggcagggccagggcggagcttgtgcagggcgactggagcggtcctgaaggcacgcagtgtgccccacgtcagcacagccgttgcagctcccagggaatagcaaggaaggcggggcccagagagggcagatcttcactcaggctcactgggactcagcccagcaggtgtagcccctccagggtagacatgaccaccacctgccccgccccaccgcaggggtccttgctttagcccagcaggcgcggccctcccaccctggctccttgctttagccctggctgggttgctgtgaccttgcctgaccacgcccccacctccacccgcggtctttgctgtaaccatggctgggtcgctgtgcacccttgccgggctgtgcaccctcagcatgagatcccagggtcttcgtggtccttgcactgtggtgatctatgctccaaagtcctggccagtgagcctggcctctcacctttgactgggctcctcccccggccccacctttgagagaggacggtcctcgggggtgggttcggcattctggtctttcccagagcctccccaacctagacggtgccggtgtccagcccaggagcccagagcccgagttccaaagccgacctccatgtcggagccttcccaccctgacagcaggagcgacatgtgtgagccgggttgcggaggatgcgcagcttggcctccctccccgagctgtgctgcgcgccaggactgggctgtgcagagcctgcagccccttcacaacccagctgctccccagctgccccctcacggctcagttgctccccagctcacacagcaggaagtgcatttgttgctgaaattgtctcaaaggccccaaacaaacagcccttctggtggcagtggatgtggcgggtaacatgggtggccaaaggtctgagaggcccccactcagcttgaggtctctgtgcaagtccctggcagctcaggaaacctcaaggcaactagcagctcagcctggtggcctgcctggaaaaggaggcaggcagggggcagtgggcagaagcgccgaatcctcacctcctctgtgcgatgaggagggggtgcgggtcccccccgtttcacagggagaacgctgaggcccagcaaggccaggggactcgcccacaccagtggacgctgacttcaaaccccaaagctgtgctcccagctcgccaacctgctgtgccatctcagcacatcacaaactcccccgcgtctctccctccacatttggcgaattggggagacgtggggtatttggagggacctggtgggagcaggcagctggggtgcgctaggtgagggcgctgggggcctgtaaagagccgtgtagagctggtcgggtcccagctctgtccgtccgctgtgcaccttgagcagttccttcctctctgggcctttgctgccccatctgtacggtgggaagagtgagaggtttatgttttcatcgtgattatataacagaacagcctcctgggtgggggtgctgccgaggttaaatgagttagtattttgttggccatgtgaaaccacgcaggggcaaagcctgtgccacgggaacagtggtgtcaccgtctccgaggtcgggatgggattccaggaaggggccgtccaccaccctccgacggctgcaagctgggacccggcctgtaggcgggatttgcccaggaacaggcgtgggttggctgctgtcccgggcattggtgcattcttgaccccgccctcgggaaggcctcaagcatagccctggcgtgggataggagaggcagactgcttgcagaatgtctgccccgggcatcagcatggccaggccctgggactcaggtcctgcctcctctgtgctgcaaagggcagacaggatctaatgctccaggcccatacagccccttcccactgcgcccacgctggtgcccggggcagacatggtgagtgcaccgaagccctcggccccctcaatcctgctaaggcagcagcagtcttcccggggaggatcctaggccctgctgctggacaggacttttactctggctagaccggctctgagagcccagccaggtctggccatctccgcatccttagactgcagaaacctagggtgagaacagtttctgtgggggctgttttccagggaggcatggggtaccctcttgggtgaagaccctcagatgcccttagaccggaagtacccccacccaaagtgtggcgcaggccagcctcagccgttgaacccagctcccgggatgtcctggccacgacacgtttggtggcatcgacaccagccctgaaatcagagccctgggctcacggctcaccctggcctgtcccagtgatttaaccctggacaggcagttgcttgtgtgggcctcagctttgacacgtgtgaactgggagtcaaaatgcgccgcgcagagaggtctgggtgagacggggtgaggcgtccccattccccaggtagacatttaatgaagcaagcgaacgagaaactgtgtcattaccacgaaggctatggcgcatatggggggcgtcccaggtgccgccgaggaagcaacttcaaatgagggagctgcagccgcaagtcccccggcaccgcggatgtacggctcaggaaatggcagctgacaggatcctaattcccaggggtcctgtttagggtgactcttatcctcctaccaccccagccttaaggcagaacttcctggacaaaatccaggcctccccccaaccgccccccctccctcccccagcaaaatgtggcccaagaagtgagcagggggctgcagacagagagggagggcaggagaggggcaggggctggaccccacccagggagatcccgggaagaggggcccactcgccgccctggatcgggaaatcccggctggccacgtgccaccacctccctgccaccccatccgtcaccagccagacacatttccgatcctgccaagctggggtggggcggcgtggcacggaggatcggctcggcttccctgctccccccgcccatcctttctgctgcctgcgtgtaattaacagagtaattaaaaacaggatgagttaattggtattcatttatgtggcagatgtttttaattgaggcaggaaacaatttacctgtttacatcaacaatggcagaggcaggcttgtaaaacacatttttaaaaatattttcctcccctttcctagaaagaattgaaatcacttggtctcccttgccccaggcctccgccctgtgagagccgggcagtccttgcctgggggaaggcccagggtgggggcggagcagggaggttccgccaagaggaaacatctgtttaaaaggtttgcctccagagcagcctgttttctttaaactcagagaaaggatgtgttgttccaggttgtggagacacccgtcccgctgctctccaagatgcctccccagtgagtttggccctgctgtttaatgtagccccctggcgaggggcttggcctccaggagggcgggaggcagcctcaggtgggcctggctggaggaagaccacccagctggggctggcaagcaggcagggcagggaggggctggggacccagtcctcctggcagaatccaggagcaggcaggtgtggctgccccacggggaggcagaggccgcccttgtccacctgcacttttggtgcctttggcattgcgtggtggggcctcctgccactccgtcaccatgcaccacctgtggccgttggagtttgaattaattaagatgaaatattcctggccaggggtggtggcttccgcctgtaatcccagcactttgagaagccgaggtgggcggatcacttgaggtcaggagttcgagaccagcctggccaacatggtgaaacccagtctctatttaaaaaaaaaaaaaaaaaaaattggccgggtatggtggtgggcacctgtaacctcagctactcgggaggctgaggcacaagaatcacttgaacctgagaggcagaggttgcagtgaggcgagatcatgcctctgcacttcagcctgggtgacagagcgagactccatctcaaaaaaagaagataaaatgtaaaattcagttctcccctcatagggcttcctttcaagtacttggcagccagttggggctccagcgactgtcagtgcatgggcctagaacattccaccgttgcacaagcttcactggtcagctgacttgcgagtccctggtgtgggaggacggcaggcctcgggcgcacaccgcctgaccctttcactatctggggaaggagggaggcaggaacgcccaccccagggagcgggttgaatccttgagcagagtgctcgggaagctgctggtttacagactggcactaattgagcacttgctgtatgcctgcacttgtaaatcgctttaattctcatcaattctcatgctgcttcccaaggtaactctccagggagacgctatcattggcccctttgtgcagatgaaggaaccgaggcccaggagttgcagtgtggggcggggtctgatgcggcctccagacctgcattgaaacagtgtccacggattacgtggagcgacactgactttccaacagttcctcttgtaggcaccatccttgtctttctttttagagtaaacatgcaccagactgcacgtgctcagaagtaactggggtcccgcccggggactccgcggagaggctgctctgggtgggagggaacacccgcgcttgccctgcaccatgcgtgcagtttggagaattcgaggagtgggttttgcccttgtgatcatggccatgggcactgagcttcttacccgtaaggctgagtgaataccgggcggtagggacagcgcctgaggccacgctgatgttaggaatgtttatttagaaatagagtgcttgttccctggtgctgcaaagaaatagcacttgaacgtaaatttaattctctcagcaaggccatatttactttctgcagaaagggtacactcgccagcagttttgccacgagagtacaccgaatgaaggagaccagggtcatttataacctgacgctgtgtccggtttttttatacctactgctgtgtccggtttccattggctggaacgggacctcacattctgtatttgtcccgattggctcgcaacttagaactttttaaaagaggcaaaggcagaggagaacaaaggaaggaggaagtaatttgtggaatgctgagaaaggtaaaaacaccttcaaataaggaagaggaacaggccgtgacctaatgcttgcttcgaccagtataaacatgccagggcagatacttaggctaaattgtgggagctaagaacataaagtacattgatttctttattaaggctagcagatatttaagaatgtcagcacaggtctttgaataaattttgcttctaagagaagttactgtttattcctaattagacggggaggaaagtatctttgaaggggaacctctacttttttacactgataacccggcgagcctgcagctccgacctctctcagcaccaaccctggaggccgtgtggctccaaggttctcggcaccccctgccgtgggaggccgggctgggccatgtgggtgacctgccatggaacttctgggacatttcaaaagttcttagggcaagaagacagaatgttctgggctgggggctctggcctgggcatagctctgctcagccctccctcctggaggcattggaggccacccagcctcctgtgtggggctcacaacataaaaccagcaacagccacaaattttgaggaggttggtgggccgcacgcttggagctcagggcctgtgccagtaaccgtgtgggctctggaggggcgggagccccaccctgtccaggaggtgagagtggcgaaggcctccccacggctgtgggctgggacctcgttgtgatgcagctggtcccaggggcagccacagcccacactgcgaaggcagggggatcagggccccttctgatgccagggcaagaggacagggcccaggccatggtggggtcttctcccaggcctcccttcacccccggcctgcagggatcagggagggcccagcttggtgcctcagtgtcaaaaaactgagaagcaaaaggccatttgtgcgcgtgtttgcatttgggtgggggtgagaaagaaaagccacaggcatccccggcccagggtcctggggtcccaggggcttcctgcagtcagcaccagggaggccacgctgtctctccatgggggccacttcctgcacagcctggccatgccagctcacaggacgtggcgggaagccccagggcaaagccagcccaggctgtccactcctccactccagggaggccacctctaaagtcctgtctgggctgctaggatttgtgggtttcgcctgcaccgtctcctggggtccctccacgcaccccggagggacagaggggattgtgaccccacactctcgtccgcacccacgctctcctccgcacccactctgtcgtccacacccacactctcgtcttcacgcacactctcgtctgcatgtgtgtgtcatacgtgcgcacatcacatgtcacacttatgacactgctgggggttgctgggggaacattctggcacttcagggaaaacattcttgacttgacgcaggggcaccatgagccgccagaccctaattattccttagcgtccacaccggcagtggctgactttaaacttggcagccgccctctgcagagttcaaggtgatttgcagccaattcacacatttttttaaacagcgacgacactttgggaaccggtgtagcctcccctggcgcctcattggtggaaaatcctaacagaggcctcaggtttccaggggtttccagaccctccgcagacagctgagccttccctgcaggccctgcacgtgggagggtcccgttcccagggctgtgtgacctgcctgtccccagcatcccagcctctgtgccctccccggggcaggccctcccctcccacggtggcacctttctcccacggtgccagttccgcagccttcagaaccaggtgcagcctcttcctggaaggttctccgctccgcttgtgtctggggttgtctgtgggactttctgctccacacctaagtccaggcatgtggctgtgcagagggcagggccagctaactcctgcagcccgggcctggggtcagccgacagccgatgatctcagattccaccagttcttctcttttttcctttttcttttttctttttttccttttttttttttttgagacagagtcacggtgtcacctaggctggagtgcagtggtgggatctcagcccactacaacccccacctccctggttcaagcgaatctcctgcctcagcctcctaagcagccctctttttctaaaagaatccgtgcttctgcgcccgtctagtaactgatacaacgttcgagaccctgccctcccctctgttggcccctccacgcctgtctagtaaccaatatgacagccagcctgacctcctctctgttggccactccacctagcagtctcgccttcacccccaggggctgtagcaaggaggggcctgtgccagtggccaagaggcatttttaaaaataaaacaaggatgtggcatacaataaagggctgggaggcaaggagggaaggcaaaggagccccccatcccccttccccacccagcccacccacctctccccaggggccgcccttcttccttccagagaagctctgtctgcagatcagaccacctttcactcaggccggagtgttctgcagccatccctgaggtcacacagcccttaccagacaacatgcacacgcaacacccaccccacgaatacacacaggaatacacacgcacacatacacccacatgtgcacgtgagtgcacacacacacggacacagccatgcacacgcatgaatacgcatatgaatacatacacccccatgtatgtgtaagtgcatatacacggacacacacccatgcacacacatgaatacacgcatgaatacacacgcatacacccacatgtatatgtaagtgcatatacacagacacagccatgcacacgcatgaatacacacatgaatacacacacccacatgtatatgtaagtgcatgtacacggacacacacccatgcgcacacatgaatacacgcatgaatacacatgcacacacacccacatgtacacgtgagtgcacacatacacggacacacacccatgcacacacatgaatacacacatgcatgaatacacatgcacacatacacccatgtgtacacgagtgcacacatatacacacggacacacacccatgcacacaggcacccatggacacacatgaatacagacccatgcacccacgtacactcatgcatgcacactcacacgcacacatgcctaatggatagagggcaccgtgacgctcctgagaggggaaggtggcagggagtggcccagagagggcgagattctgactgaggtgaccagccacacagcccaccagggcgcccgcccaccctgtgtctagcccacgtgtctgctcgttctcttgcannnnnnnnnnnnnnnnnnnnnnnnnnnnnnnnnnnnnnnnnnnnnnnnnnnnnnnnnnnnnnnnnnnnnnnnnnnnnnnnnnnnnnnnnnnnnnnnnnnnnnnnnnnnnnnnnnnnnnnnnnnnnnnnnnnnnnnnnnnnnnnnnnnnnnnnnnnnnnnnnnnnnnnnnnnnnnnnnnnnnnnnnnnnnnnnnnnnnnnnnnnnnnnnnnnnnnnnnnnnnnnnnnnnnnnnnnnnnnnnnnnnnnnnnnnnnnnnnnnnnnnnnnnnnnnnnnnnnnnnnnnnnnnnnnnnnnnnnnnnnnnnnnnnnnnnnnnnnnnnnnnnnnnnnnnnnnnnnnnnnnnnnnnnnnnnnntccacgcgccccctccacgctccccctccacaatccccccgtccacgctctccccgtccatgctgcccccgtccatgctgccccctccactctcccctcctccacgttccactcctccacgctgcccccgtccacgctcccccctccacgctcccccctccatgctgcttgtggagctcctgaaggagctgtccctcctctgagttgagatcagactggagaattcactcagataggcagacccagagcaggaggccaccacccaccagtttccccaccccgcgacccacccataggccccccagccccatctcctccccaccccacacccacgcctcctccccaccccacacccacgccaccacctggcggcacccccagcacacggatcctcaacggaagcttgcttgtctgcaattcggctgcctcccttggtggcttgggggcatggagacaagagaagggacccgctacccccaggactcccagggtgccagggccagtgctgggtaaggacagcgccccttcctccctccacccctgcccccggctggcagccacacccccacccccaccccgccccggcagcgggcggcccagattgtggggccacctcccccagggcgctcagggagttgctgttggcagcgcagctctagcagctgggcaaggaatgtgcttcctttgtgtgcggccacggggcaagcaggccccagacatctgggtcccatttgcggccctttggggagcagggaagatttttcactccagcctctgagctcaccactctcccccagcctttccaggctttgctcaaccggcagggtgctgtagaagaccaggccctgggcactgtccacagggtgcagggcagagggtcagggcacctttgatggcacctttgatggctaggggctctgggcttaagccagaggacaggcccagactcaccctggtcgctttaaaaacatggcaagactgtgatggctgcgacagcgtcctgcccggcaaccacgatcacatttttggtctagtcgtctttctgtgcgtgtttttatttccaaaatagaacctcatgctttgtcgccttgttgatgttcactcataggggatgtcaatagagagcgtcccgtgacatcatttttgcaattaaatgtatgctcgcagcactgcacacagaagtgtgcaccacaaagcatcacgtgcacacggctatgggcctgacaaacgttttccgacctgtccccaaggcctccgatccccctctggtcactgcgctgtcagggtggccaccattcctgacctctagcatcacagagtgttgctgcctgattctgaattttctagaaacggactctcgcatcccatgctctgcggggcctggccaccgcgtttgtgagagaccgcttgcagtgctgtacatttgtgagaccgtgtgcagtgttgtacttggtgggcctgtcctttttccttgctgtattgtattccattgtatggccgtgctgcagcctcgtgtccctctacctcggtgcacgcttgctgaggaagtggccggtgcagctgtggcttgttgctctggaggcacctgtgtctgtgggttggctcttctgcaggttctgtgcccaggagtgagccggctattccagcagctgtgactgttccagtcagcagataccaacaaacagctttccaaaatgaaggtggccacggtgtgattttcaggttccttagttttgtgtcgagtagataatttatctacccagccctctctgaggagtcatcgtatttattccgtttgtcattctcataaacgatgctgtgacaaacatccttgtagatcactgtttgtgcacatgtcctgagaatgcattcctgaaggtggaattgctggtcccggctgagacccccccacggaggaatgaggtgtggagtagcggagggcaagtgcagcattggcatctgaggcctggttcggctagagacaagatgggtcacttctcttctccagcttcccagcctccctctcaccagctgtgaaatttgattgtctctcaggtcccttgcagctctgatatgttgagattctaagtaccaaagtgtatcagtcagctatcgccatgtaacaagctaccctcaaacagtggctcaaagcaaccacccttctttggctcacagttctttaggttggcagttttggcaagctcaggggggtggttcttctgggcgtggctgggtttgctggctggtccgtggtcagccacggtcagtccagctccaccaagtggccgggccaaccctgtcctgcgtgtgtctcatcttgggcgtgttcacgtgggggctccacagagggctagtggggctgcccgccgctgacgtccaggctcagggtcatctgacatcccttgtgccacatcctgcccccagccaaagcaagtcccccggccagcccagatccagggggcagggaagtggaccccgcctctgcactggaagagctgcaatcccatcgaaagggcaggggctttggcagggtgggaaatcgaggccattagcaggaaacgcgccttgggggagagggccctgaatagccatgaccggcattccctggcctcctgctgcaggacagactcaattagctccttattcctcagacgcacccccgggaggtgtgttcctcccacttaatggatgaggggagctgcctgctgggctcacacggcagaggggacaggcctcgattcaagcccagcccaggctctgtcctgcagcagcgagccgccccgttgaacctgcagaggacagggctgccaggggaggcagatagggggctttgtccttatgcgccagtcagcaaacctttacggggccctgccgtgtgccaggtgctgttcagggccctgccctgggggagacgggcgtaaacacgaggaccaacacagacggaggcttcagacattgacgagtggctggagaagaaaaatgggtgatggggcagagagcgtgggggcagggacatgggcggtcagggaaggcttctctgaggagggacatttgcgccaagacctgaatgatgaggagacggctatgcagagatcgagggaagtattccagtaggagccaaggccctgaggccaacgggagggacagaagcacagctggcgtggctggccaagactgacggagagacccccagcccatctgtccccatctggccccaggacgcacagcacactttgtcccatcttccgcatttctttggcgagccctgggttcacttgcagggtgcagctatccagagagccttcttggtcctcaaaaacccatgagggaggctttcttctctccttgggaaaggaagaggcaaggccaggtccgcctggagccacgtagtgggttggggaggcgcgggtgggcccagcctgcaggcagaggccggcctgtgcaccttccaacgggaagccctgggccggggcccggagggagtttgtgagattttcgtctgctacggttcagcagcacttctgtgacagacgggacctctgcacccaggccggctgaaggcatgccctgggtacctgttcgtgttggtgatggcagccggtgggcagtctgggccctgccagccaactctgggcaacagagcttcccccacacagctgcgaggcaggagggggggtcttcactgtgccccagaggctctccgatgggtccccttccccaacactgatgctcagtgtcacctatgggccagctctgggcacagtgccaaagacaagccccacctgcaccagctccacgcggccgttgtggccggacagatagcccgaagcatgacagctgggtggccagggcgagcggccaggcgctctgttctagacgcttttcgtgagctcatgtacttcgtccctccgtgattctgcgggaattccatccccattcccattttacagatgagaaaactgaggccagattaggagacggaaaagccaactccgttcctgcagggagagggcgcctgaggttcccgttccctccctgcccctgtccttcagatcgccagagatgacgtccccgtggcagggccacagagggcttttgagtttacgaaagcctttttgtttgctgtgaccccacccaaagaggcactgcatcttacccaaggggagccagagactcatacacatttggggacggcccccaccccgagttcacagtcagttcacacagcggcgcgggaggcgaactgggtttcctgccacctggccccgctctgttgccatggcaaccccgtgccgtccatcgtcatcacccacaggccttggggtcagggtcccttgttcctgtccacggcgggaagggcagcaggagtgagtgagtggggccagaggaagggtccgccctgggtcaggcccatgaggacctggaagggcctgggagagaaataggacttggctccttgtccctgtgggggcgggagggtctgcctagaccgatggcagagaaggcactgctccccgtgtttatatggctgcttattcgccaggcaggaaggctggatacaagccagatgtggaggcggccgcagggcagcgcctgaggctctcaggccgcctctgcccaccccagatccccacacttggcacagccctggaggctgggggctgggggcaggggagggagccgcctcctggtcatctggatacgaggggatttggggggacacccactgtcctagagcctgccaagaaggggccccacgtcccttcactttgcctctatcttggcctgggagccccaggtctgatgctggtcaaagaccttctcagggcccttcccggagtcagcaccaggttctcctctgtttcacatgcccctcaggggcaccagagagtggcacagagaccccgctgcgagggccgccctgcactgctcacgccatccgcagctcaccccacagctcttcctgaggtgggagggcactgcctgtccccacgccttcagatgacggtggctccggaggacactgaggctgggagtgtccggtcctcagtgggctgtgcctttccaggttttctcagtcaccacgcagcaagtgtttgctgaatgcctgcagtgtggccggcactgttgtaggctgtagaggaagcccagccctcctggagctcacggggagcatccacaagagaagagaaggagcaggacaggcgggtgggctcaccagcagagctacagggagagccggtgacaggaggggagccagggtgaagggccgcgcgggctgcagcatcaccgggaaggaggcagcctgcagcaaaggtgtgaggatgagaggcagacttgcggggacctggtggaagtgcattccctgcagaaacaccgccatgcaaaggccctggggcaagtgcggcgagtgaccgaggcacagcacaggcgggtgtggggtagtgcgtgtggttaggccagaggggacagctggtgaggccagaggggacagccaggcaccaagcgaggaacagccgggccactgtggcactggccaagcagctggggagccgccgtgggagccgccgtggacagctcttgggaaatgtgttggagggtggctcgtccctctggttccccagaaatccaagtgtacgggtttaccttggcctgggtttactgcactggacggctgcccggccaagtagaggctggagttcagaggctggggctccattcctggctcagcccctcactcactgcacggccgtggccagtgacctcagatgacctcacctctcaggggcagcgtgggtgcggggtcgtccatctccggggctgtgaggaggcgggagggcggccgtggacggatgactctcggggtctcctctttgcacatctgtgcctttcccagaggaagctgtgggaccgtgtgattctgaaggaaaataaacagctgtttaaagcagtggtgtcctccgtcccagccgctgtcatggtcacccgggttgcagtgctgtcctccgtcccagccgccgtgatggtcacccgggttgcagtggcgtcttccgtcccagctgccgtcatggtcacccgggttgcagtggcatcttccgtcccagctgccgtcatggtcacccgggttgcagtggcgtcctgcgtcccagctgccgtcggggtcacccgggatgtagtggtgtcctccgtcccagccgccgctggggttgcctgggatttgccagtgactgccacgcgtgcattcatgtcaaccctcacccccattgcacagatgtggacactgaggctgcccacccaggttgcagggcccggagcctgagctcatccccttaattctgcacttttatggaggggccaactgaggcacagcactgttctgggtccagagcccgtcctggacctgtcctgagcatctccgagccctgcctgcaccacagccccagaaaaggctttgcaagaggccttgctgggcctctgaggctggactttggggcatcctgggatgagggttcggctggagtaacaggagaggcctggagccctcgggttggttgcaggccatgccctcctcctcccctgcctggggcctgtggtcagctccaggaagggcagagccggtgccccccgctccccgggagcatattccaaacccacggagaggatcggatccagagccaggtgcccagggcccgtgcctcagtttccccacctgacagcctctagactttcgggggcacgaaatgaggtgttctgcacaaaatgctcaggtcaggcctggcacgcagtaggacgtcatcaccgtggctatgttgcctgtgcaaaggcctcaagacaggtcacctgcgttacctgcccagcgtcctatgccccaaggcttttgtgaggggtcaaagaaggttacagcggaagcagggcttgttactccagagctggcgagggtacgaggcggggaaggccggaaagatgagctcttgcactggtgtccatgggtcctccttccatggagagttctggaactcccaggctgggagccctgggctgtggctgtttcccagctgggcagggcgggctgggtgcccccacggacggggaagtgatggatgagcggccccggcacattgcaggctctttcccactggctctgcccaacctgcaaagcggcttcctctcccggcccgttagtgacattttgctgggaactggatgtgccgtctgggaaagaaacggcctctcccatgggccccggggagcggcctccagggtctgggaattttctttttcttttccttttttttttttttgaaacagagtctcgctccgttgtccaggctggagtgcggtggcacgaattcggctcatggcaacctctgccttccaggctgaagtaattctccggcctcagcctcctaagtagctgggattataggcacgcaccactacgctcggctaatttttgcatttttagtagagacggggtttcaccatgttggccaggctgatcctgaactcctgacctcaagtggtttgcctaccttggcctcccaaagtgctgggatgacaggtgtgagtcaccacgtctggcaggtctgggaactttcttgatgagtgggagcttgggaggcagatgaggctgcagccagggctgggggaggaactggcactctctccctgtcctcttcctttagacatctgaccagttcctgcatgcccagaccctttggggaaaaccgcatagagggaaacccaacatcagggcagactcaggcatgcccagagaggggcgcactgtgtccagagccagtgcctgagccatcgagggtgggaaggacaggcaaagcccctgctctggggtgaggggacaattagaagatgccaccgtcagtcatgggcagggggagtgagaaggacacttggcagaggcccaagccacagagggaggccaggagggcaggtgcctcccctcggggttcccaggctgcaggtgccctctgtggccagtggggaaggggtagctgggccaggtcacctggatccacacctggctctccccctcctcagcctctctgtgcctctgtttccccactcgtaagatagagaagcgcaggatctcagggccgcggaagaatccgtgaggacagagttggtcctctgtatgagattcctcccctccgggcgtcagagcccttctcgtcagattccgcacccgctgcccacctgcctctgagccagggccatagggaagggactgggacccagactgaccccacccaccccagcaggaggacctcagtgctgttctgagccagggaggggttaggatacttgtgtaggccacaggaggatagccagggtggggacagcaggtgccccagggacccccttgtgctgggcggccaggcctcgggagccctccccaaattccatgctttcttctgcacgggcagcgctgggcctcgggagctgtttgaaaatacatgtgggtgtcctcggggaccggggtccccttgcagctgatgtagagttcagggatgctggaggcctcgtttctctttcatgggcacttcgagctctggaaagaaaaccccttggggtttgaaagatggtccttccgctcatgcctcagagccggccaccccaggtgctaccccagaccctgtatggtgacgggccacccaccccagcctccagtacgagccagcgtcccttcggcctatgtgacacccacagggccgcgtgtcccagcgtggggctggatgcctgggctgtcccagcaaggctgagtcagggtccaggctggctggcatcgggaccgtttaatctcctgggggctgcaggcacatgccctggtgcttctgggctctgagacccagaacaagtcactcaccctctctgggcctcagtttccccgtctagaaagtgggcgtagtgacagggcccgcctcatggggcagcgggtagacggtgctgagaataggcctggggcaccaggttcctccgtgacattagcccttcctgccacttctctattctgccttgagacagagacggtcccctttctggcgctgctgagcccccggggttgcctcagggccattgcaccaggacactggtgtctactgtgaagctctgtgcgattttatttttccaagtggtttgatgacttattcacctccgtgtgtctggacggggccgtcttgcggctggagcggggagcagggtcagcaagtggtcttggggacgaggggatgcggccaggcctcttcctgtgtggttcgcagccgtgggctggtagcccacggggcctccgagcctcgaagtgggtctgcggagtagaaatggcctgtggccgaggtgcagggcctcaaaggggaatggggtgggaagccaggcacctaggaaggacgaggctgcccctgtctagcggtgtcttagcctggagaggagcctgcagttggccttggtggagctgtgggccggtgggagctccagagactccccacactgcttgggggtgcagggatagaggaggataataatagccaccatttcgagtgatggcggagagtgctggacccccctgctgcgcacggcctcatctccatcccctttgaagaggcaaggaaatggacagagaggctgtggcttgcccgaggaagccaggccggcaggactcagcctcctgctgtggctgtggggtggacccacggtgcctccctgcccagccagcgccaaggaaatgggtgtccagggcagccatgggtctcctgccctgagcaaccagccccccatgtctgcagaaagcacctgtcctgcagctgggcagcccagcccctcccacctgccgcagactagctctcagccccgccccctcatccccaccgtccttcagccccgcccctccagtcccgcccctccttcagccccgcccctccagccccgcccctccttcagccccgcccctccttcagccccacctcccctcaggcccgccctgatcatggcgctccactcaccccacttccatctttgctctcctccagcccctaagcgggggctgggggaacccaaagaggcatttcctctgggggccttcctttgaaggctaccctgggcgagctgcatcctggggggcccagtcaagcacagagaccctgcaaacaggtcaaacaagaggcaggaccgcccagtgtggggtgacatcctgaggactgaacagggaaggatggaagagcttcacgggggcggggcagcctctcctggggaagtgaggttgaagctgaatcccagagggaacgaggggcggtggggggtcgtgcatggccctgagccccgcactgggggagagcagggagatgggtgtcatggagtgggtgtgggctggtgaagccccatgtacagtggaagctgctgaagggtattaagcaggagagagacgatgtgcccgccccagagacggcgccagctgctgctgtgcagagctccagactccccggctgcccactcccccacccccctccttcccaggtccctccacaggtcctggccaactcctaggctgttctcttggccacaaatgctgttcctctacctttccacactcacccctcatcttctctgagggtccttgtcactttctgctttctcgggtagagtctgtgccaggggcagcgccaggagcaggtcccggccacacgttgctccatgagccttggcctggtttccttgcttgccaaggcagggcgtggggaactccgcgtcatcttcctgtcacctggcttcctccacatgtacagaggaaggaaagtgaggctcagagaggggaagaggctctccctaggccacacagccaggagcactcacacaggattcaacagacacccgtgaggtcccatcacctgcacagctgcccccgcacaatccggggtggggcccggaaaggtcccatctcctgcacagctgcccccgcacaacccggggtggggcctggagaacggaggggaggacaccaccagctcccagggtgttcctcaggcacggggcctcctgcccctgcagcctccgttcggcctcaggtttgaatcccagacctgctgcctctttgcaagtaccttgaggcctaaaaggaggcaagcgtgttgatgacaagcggagactttggagtcctgccgagtcctggccctgtgggggcaacaccaggtcgtggttccgatcccggcccgcagcacactcgcggtgtgaccttgggtagatgacttcatctctccgagcctggtccgtcctagtaaaatgggctgatggcagcatcagccgcagagggtctcggtgaggatgcaatgagtcgtcgatatctgcagagcaccgagaaggatcttcctgcagtgagcctctgtccaggcctctgaagtaaagggacagcctcctgttctgcccaaagggaaccacatgaagtccccgactgctcagggcgccggcagggcactgtctgttctagcttcgggatccagagtgtcacgagcacgcaggtggtggccgtgagcacgcaggtggtggccatgagcccttgttgggtgacggctgtggtgactccttgcgccgtggcatgacggcccagcggtctcctggccaccctctccaccttaggaaatgtggcatgtccgtccatcctacgagcgcccgtccagcgcccggcaccagctccccagtggggctctctgcatccacttctgttttattcaagtctcgtggctcaaatgtagccgcctccatgggagggctttggaaagtccaaacagggggcatccccagtgtcctggacctgtgtcccccgagccagcctggcgtttgaagctctcggccacatccctgcctgctcccttctgggcatgcccaacccacgctggcccaagggcagcctggtctggaagggctgcccccaccaggaacgccccccccaggaatgcccccccaggaacgcccccccccccagccgggaacacccccaccacaggaacaccctgccacattcaccttctttggttgtcaccagggactggccaccggccctgcagccaggcggtgttgatggcccccacagctgtggccacacgtgtgcccagccatcagcctccggacaggcgggtggccaggaggagcagggcgccctgtgcgagggaggtcagcggctgtgcggaggggacagcaggtgccgcgaggcctgtggctgtttactggctgcttcctccccccaccactccccacaggcccagcagagggggactgctccactcctgcctggagcaccaggggccggttagagcccaggcgccactgccctgagatgttgggcaggacctcagcacctctgaacctctctgcctctctgtaaaaggagccggcggcaagaggatcagcagaggtttgtgccgtatttggcatgtgatcgctgtagaagtcatttatccgtcaccttccacagagtccgcgtggccgtggccctgggtggatctctccgtctgacgatggtgctggggccccgggaatggggaacgggcagaagcaggggcagcgcccacagttgactaataacacgacagataccagcccccaactgtggcctcacctgtttcatgccccaggctgtgggtgagacccataggtgttaacaggaggagggtgcagggcagtcgtgggtgagacccacaggtgttaacaggaggagggtgcggggcagtcgtgggtgagacccacaggtgtcagcaggagcagggtgcggggcagtcgtgggtgagacccacaggtgtcagcaggagcagggtgcggggcagtccggtattcagcagattgaggatgcctaccttgctgctctaagccgctgaggcccccgaagtctcagccacggatagcaggtctttctgccttgctttggcactggctgaccttgccttaagataaatggggaggccctggggcttacacccgcaccccctgcagaaaatgccgcagacagggtgctggcttggcctcctggtgtctcgggcacgtctgtgctgcaggcccttcggttaaccttgtctgcaggtcctgctctctgggtggcacaagggggctccgtgccccccagtcccggcccaccagcgccttgagcgttttcctgccgtctccggacacagctggccctgggtggagcttctcagacttcagggagcctcagaccacgagggaatcttgttcagctgcaggttctcattaatcacgtgtcctggcgttaccacctgccgggggctgcgcccagcgcagccaggcctcggccatcctgaagtcaatgccgcctctgtcttggctgtcctgtgaatcaccggggcagaagacggttaaaatagaggttttgccgccctaaatggcctgcctgccggcctctccctgggcagacaccgtcccccgccccccagcccaggggagccttctagcatctgaaagtggaagggactcttagaaccatggcttccagggccagaccagcagcagcgccacctgggaacatgccggaaatgcaaattctgggtctcagcctgacctgctgaatcaggactgggggaagaggctgaggtctgtctgaacaccccccgggggatgctcatggaggtgggagcaaggcaccgctgcctcggggcactgcccactccctggtctgtagaagcctcaagcctggagtggggcacggctctcgcagggcggccacacaccgagggccccagctccagcctggccggccacctcagatgagctggcccaagcccgtcctccggcctggttctgcccccgtgatcctgcacgtgggacgtcagccacctgtcaggacacctggggcagactgccccagcgctgggcggacactcagtggggccttcgctgggaaccgtggggctgcgggccctggcctttgcacttagcctgcttcaccgactctttctttctccgttggtcgcagccccagtggacaggaaagctaaggcctcagcgatgccggactccccagcggaggtgaagacgcagccccggtccacaccccccagcatgccgcccccaccgcctgccgcatcccagggggccacacgccccccctccttcacgccacacacacgtaagtagcccccacctggcagccgagggccaggtgtttcaggggaggcccttgtgttgtttgaaattctgagcttcctgcccggagccagcgggcaccttctgtgagccctgagtgtgaggagctcgtgtggcccagagcccaggcttggccggttcaaatcccagcttccctgcttcccactgggtagctccgggtcatgtccttgccctccggggggcctgggcttcctcttctgcaatgcaggtcctcccagggctgtggtggggccaggtgagtccacacaggcctttcaccagggccggccatgggtcaaagccggccgctgtgcctcaggcttcctgcctcgtccggcaggcctaggaatgccaggctcatccagagagaacgtggaactcggatggggtcaggggcttccgcagggtcatacagcaggtcacctgcgtacaggccccgtggagggaccacagaggcagctctggccttggaggggctcagatctcaggagctccacagcccggctgagcacgggggccagggtgggggccttggcacaggaggccggaagggtgggacctcaagaagctgtcaggccttgtcttgctggccctggcaaggggttggccgtgcttggcgcacagagccgccgatggtgggccctgggaggctgtggggcagggaacagccagttctcatcacagtcacccgcagagccttggctttgaggacagacattggtgctctttggcccagttgctgggccggcggggtggcagcgtccctgtccctcaaggctgggggctcaggagtgcatctcagtgtctgcaggggggagactccatgtaccacctccacatgcagcggccagaaagccccgtacctgggggaccctccccaggctctgaaactcaaacgaagcccctctctgggcggggagcctgagacttccgtcctgcttgccccgggtccctgacaggccagaaagagctgcttcctcagtccctttacgtcacgactgtcctcagagcaccgggtggctataggccaggcctggctccctccctggctctgccgctgaggctgggggcctgctccgccgagggctttggccatcatctcccctccatctggagagagcactggctgtgcggtcaggcagcagatttgcggccctgtttgtaggatgttggctccgagtcagcctcccgacttggttggggaatggggtggcccagcaatggggtgcccccaggtgtgccgcccagaggcaggtacagctggaaatgtgcccggcactcagtaggagccaaacagcctaacggctactccctgcacccgcggggccggccctgcctcagagagtcgggacgccgcactcacgattttgcaggtcctgggggacggcgggcccagcgtgcaggtcctggctctgcggagctggccacggtttctagtgagaggctggctgggctttttctcacatgtccttgtcacacggcgatgtggccgggctgggatcacccttccctctcttcggaagagccctccggtctggtacaaaccacgggccgtctctctaccaggcagcttgcgaccacaccgagcccacataggtagagggagaccgctgctgtgttaaatttgcagtataccccagccccgggggaggaaacgctcaggacggaccacgggagacccggccatgggcgcagtgcctaaaacacccgctccacagacaacctcaggccccactgtcagggacaaacaccgtgggctgagcctggttccccagaccctcaagggtgcgtctcccccacctgctcttccctggggaccagcagcctctgcttggaaggtgccggtctgatgctcctggctggaggtgggttgggatcagcagagcgtcgggctctgcttctggagacctgtgaacggatgtgagggcagccggcatgcctggggctggggtccttcctgctccctccactcccagcccgccttggggtcatgtttttggggtgaggtcccagctggtttaaggagcgtgaaggttatgaaagagataagcaggtgctttttcttttctaagccgatgcttcagtcccactgggctgtcagcagcatcagtctgaggctctggccacccctgaggtagcctcagatttatcccctaatccacacaattccgtgaaagccaggtggttggccgcacccctgcccctggctggtgggtggtgggtgcccttcaggggccacagctcagttgcagagccctgccgggaggctcctccccggggactggcctctgagccaagctgatgggagactgagtctgaacggagacttgagggccgaagtttctcttgcccagtgacagccctgggcgcaaattcatcttggagttgaagctgcggtgctgctgtggggtggggggtggggagggggaaggcatataaggagcagggacccagaccaagctcctctaaagctgggaggacgcttaaagggctaaggctttatcctgcccttgattacccccatgacagagaactcactacccgtctttactagagcctgtcttcctgtggcctgcgccactgacttcagctcgaacaaattcaatctttctttctttttttatatagtagagtttgggtctccctacgtcgcccaggctggtcttgaactcctgggctcaagcaatcctcccgcctcagcctcccaaagtgctgggattacaggcgtgagccactgagcccagccgaatctttcttcctgtttggtgcttcctcctccagtgccgacccagggctttgtttcagagactccaagccgagtctcaggtcgcttttaggacacgcggcttcggcccaggtccctgaggatggtgctcatggggtcacaggggccttctgggaagaggacgatgaaaacaaggggccccgcccctgctcatagagaagccgcggttcttgtaaactccggaacagtgctgccagaacggcccttagggatcacccactctcagagaaggaaactgaggctcggagaggggagtggcctggccccaggtggtgacagagccccgtcagaaaatcactctgagaagcaggaaacggcggcccgggcgtccctgagggcagagtctcctgcccaggcccctccgaaaatcaaaaatcactctgagaagcaagaaaaggcggcccgggtgcccctgagggcagtctcctgcccacgcccccaccaaaaatcactctgagaagtaggaaaaggtggccgcgggcgcccctgagggcagagtctcctgcccacgcccctcctgacagcgtgttcttcttattttgcttacagatcgagaggacgggcctgcgacgctgccccacggccgttttcatggctgcttaaaatggtctatggtctgtctctgtaagtaaaataacaaaaaccgcaggcctccccagaggtcttcaccgcagcatcctcagctggcccaacactgctgccctgggggcgctcagctctcctccccggcctccgcaccctcagcattgcctctgttgtgttggtcttgcctccttagggagaagagggcgcaggagggcagagccgccgggtcgctgcatcccacagaccctccgctccaagctgcggggccttaggcaggagcagagcctctctgagctctccttccccagcagcaaaacatggccaatggggctgactgcgagtgccgaggggaggggcgagacactgtccctggccagcctgtagctcagctattgctagggcagaccccacctacctggagtcccagctgcaactgttcctgccagggtgaccttggccaggtaccaccccccgtgcctcagtttccccacctgtaaaatggaagtcatcatggcccctagtgccaatggtgatctccaggagccgtcagatggtggggccgggcacatgctgagagctcagcagacttgagtcaccagcagacgtttctgtcaacgtgcgtggcccatggcgggcgttcagggagcatgggctcttaccaggtggtggttatagtttttgtcaaccactgagtgcagccatgcttgagcccatcagacagactccggtccatcactaccagccagcctggcagcatggcccaggtgtggctgtcgtggcactcccggctctaagaacgagggcagcagaacaactgtgcgttgtttctgttgcacagggctgtccttttcacagccattattctgtgatgggcctggccacgcactcgcgcctggcgtgcagctcctggacagtggctcttgtcatccactctgtgatcttatggatggcaaagttggtgaatcccagatcccggagcccccacagcaaggagcaggggtgacaggaggggctgcgttagggtgcctctgtcgcatctgacccccccaccaaggctctgaggctgggggagccgcgggggtgctcgcgtgtgcccccaatcctcagctggggacacgtgtgcggtctaacttaggaacacacctgtcgtgggaatgaaagcgcttgtgccggggttatttttggcgtctctttagctgctgagactgcccagcagcgcgggagggagtgcgcgggcaggcgagggcgagcaggccgccggaaggaccaggcacccggggcaaggctggtaagcgcacctaagggagggccaggcccaggctggccggggcggtgggcaggggccccggcgtgcactgtggcgcgtctgagaagctgctggaaggtccacagtcctgacgacagtccctcgtgttctggagaaaccagcctcccgctgcagtgaggtctcccatggtgacgggccatctcctggcctggctgggtgaccgcaagtggctatcctcagtcttgacggggtgtgtgtgtcacagtccaccgtgtggccacatggagctcaccattgagagggaaactcggcagcgcggtggggtcctccggacagaggctcagaaggcgagagaccaggggctcggtgcatcctgtgtcagcgtccactgtccccccagaagagggaaagccccagaatacgacgccgttatcggtgccgcgcgctccagagggccggtgcgtccatcctgagcccaggaaggcgctgctaagatcgttcaagccaggggcgcagacaggctaccccctgtgcaggttgcccggttgaggggagcagccgctcagaacagcgtgtggaggttcgcggccccagcaacagagatgtctcaatcctgcagcccccccgtagggaaagtctgaggccacgcgtgcactcaaggttttgtgccatatctgacctgcgattagtggtttccagaattccactaggtgtgggggctgtttattgccaacagcctcacacaacacccgacccataaaaccagtcaggatggagcaaccctggggggctgacttgggcagcgcaggagaggctggggaagcccaggtcaggcctgagcgactctggctggggacacacagtacaaaggaggtcactgccatgctgtcctctggtccctggagccccacttggaactccaggatgggttgggagccatttgcaaatgaagaaactgaggctaggcgccgagtctgactcacagggcacgtctgggcctggcggccggtcctcactcctaaccagggcagcttcccccagccctcgagggcagggccgtgtctgtctggacttcctcaccacgctggtgtgtctgagggcctctgtagcatcccccgccctcctggcctcccacagcccctgcagtgggtatctgtgaggcccaggctggagtgagagcagagtgagcgctgggccccgggggaggcagtcgtgggcacacctgttccccccgctccaccaagaacatccagagcacagggccggcctcccccctgtgccactgtgcccagcgctgtttgctcggtgtgtggggcctgccggggacgggaggcaatctgggggagccgggctgccctgctgtgtgtcttcggttcctcggagcccatttgccgcatgggatgtgtgtgataaccgcgcagcctgtgtgcaggtgtagagcccagcccgggccacagcacagcttcctgacccgggcgcacttcgcaggtgccactagaccacgggtcgggaaggtgggagcctcaggcggcttctgggaaggcggagtggaggaagctgatggcggccacctaaaggttactggagggacacttagagagggcctgacccctcagaagggccttgttggaggtacgggctggtcagtgccctctggagggtgcggccccttccagtccaggcctgcaggagcgggtagaaagggaggcctggcctagccggagccccagctgtggggacgcagcccagaaaggggggccggcatgtaggtccccacgtcccatgttccctcccgtccagacagaggccacaacactcagcaggggtcacctcccaggggccaggtcaggatgggcagggctggcctgatctgaagggtacaccaagaccccccaccatccagggcacaggaaggaaacagctggtgcctgccggctgcccagggggagccgctgcaccagcccagcccaggggcgtctccatcctgtagaaagggttttcccctcctcctcggcgcacacaggccccgccaggtctcagccacaggtgcgaacacacggctggggcctcggaggaattcggccctgagggagcaggtggctctgagctgccccccacccgtagacccacactctcagcacgggtgaggggtggatcccctggagaggggcacttggggccacagtggagcaagagagacgagcgtgtacatcatagccgtgcatgtgtgtgtgcatgtgtgtacattgtgtgcatgtgtatatgtatgcatgtgtgtgtgcatgtgtgtgtgcatgtgtgtacattgtgtgcatgtgtatatgtatgcatgtgtgtgtgcatgtgtgtgtgcatgtgtgtacattgtgtgcatgtgtatatgtatgcatgtgtgcgtgcatgtgtgtacattgtgtgcatgtgtatatgtatgcatgtgtgtgtgcatgtgtgtgtgcatgtgtgtacattgtgtgcatgtgtatatgtatgcatgtgtgtgtgcatgtgtgcgtgcatgtgtgtacattgtgtgcatgtgtatatgtatgcatgtgtgtgtgcatgtgtgcgtgcatgtgtgtaagggtggtggggggtgagtggaggcagggaaatggagggctcgctctgagggcaggggagttggtaccctttgtagggagcgtgtccttctgcaggaggcgggagccagccgtgagtgtgtgcggggcttcagtcctcctgacagaaggagctggccaggacttcaggcctcccagaggcatccagtccccctcccctgtcagcaagggacttgggagccctgtgacctctgacctgccttcagagcctggaggccgcccctcaggctcctgaggccaagggcacggggtgcgggtgtcccaggcgcaggaggggtgcgctggccgccttgcaagaggcttggccttagctctgtcacctgagaaaaggggtgaggcccggccctgggactttccatagcagccccatgtctgccaggcccctggaacactgaccccaatagcagggccagccaggcagtcacgtctcagtggccaacaggcggccctgcagcgcgctcatcagctgttccttatgtcacctgcttgtcctcaacatgcactggcctgtgtgcacgggcatctgcgtgtccagccgccaggggcaggaacccacccagtgtgtccttgggtgtcccagctcctctgccccctggaaccccattagcaggcgttggggctgtgtgcaaatgaaggcattgctcatggctgggagtcacctgtctgggacattgctcatggctgggagtcacctgtctgggacattgctcagggctgggagacacttgtaggagggacattgctctgctggaaagcacctgcagcgcatattgctcagggctgggaggcacctgtgtgtcggggggggcacattgctcagggctgggaggcgcctgtgtgtggggaggcacattgctcagggctgggaggcgcctgtgtgtggggaggcacattgctcagggctgggaggcacctgttgtggggacattgctcagggctgggagatgcctgattgggggtgggggtattgcttgggaacatcatgccagaggtgatggtagctggcctttcgggggatgagcgacttctcattttccaagtctcctgtgcctccagaaagtgggaagtgagccatcaagcccccgacgtgtggagaagccccttgctccctgttcacagtgaaaacctgagccagcctggtagggttggtgtctcccaggccaggcgtaggggccgcacccctgctgggtgtgaagggcctgacttcagccccagagcaagtcccaagagtggtgccaggcaggagaagccacactcagaacgcagtcattccacggccaccaccattgtgggtgccatcccagcccttacccattggggacctggggcaaagaggcttcacctccctgggaatccatttccaggtctgtaagggggtgtgtgtgacctctcagagcagggccggaaggacagatggtcagcatgctaagggccagctcagctgccctgggcgggcccagggctcctgctgtcatcctcagcgctactgtccttgtgtctcatcattgttgccgtcacttttgacattgtcaccttagtcgctgcttccctcactgtcgccgccgtctgggttgtgttgtcaccatcacctttgtgtcctcatgtccgcttccctcctgcagtgatgaacggcagcagccactcaccaacagccatcaatggtgcaccgtgcacacccaacggcttcagcaatggcccggccacctcgtccacagcctccttgtccacacagcacctgcccccagcctgcggggcccggcagctcagcaagctcaagcgcttcctcaccacactgcagcagtttggcagcgacatctccccagagattggggagcgcgtgcgcacactggtgctgggcctggtggtgagttgggcagggacagccggggccttgggacatgcatattccctccgtttaatgaggttgcagccacggccactccttacatgggctccacgctgacaaccgggcgtggacccgctcccacgatgccacctgcaccctctcaggccgtgcccagctcctgggctgcctgcctgcctccaacacggaagcctcctcctcaggcatgggtgggtcggcgctggctcacatgccgagcggtgctgatgtgaggtgggttttctcccctgcagaactcgacattgacgatcgaggagtttcattccaagcttcaggaggccaccaacttccctctgcggccgtttgtcattcccttcctgaaggtaatgcgaaacccgtcccccgtgctgcgggagcctccctagaaggccccttaatcccactccttgccagcgtggacagcggtggacaggcgggaaggggcttaagtggccagataggcaggtggatgaagaggtgtgaggcatcgatcttggccaacctgggaccctgtggtaccctaggggagcactgctgactagtcagggttgactcctactagttaaggcctgaaaattagttgccagaccggatgattatcagcccttaaatccagcacaggacagagctgtccggttcgcctctggttgccgttggccgaatgtgctcgctcactccacgggtgatttttgagcactgacgacgtgccagtgtgggggcaaggctcggggatagggcccaggacatgcagcaggtccctcctggagccagcaccctggggtgggaaggcgttcggtccacagccactctcaaatctgcagctgcacgtggtggagaagtattccgaaagtcctttgcttggaggcgtgttggtgagggctgaggatgagggcggagctaggtgcagagccagcgcagggttttccagacagcagtaactgcacgtgcagaggccctgaggtatggggcgcccgctgtgcttgaggaacagcagaggggtcagtgtgactggaacagaatacgtggggtggagagagcagaggtgagggcgggaggtgagggcggtagacaggcgggaaggggcttctgtggctgcgcaggccgatggatgaagaggtgtcaggtgaaagcaggtcagatggtcacacccagatcaaccgtggaccagggtggcagcacgcggggcttgtcagctttgcaggctctcggcccggcccaaacctgctgaatcagagcctgcatttttaaagatgccagtctgaggaacggggattgcttgaggccaggagttcaagaccagcctgggcaacacagctagaccccatctctacaaaaaatataaaaattagctgagcgttgtatgcacctatgatcccagctacccgggaggctgaggtgggaggattgcttgaatccaggaggtcgagactgcagtgagctgtgatcacgccactgcactccagcctgggcgacagagcaacaccctgtctctgaacgaatgaatgaatgaatgaatgaatgaagccagtgattcccatgggagagtgattcccacgcacacacagacgggacgggcacgggagtgccgtggagtcagactgccatctctgcgggtctccatttccccaagacggctgcacatctctagcaggagctgaggaaaggttccccaaatgtgtctgaccatgtgaccttctctgccgagcacgtgttggggtcagggttccgtggagcttagttgggagctgccagcctggccacaccttcgggcccagcctgagcactgcccgtactgctgtgggctccatctctgctgggccaggcctcccctcgggggtccagaggacagaccagaccagatgctccctggcttgagcccgagcctgccacttagcagctgttggcccctgggtgaggccagttcctctgtgcttcggtttctgtatctgcaaaatggaatcatcctcaggctgttgaggagacagcgtggagggacacgcggaaagaacggggcctcactcccgggctcaggggaatcttccacctcagcctcccaggtagcggggactacagggaggtgaggcatgttctagattcacgcggggcatcgtccagggatttgaaacgtcccctggaggaggaggaatcgcggggcatcgtccagggatttgaaacgtcccctggaggaggaggaatcgcggggcatcgtccagggatttgaaacgtcccctggaggaggaggaatcacggggcgtcgtccctggaggaggaggaatcgcacggcgtcgtccctggaggaggaggaatcgcggggcgtcgtccctgaaggaggaggaatcgcggggcgtcgtccagggatttgaagtgtccctggaggaggaggaatcgcggggcatcgtccagggatttgaagtgtccctggaggaggaggaatcgcgtggcgtcgtccctggaggaggaggaatcgcggggcgtcgtccagggatttgaagtgtccctggaggaggaggaatcgcggggtgtcgtccctggaggaggaggagtgcttcaggaaggtctctcacagacctgttggcctctgtcaaggtgtagtgtaggcactgccatgttcctgattaacaggtggggaaactgaggctctgggttccccccaggtagtggagagagggcgccagggctcaaacctaggtctgtcaaattccaaacgccctggtcgtcccagggcacttacagggtcagaccctcattcccctcagtccctccccaaggggaccccacatcacacccacctctgttcccaccctcgctccctccctcccgcccctgcctcctctgctttttcctgccctccctccctccgctgccccagtcctccctccctcccaccaccccctcctttcctcctgccctccctcctctatcgctccatccctcctcccgccttcctccgccccctcccacgccctgctgtgctcatgctcccagatggtgacaaaagagaagcttctggagtggcaggagcctgggcccatctggcgtcgtttgcagttcgttagcggcccttcccttcccttcttttaacctgctccggactccacccctcccagtctttggggacacagtgcgcctgcttattaccaacagatgcccccagcctcagccacccttgcttaactgaggatcagggtcaggcagagaaacgccccagcatccccacccttgcccccaccaggcctaccgcccctgtccatgacgtctggtcaggccctggtgtcccccggccacgccccagcaggtgccgcccgcggcccggctctcgtgagggccgtgtccacctcagtctccccttggtacacaggggatcccacggcctgtgtggggtagctggagctcagggccagcccacctcgtgcccccacccggggcccggggccagtgggacatgaagtctgttcacctctctgacatggcgcttctagggggaggccaggaggattcaaaaataaaaaataaagatcttgcggccagtcctgcttccaggtcttgtggctcagatacaagccagaaccctggccctactgtcactgtcccacccaaggagcagcccccaccccaccctttccnnnnnnnnnnnnnnnnnnnnnnnnnnnnnnnnnnnnnnnnnnnnnnnnnnnnnnnnnnnnnnnnnnnnnnnnnnnnnnnnnnnnnnnnnnnnnnnnnnnnnnnnnnnnnnnnnnnnnnnnnnnnnnnnnnnnnnnnnnnnnnnnnnnnnnnnnnnnnnnnnnnnnnnnnnnnnnnnnnnnnnnnnnnnnnnnnnnnnnnnnnnnnnnnnnnnnnnnnnnnnnnnnnnnnnnnnnnnnnnnnnnnnnnnnnnnnnnnnnnnnnnnnnnnnnnnnnnnnnnnnnnnnnnnnnnnnnnnnnnnnnnnnnnnnnnnnnnnnnnnnnnnnnnnnnnnnnnnnnnnnnnnnnnnnnnnnnnnnnnnnnnnnnnnnnnnnnnnnnnnnnnnnnnnnnnnnnnnnnnnnnnnnnnnnnnnnnnnnnnnnnnnnnnnnnnnnnnnnnnnnnnnnnnnnnnnnnnnnnnnnnnnnnnnnnnnnnnnnnnnnnnnnnnnnnnnnnnnnnnnnnnnnnnnnnnnnnnnnnnnnnnnnnnnnnnntttgtgcgtcgtttgtgggttttgtctgcttgtggtgtttttttggtgtgcgttttttgttcgcttctcgtggtccggtgctcggtggcgtgtttccgtgtctgtttctgtcgtgttgtgtccgttgtggtttcgtcgtcgttgcggctcttgttgtctgtccttgcctgtcgctatctctcgggtgtcccgttttttgcttacacgtgtttgtttcgtgtttcttttttgttcctatctgttttatctttttggttcgtttttctacattctatttgtaaaacgtgttgccttctttttttcttctactcttcctcaaccccacccgcacccccccaaccccacccacacccctgcagggccgcagccccttcagacacagagtgcagtgggggagtccgaccttcccaggccagacaggaggtgccgagtgggagtgacccccagccagtccccttgggcctcggtgttcctgactgtggcctgggctgggggaggggtagcaccttcccaagacatccacagcccgccaggcccagtctggggtactctcacgcagtccttgaagacatcatcctagaaacggcaggaatcgtggctgaggggccggagagagtgggggcctgcttggctggaaccccagccctggcttgggccctctctctcgtagttggggtggtgaatctccctcacggggtggtgggaaaggactgagctgattcacccggagctccccggagtctgtctcggccagaggctccacagcgctagtttgcagatacagcaagggtcagagaggttaaatgaccagcccaaggccacagcccctctatggcagagcccacggtcagggaggctttagctgggtgcttggcagagtagcggagtccgcgaaagcccttgtagctcaactagtgcctcagccaccgccgccgtcattgcaaacaccagttccccagcctgagcgcccatctgtgcagagggcagcttcagaagttctgcaggcagaacttccgttcagtggtggagttggggcattttgaccagctcagtgtgtgtagcattttagtggtgacacctccccgggtgccctgggctcctggggacagagtggggacactgccttgaaggaggcactgccggaggttcccacagtccccaccccattccgcaggccttgaggaaacattccctgcttgccgagggctgctgtgcatccggcccctacgctgatgctgcccagtcctgggttctctgcaccctttcctgagcctgccccacacgcagcccaagggtcaggccttccagaagctgggggatgcagccccacccaccgccccggctcccagctggcctcagctggccccagccagccagggatccagatgttctccccgccctaacagcgaccagccggttcccgaactgaccaagaggaggcccctggggaggggctgatgagggagggaggatgtttggctcctcagacctcccgggacctcgtttcccagctcatgctcctgatgtcctcaacagatggccggttggcccctgttcagccatccaaagagaaaaacaggccggcagccggcactgctcgcgagggcctggtggatgcactcgtggggaatggggaggcgctggcaggagaaggcggcgtggcagctttgaaacgcatgagaaagttggggaattggatttatttacaaatgcttagaaccgctggctctcccaagtggcctgctgctgggccctggtccagcatgctcagggtccagcacgcctgtccgccctcccgcggcagctctgggaagactttggggaaggcacccgaggagcccggcttgcggcccagcagtgccagcctggagccaaggacgaggcggcgggcgccgcgggtacacacaggcgtcaaaggcagggtctgcatacggatcccgtacaccgggccgtccttcggccgcatgctgcggagtctttacccgcacacgtgggtcttgaggccgtcctcaccaaggctggaggatcacttgagcagccacagaacgtgggtgtccacgtcctaggtccacgctccatcaaggccaaggctggaaaccagcgggaagggaaggggaagctgaacctcagggcttcccatcagggctggagcagacacactgcaggcaatcccagctgggtttcactcccagctccctcgtgtgagccgcctgtaggcccagggctgcctccccctctctgagcctgcatttccccagctgtgttgggtcatgtggtgcctgctgggcagggcgggtgcaggcgggaagaccaaccatgatctgctgccccttcgtcctctcgccttctccagaccacgccatgggagggagctgggtgcggtgggaaagccccaccctgggagtccaggatctgggctcaagtcccacatgccccacatcgccgtgtggcccaggtgaggcactcctgcgaagctctgtgcccaccctcccacgccaccctcccatggcactgctaggaaggaacttgaggcccagagaggtcgagcaccttgacctttgaggcccgaggtcaagttgagctttcggccacccagcccaggccccctctgctcggacctgagcagggctgtgcacccctgcatgctacccaggccctccttccccaccccacaggcaaacctgcccttgctgcagcgggagctcctgcactgtgcacgcctggccaagcagacgcccgcccagtacttggcccagcatgagcagctcctgctggacgccagcgcctcctcccccatcgactcctcagagctgctactggaagtcaacgagaacggcaagaggaggacgcccgacaggtacctgtgggctccggggatctgggctgggggtgccgtggacacgcggctcaccctgctcccctctgggtaagagagggaacctcctctggggctgcagccagcccggccggctctctcgggctgagggagcgtggcgaggtgtactagggccagcaggcttggtggctgcacgggcggacaccccagtgggctgcagactcagatgctccggggagcctaggaggacagggaggaggctggtgggaggacggctctcccctgtgtgccgggcatggactccgagcgtccggggtccatggtccccaggtgcctgggctgggccccctctgctgccccagacgctcttgtgctgctgctgcccaaggggcaggtggtctccagttacggaagcctggtgtatccctctcctcgttcccagagcagcgagtccggctctttgaccaccaggccccaggatgccatgcagctggagcaggggttgaggctggcatgggccccggcagaggggcagagagtgggggcgccgggctgggcttcccggggctggtgttttgctccgtgtttctgtctcgcccttacgtgtcctctttctctctgcccttgcctgtctgcctctcaccccacctgcacctctgtccccggttcatcctatgtccactgccctcgccccacctgctcttggggctaggaccaaagagaacgggtcagaccgcgacccgctgcaccccgagcacctcagcaaacggccatgcaccctgaaccctgcccagcgctacagccccagcaacgggccaccgcagcccacaccgccgccgcactaccgcctggaggacatagccatggcccaccacttccgagatgcctaccgccacccagacccccgggagctacgagagcgccatcggccgcttggtgagcagcccggtggggcgggagcgtggacgcgtgttacaggagcacacatgcgcccacatgtacacctgagcatgtgggcacagggcaccacgggcagctgtgtgcacctgagctcgggagaccccttccccctgcctggcattccccctggagcagagcggtggctgcagaggggcctgtcctgggccctgaacccacctctccccccggggtgggcggcctcgggcctggaactgcccacgtggttctcatccgagcttggcgattcccacagtccacccacaggtgagtcacgtggctctctgcttctcagtttcctcctctgtcacctgggccagacgagagtcccaactctcagagtccaaggcctgggggagttaatgcagggcccagcaagggctgccgtgaggcctggctggtatctagagcaggagaggggcacagagtctctgcgtgaggccaggctggtgtggataacagagaggtgggcacggagtctcggtgcattttatccttcactcgtttctgagcccgtcagtggggtggcgtcagcacccccataccacagatgaggagactgaggcctgagagcacacataatgcacccacagtctcacagcccagcctgcctgacgttttgacggcctctgtgctgagaacccagagatggtcaggcccagccccaccccaggagcccccccaggacaggctgcagggaggcctccagtctgccatgctgagacagaggcccagggcccggtgggggcccagcagcagggtcagcagaggccttgccctacacaaggccatctcccagcccccaccttgcggagggttccagggcccaggcagcaggtgacggcgtctggcatgctgcagccgggtcaggcaggtgctgactcccacccgattctgctaatacagaaataaacgccagctgtcgggcacgtctcagccactattttggttggggtgttggtgccagctgcagcttcacaggcggcagagcaggctggtgactgagctgtggctgccacttccccacctcctctgcaatttgggggagccatttcaggttcggaggctaggagatctttaggggctgaaaagggccccaagagggagacctcagccccagaagcgtgggcagtggccaaatgcagaaaacagtggggcctggaagcctctgatgtctccagaagtcgtgggcgcagctaccacgaaagagtaagccactgccgggcgtcactcacgtctcccgtgggcacagccaccgcagaagagttggccactgccgggcatcactcacgtctcccgtgggcgcagccaccgtggaagtcggccactgccggggtcactcacgtctcccgtgggcgcagccaccgcagaagagtcggccactgccgggcgtcactcacgtctcccatgggcacagccacggcggaagagtcggccactgccgggcgtcactcacgtcttagtttctggtgacctgtgggagtggcctctgcggcttcagtcctggagcctgtcaaaagggaaaaaccttagacacgctgtattgaacagagtttaactgagcagagaacaaccccgaataggatgggcctcagagccagcgtgttccgagagccctggcctcggcttggctggcggtgttcacaggcagagacaggaggcgggtgccgaggccacgtggttgggtggtgtttggcgtggcttcatcggagtcatgggcgcctgcgggtgaccgcagagggctgccgcgaatgactgagaccagctcctcccagtgaggttacccattgattcacggactaaggcaggtccaggtcatggtgtgacttggcactgaggcatcctcaggccacgcttagtctaacaaagccttcccggccagtggctgaggacactgctccagctccagccagcctcggtccacaccccacccccaccgctccctgcctggtgaccacaggcaaacacatcctcttaaccagcctcagtttcctcagctgcagaatgggactgagactgaaccctcccttggaggcgtgtgccgtgttgcaggggaagagcagtcggcccagagccccaggcggctcagtaacccaggcatcctccacggtcaccaagtcaaccagcccttcggttaccctgtccatcgtccccagcgggcacagcccacgggtggggcctgggagcagagggcggggtctgggagaatagggcagagactggctgtgggtgggacctaagcgtgcacctcccccatccacagtggtgcctgggtcccggcaggaagaagtgatcgaccacaagctcacagagcgtgagtgggcagaagagtggaagcacctcaacaacgtgagtgtccacacacagccacgcccacacagccatgcccaggcgcacagccacgcacacacacagccacgcacacacagccatgcacacacagccacgcccacagccatgcccacacacagccacacccatgcacacagccatgcccacacaagccacgcccacacagccacagccacgcccgtgcagtcacacacagccacccccacgcacacagccacgcccacgcacacagccacacccacacacagccatacacacacagccacacccacacacacagccatacccatgcacacaacccccccatgtacacagccacacccacgcacagccatgcccacacacagctacacccacacagccatgtccccacacagccacacctgtatgcctatgcataaacacggccatggctctgccccatggggcctggggctgctggagacagcagggctgtgtgggcgcccctgagctcagtgccctcctgtgtggcctgcgccgtccctgcgcagcggctgggtccttcacctgagcccccctcctcccagctgtcagcgcagcccaggcatctcgagaggcccagggaggaggattcctaaaaccctcatggcgggccttgcttccctccacttactttctgctcactggctcttcccagagtctatcctgagtcttgcaagaagtgtgggcaaaagcagtgccgaggcctctttgaggcaggacgtgttcggggacggcccggaactgggctcctcagaacccacccaccccatcctgcagcacgtcccaggaggggtcgccaggcatggggccagcacccctcccagcactgttgtcagcctcgcccctcgccctcatgctttttggaaggggagcccaggcggaaagccaggtccctgaggcagagccccgctgagcgggttaaaaaggagaatcccaaactcctgcgtgcgtctaggcacgtgtccatgtgagtctggtacccccaggcgctcggcagtcccaggctagggacccatctttgcaagccatggaggtgggccctccctcacccccttactctcacgggcggtgggctggtcgggcacccatcctgtccggggctctggccgagtgggctgggggagtgtctggtgcgtcccggtccctctgaggtgctgaaggctgcgccgcccgcccccagctcctgaactgcatcatggacatggtggagaagacgcggcgctcgctcacggtgctgcgcaggtgccaggaggccgaccgcgaggagctcaaccactgggcgcggcgctacagcgacgccgaggacacaaagaagggccccgctcccgccgcggcccggccccgcagcagctccgccggtcccgaagggcctcagctaggtgcgtgtggggtgtggggggagggagcagacacggggtgctctggtggggcggacacctgggagctgtcaggcaggcaatgcaacgaaacaccaggcagaacagtttcgcttgagaaagaggcacctttttcactttgtaggaaaacacgggctggtctgccaggaagcctggagctcagagcgtctggtgggccagaggctcggagctgggaggccctgagggtctctgcttctccgcctcagcgacgaatgctgacacaggagaggcccaggacacacacggctcccagccgagtccaaggtccacagctccaatgccccccgtgcccgggcactgccctgggtgcctgagccagaccttgtccgagggcacctgggcctccccccagggacgcacacactcacgccctgcactcagggcccagccagggtggggagggccccagcgtgggaggggcagccgcgtggcccatcctgtgtgacgccggcccctgtttcagacgtgcctcgcgagttcctgccgaggaccctcaccggctacgtgcctgaggacatctggaggaaggctggtgagtgggggtgcaggggcctggccagcagagctgtgggaggccagggccccagatgcgcctctcaccggctcagctttgaagagcttctgtctctctctgggggctcaggctacaaggctttctgcattccgctgtgtggctcacggagaggtcagagtaggttcacactcagggcaggacagctgctacctgcgcctaccaggaaacggaccggtggccgcccagcagaataaagtgggtcctggacctgcacacccaggagggcacgcagaagcgcacacactcggagcctgggcgcgtcaggcacgcggggccagagtccgggcagaatggggtcagaacaggggcagacgtggagctgagcgctgggcaaggctgtggggacatttgctcatgccgtgggaatcagccttgggggaggggctggggcagagccagatatgtgggcagcaagaggggttagggttggggttagggttagggttagggttgggcagcggtaccggggtctccagctggcctcagggtctctttcagtggtggagttgaaacatggcctccccagctgcgtgggcagtgctccctggaggctgctctgagcctaccccatcttagcacagatcaggatctgtgtgtggctgtgtgtgggtcggggagcatggtcttcagaggccagccaggttaaaggatggcaagtgcggtgaggataacagcagggtctggggtgacagcacagagccctggacgagggggcttcctgggctgcgtctgggtggggccagaggtgaaggcggaacggcagagttatccaagtgcttcaggtcagcagcagctcccccggctcgcgttaggaatgcagattccgggtgcgcccctggctgaccaggccctggggtgggcctcgcccttgccctgcaggggtgcagtgcctggggagccgctgcggtagagtgcaagctttgacttgtgacaccacgtgacccagctttgcacacacatgcctgggatgcctgtgtttatttgcatgcacttgtctgcacaggcatgagggccatcaacgtgtgtctgtgtgtgcacagatgctacgtgtgttcagctgcctacagccccatcaacatgtgcctttgtgtgcacagatggtacgtgtgttcagctgcacacagcccctgtccccaggttgtggccacgcgtaggaagtccagagacccatctgggatggcccatgtgaccgccagccctgcccatgtcctttgcagaagaggccgtgaatgaggtgaagcggcaggccatgtcggagctgcagaaagccgtgtcggacgcggagcgcaaagcgcacgagctcatcaccacggagcgtgccaagatggagcgggccctggccgaggcgaagcggcaggcctccgaggacgccctgacggtcatcaaccagcaggaggactccagcgaggtagggccacccggccacgctgacacccatcccctgcctcggctcccgtgcggtcccacgccacccccatgaggattctgagcctccacgtggcatcagcacagttgtcacgggcatcctgcagcaggcacgccatccccgcccacactgtgctttatcagcacagagatcccacatggttcagtgaggcgtcctatggatgtccccgttctgtagttccagaaactgagggctcgagagggttggcagcttgtctgaggtcacggccttgggaagcggtggggccaggactcgagcccaggttggctgatgctgagatggagtttcactcttgttgcccagactgaagtgatcttgttgctgtggcatgacctcggctcattacaacctccgcctcccgggttcaagcggttctcctgcctcagcctcccaagtagctgggattacaggcgcccgccaccacacctggctaatttttgtatttttagtagagatggggttttgccacgtaggccaggctggtctcgaactcctgacctcaggtgatccacccgcctcggcatcccaaagtgctgggatgacagaagcgagccgctgtgcctggcctgaaacccgtgttctctagcctgtgagaacaggaggatccaggagagctgtgagggccccaggtggcgtccgaggcgcccggctccctcccggtgcacacggcaggcctgagaattacgatgcttgtgcccgtgcacctgggaggcaggcgggggcagaggaccctccgcgacccttttctgccttgtccacgaagaggggacagggagagaccctttccaggggagccccaggactgtcccttgagatagggcggatctctatctgaagcccctgtgtgcatctgtgcctgggccagccccggggtgggaggagatggagccccatcgattcaggggtctctgcaccggccatttccacgcctgctctcagctagggagaagctagaccaccacaggcacaactctcacagagctggcactgagaaggaaacaccaaacgcagaagtgaggcgtgcagtttcgggaggtggaagtgtgtggggagtggggctgtggaggcctcacggcaggtgacacctgagcagatgccgggaggaatgaagctggccacgcaggcatcgggggagcgggcccagcggagggaccggcaggggccagggcctggagcggggactgtgcctggcagtgcctagtccgcagggaagctgctgctgcagtggcagtgagggcgaggtggggtgggaggtggtaccagaggctttggaggccaaatagggacctgggcttctcccctagggcaggtttgggcttcccaccccacagcccaaccgtctgtgagagatccagccaggccccaagaagaaatatgctcaggctttgtgtggcatctcctacctgctctgcccacaggctttttgtggcatcccccaccccctctgcccacagggatgcctagggcacaactcaccctacgggaagggagcagagcccaccacagggtgggggcagaggtggagggggtgcagcagaggcaggggtggggcagaggtggggagggggacgggtgggtgtggatgcagcagaggcggatggtgagatctcagcagcctcaatcctgccggggccacgccctttggttttgcggttttggagcctggtgagctcaggagggcttcctggagaggaggcaggggtcgttgtccagttagcacagcgcagacctatctgggtgggctggagcgtgagacacggtagtgggatgccgtcccgcaaaatggcccagtgagtggctgtatctggagcatggcccgagggctgtggggctttggagtttctctcttctcacctggtgatgacgtggctgggtctgaatggcttggttgaggcgtgtgttggggattcgggtggccagacccagccctgactggcccctctgcccccacccagagctgctggaactgcgggcggaaagccagtgagacgtgcagcggctgcaacgcggcacgctactgcgggtccttctgccagcatcgggactgggagaagcatcaccacgtgtgtggccagagcctgcagggccccacagccgtggtggccgacccggtgcctggaccgcccgaagccgcccacagcctgggcccctccctgcctgtgggtgctgccagccccagcgaagccggctctgcggggccttctcgccccggctcccccagcccacctggcccactggacaccgtgccccgctgaccccactggcccctggcctgccggacacagcaccgtgccaaccccacccagctccaggcccaccggatgctgtgcctggcctccgatgcctggcctgccagacactgcgccccgcctgacctgggggagccgaccaattagtcactgctgctactgcccctctccgaaagaagacacagaaccaacaaaaccgcattcagtgcacctgcctcagctacctaatgattccgcgcggagacctcctgacaacgtctcttcaagcatcctcagaagcctcgactgagctttagacagcagagcagatgccgcaggcgcggcggctctgcccacctctcttttcctctctgtctgtctctccccctctgtcttctctatcctctctctctctatgactatcacacactttctcttcaatgaaaaaatcgaattggtggcttatattttcagcaaagaattttggggggttttgtgtgttggcaaaagagctactcagaaatggacaaagaaaacgggggggttctccccctcctgattaaaaagggagaaagaaaactgcgattttatagctggagatctgaacccagctgtgcccctcccccaggggcgtgaggctgatcagcgaagacgggaggaaagatttcgatttctgactcaagatgcatttttggtttcagatttttttttcctgtaatgttaaactctttggctttaagtaaaaatccaaaaagtttttttaaaaaagcaaaggaagcatacttgtgaactaccttgctagctagccagccaaggataccggacacacctctgctccaaaggaaatccaaaaaagcaaacacaagaaatcaaaatccaaaatttgtttgtcactgccaaagtatttttttcactgtttcacttgctcttgggtttgtttggatgtgggtctttttctcttctgttctgattttgtttgtgggtgtcgggatatttgggtgcagagggtttgtgcccagttagaagcgacttttgttctcttctgcgtaggcgttggtgcgtccgccgcgtgtgcgtggtccgtgtgccgttgctccggcctgcgtctccatatgtgtaggaaaggacacgccgtctgtcctcacgccccctgtgacttttcatatttccgttttccacttgtggaaaaaaagtgctaaagttttcttcccagagagagcataattccgaaacaaaactgtgacaatcttttgggttgattctcgactgcttttcgagcatgcggagccagcaggcctccctgaaacactgcttctcggccagcccgtcctcctctacctctctcctctccgcgccctccgacctctctcggccccctcaccccagctccgacctctctcagccccatcgccccaactccaacctctcggccccatcgccccaccgcagctactcccctttcttccaaacttttgcagaaaaaacaaaaaaactacaaacaaaagcagccctctgcctcctccccagggaagaccctgaccgtgtacatagccctggtgctcctgcccagccacccctcagatgcgttcgcctctggccctggggtgtgtctcggtgacgttttctatcagacgtgctccctcccatcctccagccctgcccaccctccctccactcctctcaactgcctcagcgatttcaagaaggaaataaagggataaagaaattcatgcttgcaccgagtacaaggacagacagcaggcacggcccgcagcctggcatctgtgcgtgtggcgtggcccgtggcttggcatctgtgtgcgtggtgtggcccgtggcctggcatctgtgtgcgtggcgtggcccgtggcctggcatctgtgtgtgtggcgtggcccgtggcctggcatctgtgcgcgtggcgtggcccgtggcctggcatctgtgtgcgtggctatcaggagttctaggaactcagtgcaatacgggagtgacccagctactgaaccagccacgaacagcccgccagaggcctgaagctgagcgtgtacgttaatgtgaatgtatatagtctttgcagaggtccaaatgatattcatgatggtaataaacgagatgtttgccaaataaaaaacagaaaccgcaggagtttgcgaagtgtaggaaacagattttcaaagaaatccgaacagtggccccgaggggaggagcggtttgcctgctggtggttctttcacggtggtaaaaattcattctttgagcatcataaggatggatcctgtcgggtcaccaccggtcaggtaccgtctggaaccaagtctgacaacagaaacctcgttctgaaagtcaagatagatcgagtctgtcctccagacattgccctggccccggcaccacctccattcctcagtgacaggcccagcaagctccccaaggtttgcttttgtgggtttcagagaagcaaggaccggtctgggatttgggctctcggttaagtggcagaagcgcgcctctcctccttccagggctgcggttctccagctccgaacccacacagcggcagcagcggacacgcccgtgcccacgaaggggacttgcctccctcggaggtagacgtcctgggactcttctcatctctctcccccactggggctccatcttgtccccacccacactccagtgcccttccaggtgggcagggcagttggctgtggtgatcaaaggctctaggggacaggaaatgggtacagtgctgtggggtaaattgagtcaggccctccaaggctgtgcaggtgaaccggtggtctctagagcaccgagccccagggcaagtggacccatgggcagcttccctggttactcaggtccctggggtcaggactgtggtggggagcgtggaggagacacgagtttactttgtgggcaaaagcctcctctttttccctcccctccctggatccttctttgggtacacacaggtgtaccagggacagtggcatgtgcaccagctggctgcatcgatctggccagcagcctccaggggccagaccacaaggctgagggtgagacaggccctgtcacctcagatcttgggaaggggtcagccctcgagccaaagatgaatgccatctgccctgcgtagccccccaccatgcaccaagccaccctcagcacgagtgcaaaactggcatgaggacctggccagagaccaggcagatggagccctgtggccgagggccacaaggaatcaggacagctgggaaaactgaggcccggagacagaagaaggggatgtcctgggtgcaatgtgtcagggaaccctgggcgggtgttggccgagtcacgtgaagcaaggcagctcctgcccaggaaggctctggggccccctccgatgcttcagaggcccgtctttctgtagctcatatgcccaggccctggtggtcaaagacctgacagcaaaccaggtggaacccatagctctggggaggggacggggacaggcggcattcttgtgttaggggtggtccccttggtggccatgagtacccatccccatggttccgacctgcagtctacacctgcaggcatctgcttctcttcccccaggcagaggggggtctgggcaggggccacacctggactggggagagtcaccctgtctctaccccttcccggctgccacctccacaagctcacagatcactggctagaggcgcagcctgccaagctgtcctcccgccagccactgtcaagacaggaccatggcaagccaaacgctcttcagagccttttcctcaaaccccaaaccaaacggcagctgcatctcccatcctgagatcacagccaggacaggacagccgtgagggagcccaaggcccggccggacgatggcctgatgggttagcagaaccaacatgacctctttggaaagaggctcgtgatgcacgcccctcagcctttgccactcctcctcactgctccttgtcccggccagcctcggacccaggaagccttcctctgagagggcctcccagtccccagcagagcccggctctgtgctatggctgtgcacccggacggctccttccagtccagtcctctgacctgaacaaggcagagaccagcgtctcccacggtgctcaaggagtgggtgttgggaggggcctgctgaacacccgcaagcccctctgcctgccagggccgccccaggacctggccagggctgaggctgcaggactggaggggccagcctcccaggagggcccacgaggcccagccaggtggggacaggccacagaggcccgagaggttcagtgatggggggctggcgggagagccggcggggatggggggttcacccaaacgacacagtgacagggatcaagatgggcctaaagggcttctgtttgccagtttttccaaatagatcctcaagctgacaccaaagcctgactccagcatcgatccccatccatcccagccatgtgcatgccggcccctccgtcctcgtgccggcgccacccggcccccagtgactggttcttctctctcatcacgttttcttctgccccatctgtccagtatcccagagatcactttcccaacccccagcccccgcccttcccccccacccacccctccacccccacgcgccccacatgcgtgtcctctgtgtgtcctctggccacccacacagccgtccctccatcccaccccaccctctccacccacggaccccagagtggcaccagctgccccccgtcgtgtgccagtgacaagggttgctcctgccatgacctcagctgttgccctaagggaacctgttggtgggcggcagcctcttccatacccagcgcagtccaggactgctccagacacctgcaggggcagataaaattctgctgcaggtgctgtgagcaggtgggaccagtacctcgcaacagctctggccagttggggccacctggagctccaggtgggtggccggggccaggagcacacactgggtggcggcccacacacctgcccagggtccccgaccagggcgccagggtgagcacattccctggcagggccgcgacgctgcagggccgccctctcccactccttgtttccaggggtcaatgcctggagggggtgtccccaggagaggagggtgaccccatgcagcctccccgagaccccagcactcttggagccccactcctcggggtgtactcacaggtgccaggctcccattccctttcctgggatcccagatggctcagagttgagtccttacggcctgagactggggacttctgggaacagacctgcctggataaattctgccaggagtgatgggtgctccccagggtcctctgcagcctccctgccctgcatccccgagccccggggcctatttcctcccacactgccctgcaagctcccacactgagggggtgctctccaaaatggggctggggccctggatgatgagcgtgctggccggagaggaagacagtgaggagaggggggagtccatggggctggcctcccagaggcccgccagctcccgtgcacacttcagagataaggccagggcgctgctgacaacccctgctccattttcccgaagttctaggaaactccattttggacactttctgttctttatgtttcaatccagccaagccccggagtagcttcccaaagacccagaggaacgggaactcagcgtcagtactcagagtgaaacctgcttttgaaatacgtcaatgacggcaacaggcctcccttgtccccacctggctggggtggggagccccgccaggccagctgtcagctccccaaccccatctgccagggccgagggggtcgggccggtgaggaccaggcgggggcacagccatgtgcagcctggtggggaggggacttactctctactttctcctcctcttttttttgactctcccagaggagttgagttgttttctgtagttgtgagaagcccatgccctgggtctgcaggctgtgcagggctgcgaggtggccctcgccgctccgtctgacgtactatgggtttggcctgtagatgctgtgagatgcaatagtcgggttagcgccgtgtccgtgtaataaagcgaacgttcgctgtcgcctggctgttcctctccttgggtcccaggaggcttcggctgagcctcgtctcacccgtgaattcactaattacctgctggggctcctccgtgcctggtagggcggggcctccccatgcaccacgcacactgcagggacaaacaggccagtgtgtgacgtggggctggggcgacggggaagaggcagggcgggagcacgacggggaagaggcagggcgggagcacacaggcagggaggagcagcagccccagccacgagggtccctgcagggctggcaacggctgagcctgcaaaggggactttgggggggtcccaacaactttacacccgggagatggtcctgaggattccaagactggagcccctgcctgagcagccccacctcagacagtgctggggctggggccatgacacctccgaccccgatgggggacacaggggacctcaggggacacagacaacactgaggggaggccaggcacggtggctcacgcctgtcatcccggcactttgggaggccgaggcgggtggattgcctgaggtcaggagttcaagaccagcctggccaacatggtgaaaccccatctcttctaaaaatacaaaaaattagctgggtgtggtggcgggtgcctgtaatctcagctacttgggaggctgaggcaggagaatcccttgaactcaggaggtggaggttgcagtgagccgagatcgtgccactgcactccagtctgggcaacagagtgagactccatctcaaaaaaaaaaaagaaatgaaaactgaggggacacaggggacctgagggtggacagcacaggaagggacggcttgcccctctcagccacccccatggggccctggtgttgggtcacacacggatcctgtctggaataggagttgtcctgggcgctggggccccaggggccaggctgccatgaatcctcaggcccggctctggaacagggtgtatttgaagagtgtcactggaaaggccagggtcggagccgtctgtcccctgccaggcagctggcaggagccctggccgggccttgtgtgtcagcaatctcagacagggtgaggatgacaaggttttccatggccggggcccgagctcagaggggcatgcgtcagggcctgggccgagtccagcagactctggtcttggatggaactggttgcaatcctgcctctgacagggaggtggaggcacgggtgctggcagaccctccgacacacaggcacagacacacggggcagggggctccatcccaacaggaggatcccaggctgaggccgcactccacccagcgtacctgtcctcggtgcagatgtgggcgctgcccctgaggagctttggtttctaaggggagagctggccaagtcatcaacactggacggacagcaggaaaggcgtgaggacagcggctctcgagggaggaggagcagcccggcagccctcccggaaacagtggcaccgtgttcgcagggggaacagcgtccagggaccacgcacacgtaagtgtgtggctgtgcggagccagggagaggggaaggggcgtccagggccatagccaggttccagacaaggcccattcctccccgacctcatgagcctgccccagaaaatcctctgggtggtgaacagatggggtgacagcatggtcttcagtcagcctcctggaggtgggaaaagaaaacagaatttcgggacctaaaacgcactaagccaaagggaaaagtcaagctgggagccgaatcacacacacctgcctcccattttcttcctaattggacagccacgaagatgaagaagcctgtgcctcctcgcatcgcgcttacagggaaattccttgtgggtcccaagatcttggctctgaaacagttctgctggatcccacccagatagtgtgatctagcagcttatcttcccaggtatgggacaaaggacagagctaacgttaccctccgctcaccggaggcgaatgcgaacctgccagcttcctattccctgtggcagttttatcttctgtggaaacgcagagtcgctgagcgtggggctacgtaattctcttctctacccccaccttccacatttcaaaatgtgcatttggtgactgccaatcagagattcaaaggaacgctaccacttgccttttatccgccctcccttttctttccttcctgtgttcccctcctgcccgctctttccctttaagtataaaagtctccaaaccctctttgggtttttttgtttttgttttttgagacagtctcactccgtcgcccaggccggagtgcagtggcgcgatctcggctcactgcaacctctgcctcccgggttcaagtgattctcctgcctcagcctcccaagtatctgggattacaggcgcccgccaccatgcctggctaattgtttttgtatttttagtagagacagggtttcaccatgttggccaggctggttttgaactcctgaccttaagtgatccgctcacctcggcctcccagactgctgggattataggcgtgagccaccatgcccggcctccaaaccctctttggaaaaagcagagcacagatgttgcctgtggcttcgtgtttctttttcctgggtgcacccttaaccttggcaagatacacctctaaactgattgattgagacccatctcagacaccttctggcttttacagaggtgagaacagactgggtgcaggagcctgggttcccaggctgtggcagcctccatgtccacctgctccccgagcccccagcccaagatggaggaagggccgccctgcgtgggtggtgcatggtgcagcagtgcagctccagcctaggccacgccctgtctctctctcctcccccagtcccaaattcccaggaatcccagccccactggctaaacaccggggtgcagtcacagagaggatggcctcggcctgggggtaggagctgtgcagggggccccgtctcccaccaccaatggcaggggtaagagccatgcatgaccccctggccccgagtccttcacagagtgggtgggagacggcagcactggagatgaaggccagagcagactccagcagccgcggtggcaggtgcagagggaggcgcaagggcggacacgggtcacctcctgctgcaaccctgcatgggtgaagccaggtgcagacaccaccggatgcccactgaattccgccacagtaactcacgccgtcactccccacggagaccccgccccacaataactcacgccgtcactccccacggagcccccgccccacagcagaataattctggcctcatggaagtggctcccacctaaaagatgacccagaccaggtgcggtgctcacgcctgtaatcccagcacttcgggaggccgagtcgggcggatcacctgaggtcaggagttcgagaccagcctgggcaacatggtgaaaccctgtctctactaaaaagacaaaaaaaattagctgggcatggtggcaggtgcctgtaatcccagctactcaggaggctgaggcaggagaatcacccgaacctgggaggcaaaggttgccgtgagccgagatcgcgccaccgcactccagacttggcaacaaagcaagactcctgcctaaaaaaaaaagaaaaaaaaaaaaaaggcccagaataagggttagggaggcaagggtccctggggactccatgggggtcaggatgcagagacagctgttgctgcccctcctctgggcccaggaccccgccccaacctgcctcggccctctcatcccatgcacctgctctcggtctctgctcaggccctgcctctcctggtcggaagccacctctccagcctgcttggtccctggtactagaagaaaccactcccgtgttcccacttagatcgagtgttcatgcagtgtggcgttcgtgccgtgtggatgctgctgaggtgtgaaccctgtcacagaccaaggctccagtgagccacagcgtggccaggcggaagcagaagagaccggtgacccccactcaactcagcctctccttcctccagggagagtgtcctggaggtacctgtccgagtgacagggaaggggcggggccgggagccaaggctggaagctcagccccactcagcctttgcaaatgctctagtgggagcagctggcctcaggggagggcttaaaactccaggagagcctgggcaggtgcggacgcgaggggagtggaggggaggcctcgcctggcccaccttcctcctgcccctctaccatgtggcccttcccgagccgctctctcttcccacccccgactcaggcctggctccagacggtctcctcagaccctgaggcccagggctggggggcctggaacgagaccaaggagattctggggccagagggtggggaagggaaggaggagaaagaggaggaagaggatgcagaggaagaccaggatggggatgcaggctttctgctgtctctgctggagcaagagaacctggctgagtgcccattgcctgaccaggtaacagctgtgtggaggccctggggatctcaggggacctggggcacaggggctggtggagacacggggtctgggtgacggatggctgcagctgacttaggaggggagagggccattgcccacctgcctggacgaaggtggcaaggagaccccccgcccccagccacacagactgcagggtcaaggtggcctctctcgcctggggaagggcccttgaggtgcggtttcgggggcttctctgcaggggcgagttcatccccagccagctgccccaggaaggagtgtccctgtccagagaagggctgccccttggggctgtgaccctctgctggagctggcaggccacacacccaccttccttgagcagagcctgcaggctgcctgcccggctcagggccgtgtgtcggcaggagctggaggccatcaagatgaaggtgtgtgccatggagcaggccgaggggacgccacggcctccaggagtgcagcaacaggccgaggaagaggagggcaccgcggccgggcagctgctgagccctgagaccgtgggtaggaaccaagggcacaggccgccccccactgagcaagggtcccacagtttccattaaggttgggcctggcaggctccaaggtgtcacctcccctataagcctgggcgaccttccccgtgagaggagtgaggaaggaaccaagggcctgcgggcctgagctgtgttctccgcaggctgccccctctctgggacccccgaggagaaggtggaggctgaccacagatccgtctacgtgggcaacgtgagtggtgggcggggtgaaggggcaggcagcgaatggggccccatctctaccagagggtctggcgcccggccatgggccaggcagccttgctgggaagggggtctgaccctgggggcagccccgtcaccttgaggaaacactggcctgggcacatattccagtttttcaacatgagctggaattcggggttgcacatgaaatctccacttttgagaagctttttaaaaggctccagctctccagaaggaagcgctccatacgagatatcctttcctctcttccctccaaccccagcgggggtgtggggtggaggcctggggccatccccgccacggggcccagccttggggtttctttcctcacctctaacaagaaggccccgagtcagggccaggcgtctccctcacatgctggtctgggcctgggtgcaggtggactacgggggctccgccgaggagctggaggcccacttcagccgctgtggggaggtccaccgagtcacgatcctgtgtgacaagttctctggacaccccaaggggtcagtgtggggcctggtgggggcactggccatgcggacagggcccagcctcacccctcccctccctgcccctcccctcagttatgcctacatagagtttgccaccaagggctccgtgcaggccgccgtggagctggaccagagcctcttccg

SEQ ID NO: 363 - DNA, 4435 bp, Homo sapiens
cagggccccagatggttcctgtcagggaagtggcgggcgcagctgcaggcctccggccccggcattatcacggggacacagctggctgcctcacccgcaggctgcagggagaccttccccagcctgcagccccaggcccgccccgcgtcacatgagccccagggctcccaccccctccccagggcagaggacacccagttggtggccgggagggcctcggctttccagggacagaggcccaactccaggacgccccagctggcccagcccctcctctttccctcaaggctgcaggaggtcgggaaaggcagtcctggtagaggcctgtcctgggctccaggttggcccctgagggtggccctcctcatgccggcttcaagactgagggacagggcagccagttcagcctcgggatccacctgtggctccatgtcccagacgcaccctgtgctggagagcggcctcctggcatctgccggctgctccgcaccccggggtcccaggaagggcggcccagccccagtggacaggaaagctaaggcctcagcgatgccggactccccagcggaggtgaagacgcagccccggtccacaccccccagcatgccgcccccaccgcctgccgcatcccagggggccacacgccccccctccttcacgccacacacacatcgagaggacgggcctgcgacgctgccccacggccgttttcatggctgcttaaaatggtctatggtctgtctcttgatgaacggcagcagccactcaccaacagccatcaatggtgcaccgtgcacacccaacggcttcagcaatggcccggccacctcgtccacagcctccttgtccacacagcacctgcccccagcctgcggggcccggcagctcagcaagctcaagcgcttcctcaccacactgcagcagtttggcagcgacatctccccagagattggggagcgcgtgcgcacactggtgctgggcctggtgaactcgacattgacgatcgaggagtttcattccaagcttcaggaggccaccaacttccctctgcggccgtttgtcattcccttcctgaaggcaaacctgcccttgctgcagcgggagctcctgcactgtgcacgcctggccaagcagacgcccgcccagtacttggcccagcatgagcagctcctgctggacgccagcgcctcctcccccatcgactcctcagagctgctactggaagtcaacgagaacggcaagaggaggacgcccgacaggaccaaagagaacgggtcagaccgcgacccgctgcaccccgagcacctcagcaaacggccatgcaccctgaaccctgcccagcgctacagccccagcaacgggccaccgcagcccacaccgccgccgcactaccgcctggaggacatagccatggcccaccacttccgagatgcctaccgccacccagacccccgggagctacgagagcgccatcggccgcttgtggtgcctgggtcccggcaggaagaagtgatcgaccacaagctcacagagcgtgagtgggcagaagagtggaagcacctcaacaacctcctgaactgcatcatggacatggtggagaagacgcggcgctcgctcacggtgctgcgcaggtgccaggaggccgaccgcgaggagctcaaccactgggcgcggcgctacagcgacgccgaggacacaaagaagggccccgctcccgccgcggcccggccccgcagcagctccgccggtcccgaagggcctcagctagacgtgcctcgcgagttcctgccgaggaccctcaccggctacgtgcctgaggacatctggaggaaggctgaagaggccgtgaatgaggtgaagcggcaggccatgtcggagctgcagaaagccgtgtcggacgcggagcgcaaagcgcacgagctcatcaccacggagcgtgccaagatggagcgggccctggccgaggcgaagcggcaggcctccgaggacgccctgacggtcatcaaccagcaggaggactccagcgagagctgctggaactgcgggcggaaagccagtgagacgtgcagcggctgcaacgcggcacgctactgcgggtccttctgccagcatcgggactgggagaagcatcaccacgtgtgtggccagagcctgcagggccccacagccgtggtggccgacccggtgcctggaccgcccgaagccgcccacagcctgggcccctccctgcctgtgggtgctgccagccccagcgaagccggctctgcggggccttctcgccccggctcccccagcccacctggcccactggacaccgtgccccgctgaccccactggcccctggcctgccggacacagcaccgtgccaaccccacccagctccaggcccaccggatgctgtgcctggcctccgatgcctggcctgccagacactgcgccccgcctgacctgggggagccgaccaattagtcactgctgctactgcccctctccgaaagaagacacagaaccaacaaaaccgcattcagtgcacctgcctcagctacctaatgattccgcgcggagacctcctgacaacgtctcttcaagcatcctcagaagcctcgactgagctttagacagcagagcagatgccgcaggcgcggcggctctgcccacctctcttttcctctctgtctgtctctccccctctgtcttctctatcctctctctctctatgactatcacacactttctcttcaatgaaaaaatcgaattggtggcttatattttcagcaaagaattttggggggttttgtgtgttggcaaaagagctactcagaaatggacaaagaaaacgggggggttctccccctcctgattaaaaagggagaaagaaaactgcgattttatagctggagatctgaacccagctgtgcccctcccccaggggcgtgaggctgatcagcgaagacgggaggaaagatttcgatttctgactcaagatgcatttttggtttcagatttttttttcctgtaatgttaaactctttggctttaagtaaaaatccaaaaagtttttttaaaaaagcaaaggaagcatacttgtgaactaccttgctagctagccagccaaggataccggacacacctctgctccaaaggaaatccaaaaaagcaaacacaagaaatcaaaatccaaaatttgtttgtcactgccaaagtatttttttcactgtttcacttgctcttgggtttgtttggatgtgggtctttttctcttctgttctgattttgtttgtgggtgtcgggatatttgggtgcagagggtttgtgcccagttagaagcgacttttgttctcttctgcgtaggcgttggtgcgtccgccgcgtgtgcgtggtccgtgtgccgttgctccggcctgcgtctccatatgtgtaggaaaggacacgccgtctgtcctcacgccccctgtgacttttcatatttccgttttccacttgtggaaaaaaagtgctaaagttttcttcccagagagagcataattccgaaacaaaactgtgacaatcttttgggttgattctcgactgcttttcgagcatgcggagccagcaggcctccctgaaacactgcttctcggccagcccgtcctcctctacctctctcctctccgcgccctccgacctctctcggccccctcaccccagctccgacctctctcagccccatcgccccaactccaacctctcggccccatcgccccaccgcagctactcccctttcttccaaacttttgcagaaaaaacaaaaaaactacaaacaaaagcagccctctgcctcctccccagggaagaccctgaccgtgtacatagccctggtgctcctgcccagccacccctcagatgcgttcgcctctggccctggggtgtgtctcggtgacgttttctatcagacgtgctccctcccatcctccagccctgcccaccctccctccactcctctcaactgcctcagcgatttcaagaaggaaataaagggataaagaaattcatgcttgcaccgagtacaaggacagacagcaggcacggcccgcagcctggcatctgtgcgtgtggcgtggcccgtggcttggcatctgtgtgcgtggtgtggcccgtggcctggcatctgtgtgcgtggcgtggcccgtggcctggcatctgtgtgtgtggcgtggcccgtggcctggcatctgtgcgcgtggcgtggcccgtggcctggcatctgtgtgcgtggctatcaggagttctaggaactcagtgcaatacgggagtgacccagctactgaaccagccacgaacagcccgccagaggcctgaagctgagcgtgtacgttaatgtgaatgtatatagtctttgcagaggtccaaatgatattcatgatggtaataaacgagatgtttgccaaataaaaaa

SEQ ID NO: 364 - protein, 645 aa, Homo sapiens
MPASRLRDRAASSASGSTCGSMSQTHPVLESGLLASAGCSAPRGPRKGGPAPVDRKAKASAMPDSPAEVKTQPRSTPPSMPPPPPAASQGAWPSFTPHTEDGPATLPHGRFHGCLKWSMVCLLMNGSSHSPTAINGAPCTPNGFSNGPATSSTASLSTQHLPPACGARQLSKLKRFLTTLQQFGSDISPEIGERVRTLVLGLVNSTLTIEEFHSKLQEATNFPLRPFVIPFLKANLPLLQRELLHCARLAKQTPAQYLAQHEQLLLDASASSPIDSSELLLEVNENGKRRTPDRTKENGSDRDPLHPEHLSKRPCTLNPAQRYSPSNGPPQPTPPPHYRLEDIAMAHHFRDAYRHPDPRELRERHRPLVVPGSRQEEVIDHKLTEREWAEEWKHLNNLLNCIMDMVEKTRRSLTVLRRCQEADREELNHWARRYSDAEDTKKGPAPAAARPRSSSAGPEGPQLDVPREFLPRTLTGYVPEDIWRKAEEAVNEVKRQAMSELQKAVSDAERKAHELITTERAKMERAEAKRQASEDALTVINQQEDSSESCWNCGRKASETCSGCNAARYCGSFCQHRDWEKHHHVCGQSLQGPTAVVADPVPGPPEAAHSLGPSLPVGADSEAGSAGPSRPGSPSPPGPLDTVPR

SEQ ID NO: 365 - DNA, 3626 bp, Homo sapiens
gggatccacctgtggctccatgtcccagacgcaccctgtgctggagagcggcctcctggcatctgccggctgctccgcaccccggggtcccaggaagggcggcccagccccagtggacaggaaagctaaggcctcagcgatgccggactccccagcggaggtgaagacgcagccccggtccacaccccccagcatgccgcccccaccgcctgccgcatcccagggggccacacgccccccctccttcacgccacacacactgatgaacggcagcagccactcaccaacagccatcaatggtgcaccgtgcacacccaacggcttcagcaatggcccggccacctcgtccacagcctccttgtccacacagcacctgcccccagcctgcggggcccggcagctcagcaagctcaagcgcttcctcaccacactgcagcagtttggcagcgacatctccccagagattggggagcgcgtgcgcacactggtgctgggcctggtgaactcgacattgacgatcgaggagtttcattccaagcttcaggaggccaccaacttccctctgcggccgtttgtcattcccttcctgaaggcaaacctgcccttgctgcagcgggagctcctgcactgtgcacgcctggccaagcagacgcccgcccagtacttggcccagctggtgcctgggtcccggcaggaagaagtgatcgaccacaagctcacagagcgtgagtgggcagaagagtggaagcacctcaacaacctcctgaactgcatcatggacatggtggagaagacgcggcgctcgctcacggtgctgcgcaggtgccaggaggccgaccgcgaggagctcaaccactgggcgcggcgctacagcgacgccgaggacacaaagaagggccccgctcccgccgcggcccggccccgcagcagctccgccggtcccgaagggcctcagctagacgtgcctcgcgagttcctgccgaggaccctcaccggctacgtgcctgaggacatctggaggaaggctgaagaggccgtgaatgaggtgaagcggcaggccatgtcggagctgcagaaagccgtgtcggacgcggagcgcaaagcgcacgagctcatcaccacggagcgtgccaagatggagcgggccctggccgaggcgaagcggcaggcctccgaggacgccctgacggtcatcaaccagcaggaggactccagcgagagctgctggaactgcgggcggaaagccagtgagacgtgcagcggctgcaacgcggcacgctactgcgggtccttctgccagcatcgggactgggagaagcatcaccacgtgtgtggccagagcctgcagggccccacagccgtggtggccgacccggtgcctggaccgcccgaagccgcccacagcctgggcccctccctgcctgtgggtgctgccagccccagcgaagccggctctgcggggccttctcgccccggctcccccagcccacctggcccactggacaccgtgccccgctgaccccactggcccctggcctgccggacacagcaccgtgccaaccccacccagctccaggcccaccggatgctgtgcctggcctccgatgcctggcctgccagacactgcgccccgcctgacctgggggagccgaccaattagtcactgctgctactgcccctctccgaaagaagacacagaaccaacaaaaccgcattcagtgcacctgcctcagctacctaatgattccgcgcggagacctcctgacaacgtctcttcaagcatcctcagaagcctcgactgagctttagacagcagagcagatgccgcaggcgcggcggctctgcccacctctcttttcctctctgtctgtctctccccctctgtcttctctatcctctctctctctatgactatcacacactttctcttcaatgaaaaaatcgaattggtggcttatattttcagcaaagaattttggggggttttgtgtgttggcaaaagagctactcagaaatggacaaagaaaacgggggggttctccccctcctgattaaaaagggagaaagaaaactgcgattttatagctggagatctgaacccagctgtgcccctcccccaggggcgtgaggctgatcagcgaagacgggaggaaagatttcgatttctgactcaagatgcatttttggtttcagatttttttttcctgtaatgttaaactctttggctttaagtaaaaatccaaaaagtttttttaaaaaagcaaaggaagcatacttgtgaactaccttgctagctagccagccaaggataccggacacacctctgctccaaaggaaatccaaaaaagcaaacacaagaaatcaaaatccaaaatttgtttgtcactgccaaagtatttttttcactgtttcacttgctcttgggtttgtttggatgtgggtctttttctcttctgttctgattttgtttgtgggtgtcgggatatttgggtgcagagggtttgtgcccagttagaagcgacttttgttctcttctgcgtaggcgttggtgcgtccgccgcgtgtgcgtggtccgtgtgccgttgctccggcctgcgtctccatatgtgtaggaaaggacacgccgtctgtcctcacgccccctgtgacttttcatatttccgttttccacttgtggaaaaaaagtgctaaagttttcttcccagagagagcataattccgaaacaaaactgtgacaatcttttgggttgattctcgactgcttttcgagcatgcggagccagcaggcctccctgaaacactgcttctcggccagcccgtcctcctctacctctctcctctccgcgccctccgacctctctcggccccctcaccccagctccgacctctctcagccccatcgccccaactccaacctctcggccccatcgccccaccgcagctactcccctttcttccaaacttttgcagaaaaaacaaaaaaactacaaacaaaagcagccctctgcctcctccccagggaagaccctgaccgtgtacatagccctggtgctcctgcccagccacccctcagatgcgttcgcctctggccctggggtgtgtctcggtgacgttttctatcagacgtgctccctcccatcctccagccctgcccaccctccctccactcctctcaactgcctcagcgatttcaagaaggaaataaagggataaagaaattcatgcttgcaccgagtacaaggacagacagcaggcacggcccgcagcctggcatctgtgcgtgtggcgtggcccgtggcttggcatctgtgtgcgtggtgtggcccgtggcctggcatctgtgtgcgtggcgtggcccgtggcctggcatctgtgtgtgtggcgtggcccgtggcctggcatctgtgcgcgtggcgtggcccgtggcctggcatctgtgtgcgtggctatcaggagttctaggaactcagtgcaatacgggagtgacccagctactgaaccagccacgaacagcccgccagaggcctgaagctgagcgtgtacgttaatgtgaatgtatatagtctttgcagaggtccaaatgatattcatgatggtaataaacgagatgtttgccaaataaaaaa

SEQ ID NO: 366 - protein, 453 aa, Homo sapiens
MPDSPAEVKTQPRSTPPSMPPPPPAASQGAWPSFTPHTLMNGSSHSPTAINGAPCTPNGFSNGPATSSTASLSTQHLPPACGARQLSKLKRFLTTLQQFGSDISPEIGERVRTLVLGLVNSTLTIEEFHSKLQEATNFPLRPFVIPFLKANLPLLQRELLHCARLAKQTPAQYLAQLVPGSRQEEVIDHKLTEREWAEEWKHLNNLLNCIMDMVEKTRRSLTVLRRCQEADREELNHWARRYSDAEDTKKGPAPAAARPRSSSAGPEGPQLDVPREFLPRTLTGYVPEDIWRKAEEAVNEVKRQAMSELQKAVSDAERKAHELITTERAKMERAEAKRQASEDALTVINQQEDSSESCWNCGRKASETCSGCNAARYCGSFCQHRDWEKHHHVCGQSLQGPTAVVADPVPGPPEAAHSLGPSLPVGADSEAGSAGPSRPGSPSPPGPLDTVPR

SEQ ID NO: 367 - DNA, 3745 bp, Homo sapiens
atgccggcttcaagactgagggacagggcagccagttcagcctcgggatccacctgtggctccatgtcccagacgcaccctgtgctggagagcggcctcctggcatctgccggctgctccgcaccccggggtcccaggaagggcggcccagccccagtggacaggaaagctaaggcctcagcgatgccggactccccagcggaggtgaagacgcagccccggtccacaccccccagcatgccgcccccaccgcctgccgcatcccagggggccacacgccccccctccttcacgccacacacacatcgagaggacgggcctgcgacgctgccccacggccgttttcatggctgcttaaaatggtctatggtctgtctcttgatgaacggcagcagccactcaccaacagccatcaatggtgcaccgtgcacacccaacggcttcagcaatggcccggccacctcgtccacagcctccttgtccacacagcacctgcccccagcctgcggggcccggcagctcagcaagctcaagcgcttcctcaccacactgcagcagtttggcagcgacatctccccagagattggggagcgcgtgcgcacactggtgctgggcctggtgaactcgacattgacgatcgaggagtttcattccaagcttcaggaggccaccaacttccctctgcggccgtttgtcattcccttcctgaaggcaaacctgcccttgctgcagcgggagctcctgcactgtgcacgcctggccaagcagacgcccgcccagtacttggcccagctggtgcctgggtcccggcaggaagaagtgatcgaccacaagctcacagagcgtgagtgggcagaagagtggaagcacctcaacaacctcctgaactgcatcatggacatggtggagaagacgcggcgctcgctcacggtgctgcgcaggtgccaggaggccgaccgcgaggagctcaaccactgggcgcggcgctacagcgacgccgaggacacaaagaagggccccgctcccgccgcggcccggccccgcagcagctccgccggtcccgaagggcctcagctagacgtgcctcgcgagttcctgccgaggaccctcaccggctacgtgcctgaggacatctggaggaaggctgaagaggccgtgaatgaggtgaagcggcaggccatgtcggagctgcagaaagccgtgtcggacgcggagcgcaaagcgcacgagctcatcaccacggagcgtgccaagatggagcgggccctggccgaggcgaagcggcaggcctccgaggacgccctgacggtcatcaaccagcaggaggactccagcgagagctgctggaactgcgggcggaaagccagtgagacgtgcagcggctgcaacgcggcacgctactgcgggtccttctgccagcatcgggactgggagaagcatcaccacgtgtgtggccagagcctgcagggccccacagccgtggtggccgacccggtgcctggaccgcccgaagccgcccacagcctgggcccctccctgcctgtgggtgctgccagccccagcgaagccggctctgcggggccttctcgccccggctcccccagcccacctggcccactggacaccgtgccccgctgaccccactggcccctggcctgccggacacagcaccgtgccaaccccacccagctccaggcccaccggatgctgtgcctggcctccgatgcctggcctgccagacactgcgccccgcctgacctgggggagccgaccaattagtcactgctgctactgcccctctccgaaagaagacacagaaccaacaaaaccgcattcagtgcacctgcctcagctacctaatgattccgcgcggagacctcctgacaacgtctcttcaagcatcctcagaagcctcgactgagctttagacagcagagcagatgccgcaggcgcggcggctctgcccacctctcttttcctctctgtctgtctctccccctctgtcttctctatcctctctctctctatgactatcacacactttctcttcaatgaaaaaatcgaattggtggcttatattttcagcaaagaattttggggggttttgtgtgttggcaaaagagctactcagaaatggacaaagaaaacgggggggttctccccctcctgattaaaaagggagaaagaaaactgcgattttatagctggagatctgaacccagctgtgcccctcccccaggggcgtgaggctgatcagcgaagacgggaggaaagatttcgatttctgactcaagatgcatttttggtttcagatttttttttcctgtaatgttaaactctttggctttaagtaaaaatccaaaaagtttttttaaaaaagcaaaggaagcatacttgtgaactaccttgctagctagccagccaaggataccggacacacctctgctccaaaggaaatccaaaaaagcaaacacaagaaatcaaaatccaaaatttgtttgtcactgccaaagtatttttttcactgtttcacttgctcttgggtttgtttggatgtgggtctttttctcttctgttctgattttgtttgtgggtgtcgggatatttgggtgcagagggtttgtgcccagttagaagcgacttttgttctcttctgcgtaggcgttggtgcgtccgccgcgtgtgcgtggtccgtgtgccgttgctccggcctgcgtctccatatgtgtaggaaaggacacgccgtctgtcctcacgccccctgtgacttttcatatttccgttttccacttgtggaaaaaaagtgctaaagttttcttcccagagagagcataattccgaaacaaaactgtgacaatcttttgggttgattctcgactgcttttcgagcatgcggagccagcaggcctccctgaaacactgcttctcggccagcccgtcctcctctacctctctcctctccgcgccctccgacctctctcggccccctcaccccagctccgacctctctcagccccatcgccccaactccaacctctcggccccatcgccccaccgcagctactcccctttcttccaaacttttgcagaaaaaacaaaaaaactacaaacaaaagcagccctctgcctcctccccagggaagaccctgaccgtgtacatagccctggtgctcctgcccagccacccctcagatgcgttcgcctctggccctggggtgtgtctcggtgacgttttctatcagacgtgctccctcccatcctccagccctgcccaccctccctccactcctctcaactgcctcagcgatttcaagaaggaaataaagggataaagaaattcatgcttgcaccgagtacaaggacagacagcaggcacggcccgcagcctggcatctgtgcgtgtggcgtggcccgtggcttggcatctgtgtgcgtggtgtggcccgtggcctggcatctgtgtgcgtggcgtggcccgtggcctggcatctgtgtgtgtggcgtggcccgtggcctggcatctgtgcgcgtggcgtggcccgtggcctggcatctgtgtgcgtggctatcaggagttctaggaactcagtgcaatacgggagtgacccagctactgaaccagccacgaacagcccgccagaggcctgaagctgagcgtgtacgttaatgtgaatgtatatagtctttgcagaggtccaaatgatattcatgatggtaataaacgagatgtttgccaaataaaaaa

SEQ ID NO: 368 - protein, 537 aa, Homo sapiens
MPASRLRDRAASSASGSTCGSMSQTHPVLESGLLASAGCSAPRGPRKGGPAPVDRKAKASAMPDSPAEVKTQPRSTPPSMPPPPPAASQGAWPSFTPHTEDGPATLPHGRFHGCLKWSMVCLLMNGSSHSPTAINGAPCTPNGFSNGPATSSTASLSTQHLPPACGARQLSKLKRFLTTLQQFGSDISPEIGERVRTLVLGLVNSTLTIEEFHSKLQEATNFPLRPFVIPFLKANLPLLQRELLHCARLAKQTPAQYLAQLVPGSRQEEVIDHKLTEREWAEEWKHLNNLLNCIMDMVEKTRRSLTVLRRCQEADREELNHWARRYSDAEDTKKGPAPAAARPRSSSAGPEGPQLDVPREFLPRTLTGYVPEDIWRKAEEAVNEVKRQAMSELQKAVSDAERKAHELITTERAKMERAEAKRQASEDALTVINQQEDSSESCWNCGRKASETCSGCNAARYCGSFCQHRDWEKHHHVCGQSLQGPTAVVADPVPGPPEAAHSLGPSLPVGADSEAGSAGPSRPGSPSPPGPLDTVPR

SEQ ID NO: 369 - DNA, 53828 bp, Mus musculus
  misc_feature (1)...(53828): n = A,T,C or G
tcaaaaaaaccaaaaagatcaagaaatttcctgggaatggagatagttgaatggttaaggaaactggctatggtcacgtgtggcagtccagccctttatttccagcagtcaggaaacacaggcagttgatcctctgtgagtctgagaacagcctggaccaaacagtgagttccaggacagttggggctacagagagattttgtgtcaaacaaaacatagagtccctgtttcagggaaacacacacaccacagcactggctatcctcccccaggacccaggttcaattcccagcacccacacagtggatcttttgtcccaaatgatccaaggcaacctggcacacctttctggcttcctcaggtacccaggtactggagaatagtgctgtacacagacatgccagaaaacagaagaccctatagacgcaaagtaagacaaacagcattttccttacaaaggcaatgctgctgaggctgatggaaacaacacctttcagaacatcaccttaagctcagcggccttttaaacggcttgtgcacaaatggtctcttcatacaaaacaaaattcaacgccaagctaagctgaaagttttctagagtcaacctgcactccatgggaaaagcacaggctccctcccgtggctcccacagaactctgccactaaagctcaacagtgtaaatggaaagccaaattccttgttccatggaaaaccgaaaaacactaggtcgaatctcagcacaaaaccctttgaagtagcggtgtggaaacccagccaggttagaagaaggtcggcccagtggtccatatactcaccccctccttctcattctccatcaacactttcttcagagccaccttctggcccgtctgacggtgcttggctttaaagacttccctgcaggcacagagaaagacccaagggacccataaggcatttccgcagggagtgcccctcccccgcgcgaaggggagcagcaggagcccagacccacggcgggcggggtgcggcctcggatccgggacgcggtcattccacaccgcgtgtcttccgtcctcctcccggcctctgcttactcctactcagcccctactcctcccctagaggtggccgctcacattcggagtggctctcagcaaccctacccaacccccatcacgggccccaggctcctccccgccagtcggctcggttgggccgggaacgtctgcgccgcggccgagcaagaccgggcaacagccacgaaaacagaagcttccggaccacctcggcccgggctctgggcgacccgacgtcggccctggaaagtgcaggtcccgggctcgcggtcccacgcggcctaatcttacccgaatgtgccttggccgatcttggcaagtttctcgtacttggtgacctcatcgcagaacgggcattccaccgagtcgtactgcttggccatggccacctccagcgcgcctccgccgccgccgccgccgccgcccccagccgcagctcccgccgctcccggtcccgccacactccaggcccctccgcggccgcgccacttccgcctccacggccacttccggcctcgaggtgccgagcccgcctcttccggtctccgcccgccgccaggccccctgggacttgtagttcccgggaggccagggggagccggagctgcagaggagcctccgccgccgccactgcccccgcctccgccgccgccgccagcgctgttggcggccccgatcgggggcgcaggaagccgtggcgctggggctggggctcgcggcggtgcgtcccgctgcattggcccgggccgtgctgctgccgaagctgctgccgctctggctcccgatccggggccagccgcagtgccctgctcctcctcctccgacggcgccgcctccgccgggctgcgcggggcggcgggtggtggtggggggaaggcctgggggcggaggctccctggccaagcccggcccggggcggcagggcaagggggcgagataggcagagcagacgaggaggcggcccgaaagcccgggagggggcgcgttataaagggggnnnnnnnnnnnnnnnnnnnnnnnnnnnnnnnnnnnnnnnnnnnnnnnnnnnnnnnnnnnnnnnnnnnnnnnnnnnnnnnnnnnnnnnnnnnnnnnnnnnnnnnnnnnnnnnnnnnnnnnnnnnnnnnnnncaccccctccctcctcctcccacccttcgcagccgcacctgccgccgccgcctcccgccctcccgctcccagtccagcgtccgccctcggcgcgtcactgctcgcagcccctcctctgcctttggaggtggggctccgcactagacacctgcctgcggctccctcctgcgtgcctcagtttatcccccgaatgccagctgctacagaatggcccttcttccaggaccgggagtgtgctcccggtgaggcgaaggcaggaggtgccgtgggagcggccttgaggccaggggaagagagaactgcccccgctgccgcctccgtcgtctcagccacccgccgttgacatggcaactgacggccgccagggggcgcggcgacactgtgggcggtgagcgatcaacgctcaggcctaaacccttggatcttgtgttgtcaggatggatctactacaaccttccttcacagagccgcgccaaagctggtctgtccagagtcaatcatccccaaaactgttaacattgagccggcactcctgatgcttttgaaatgggcgtgagccgggccttgatggcgcacgcctttaatcccagcacttggcagaggcagatggatttctgagttccaggccagcctggtctacagagccagttccaggacagccaggaaaaacaacaataacacagagagacagagaggagagtctgaagtctgttctgtcttcctctactgtcttgaaattctgagctgatcatggccgatttttccagcgtttacctcctggtctgtggtcctacaagctcccttctgtttcagtttcccaatccctcctgtcttcagagttgccaccccactctccagggtcagctgcaggcttcccgtttgcttccccctcttgtttgatggagacaagtcgtggctggtctggtgctcacacagtagtctaggctgacctttgaactccaggcatccctcccaactcaccgtatcactgtgtccagcagtgctttccaggtttatcccacattgtctgggcttgaagattcttggaaggaggactggtttcggggaccctggagccccagagtacctactatgagaagggtcctggcagcaagatttttcaagaccctccatagagccagggctttaaaggagatcaagccatatgacccagagcctaccttcctggatacactgcttacctgaaacaagaagtggtggtggggggatgccaccaggggtaaggagagagtacgtgcattaattatgatgacaggatgtggctaagtcctccctttagccctgcacaggagttatttctattatcagttattcacggagcactgctcttccctccactgtacataacgaccctgacactcagaggtgagatgactgggccatggtcacactgccagtcagtggccacactagctttgaaccaggtaagtttggcataaactcccaacagtcctcctatgtcaaggcccctcccaatctgggctcagcatgaaagcgtgacaaaacttgggagtgatctcacctggcactcactgcccccgggggtgtgtgtgaggagtagtggggggggggtgaggaggtgtggcaggtaacagtagcactgagggccgaggactttgcagggcttatgtggagttttaagccgtagctggtgcctgtttctcatgagccctccctaagtcacatcctgtgggcagagaggctttagcagggtttcctgtgatgttgtcacctctggccccaaccagagccctgacatcttccagtcacttcctcagagtcatgggccctcagctctccacagggaagcagtggtggtctggaggctttgtaaggctgcccagttctgaagtccgggttctccaccactggtaaatccaggaggggactagagagggggactagcctttcgaatccactttggctaccgctttgttggctgcaaataatgcctgcttcctgtggattgcccaaaccaccaaggcccagcatgtgactcagcctctgtcaacacctgctgactggctggctgatgacacaccctcaagagggtctggtgtatggccatttaacagctacggaagccaagcctggtggcagacaactggaatcccagctactaaagaaactgaaacaggaaagttcaaagtctagggcttgtctgggctagagagtaagttcaaagccagtttagagtctctgtgagacctggtctaaaaaaacgaaaaaataaagccaggtatggcccacacatttaatcccagcactcaggaggcagagtcaggtgagtctctgtgagtttgagaccaggctggtctatacattgagttccagatcagccagagctacataacaagaatctgtctcaaaaaataaaataagctgggtggtggtggcacacacctttaatcccagcacttaggaggcagaggcaggcggatttctgagttcgaggccagcctgatctacagagtgagttccaggacagccagggctacacagagaaaccctgtcttgaaaaaccaataaataaataaatttaattaaattaaaaaaatacaaagccttagagtgcttttctagactaactttgaactcacaaagaactccttgcctctgcttcccaaatgctggaattaaaggtttgtgccactagctcaactccagcttttgaccttatccaggatcgtggtttgaatatgaatggcatccatggatgagtggtggtagcacacacttttaatcccagcccttgagaggcagaggttgatggatctctgtaactttaattgtttcaaaacgatttttttaaagatttatttatttattatatgtaagtacactgtagctgtcttcagacactctagaagagggagtcagatcttgttaggatggttgtgagccaccatgtggttgctgggatttgaactcaggacctttggaagagcagtcggtgctcttaaccgctaagccatctctccagccccaaaaccgatttttaatgatggttcttaaacactttaacgttccttttagcccactacccaccagagatagtgggaaagaaaggattcggggcaggaatttggacctgtttagaaaggttctttggagcaactctcatctgtgttgtctggaaatcggcagctgagttcactggttagcagcggcagctccatccactcacacatacctcatggatacaccagcagtctagtttggtagagtcgggatagcaaacacgaatcagcagcggtggcactatctagcagagacaggcagacctcagccttggctcgagtcattaggagggaccctgagggatgccaggagaagttctcagctgtgtctcagggaagcaaagatcagggaagacctgagacccacaagtgtcacacggctagctcgataagcaagtcatgctcagcctccgtcactgtccatcgagtcctgtttatcccctccaaacatcacatgtcctccaccagtcttgcctcagcatgttcgtctgtctcagctgacatcactctgccaatcagccagagtctagcatgctaccagaaggtttttttggtgtgtttctctctatagagtcccgacaaatgcaggtcaattacgcaatgtaaggtggactaatacatgcgtgttgttagcaaagaatccttcatcacgtgcccttttacatgtttgctttagcagaacatcctcctacctgcttcagtgaaatcttgaaatcaagtcagccttagttgttcgttgacctgtgttcacctcagctaaacattccttcatatgtttgccccagcaaaacaccatcaaaccaactttccaaagaacccttaagtttccacttcatatctctgtgagttcaaggtcagcctggtctacagagctagtttcaggaaagctagagctgtactgagaaactctgcctgggggggaaaaatggcctctatatatttgaatacttaatcaccagagagtggaactgtttaaaaggattagaaggactaggagctggagccatattggaatgggtgtggccttattaaaggaaatgtatctctggggtcaggctttgagttttttgtttgttgtttgtttttgtttttcgagacagggtttctctgtgtagccctggctgtcctggaactcactctatggagaccaggctggcctcaaactcagaaatccacctgcctctgccttccaaatgctgggattaaaggcgtgcgccaccactgccctgcagctttgaggtttcaaacacccaaaccaggcccagtatgtgcctgtctgctacctacagatcaagatggggctctcagctactgctctagtgccagcatgatgccttggtcctgccatgctccccactatgatgttaataaactagccctctgaaactgtaaacaagcttagacttaaatgttttctttcataagagctgccttggtcatggtgtctcttcacagcgacagaacagtctatagacacctggaccctgcttttcctctcccaaacctggatagggttagggtctgtggaggggaagtgaaaacaggctcataagatgtgcacatgtgagctgttagctgtgggtcagctcagtagctgagggatacggaacagagaacggtttgtgatactggggccccccctctaatcatggaagttctgctcttattggtcttgctgcctctgcctggccctgtgttgacatacattatctccctacgtgttactgtagtccccttaggagcctgctatgactggatccaggtgaccggagaagaaacgggctcagtagcctggcgagggtcacacaatcaaagaactggggagctgggattgaaattcggtctctgctacactgccttttgttttgttgattttggttatttgtttttgttgttttgctttgttttgcttttctgaggcagggtttctctgtgtagccctggcagtcctggaactagctctgtagtccaggctggcctcgaactcacagagatcctcctaactctgcttcctgtgagctgggattaatggtgtatgctaccacagaccagttttttttccctttctttacttctttcttctttctttctctctttctttctttctttctttctttctttctttctttctctctctctctctccctctctctctctttctttctttctttctttctttctccctttctccctttctccctttctccctttctccctttctccctttctccctttctccctttctccctttctctctttctctctttctctctttctctctttcgggggaggggtggcacttggtctatcctgcactggaaggactagaggaatcaaaagactgagggactggaggaaggctcgtgtggctgggagtgcgggtcaaacctaggcaaaagcctttactctggaggagggaaagctctaggtaggtgggcagggctacagcagagggctgactgggtggacctccaagaccagctgtggagggactgcaagacagccacgagccagcaggtctccctaaccacacttccaacggccacttgaagcagcacaaagggggctctgagcacagctccctcactacactgagcgccattcattctcccggggacaccagcaactaccctggcgcctgggccaacggcaagcccagccctgacgaagcgcctgtgccatagcaacagatgctctgagattcagctttccaggtctcagagcctgcctacccaccagggtctgcctggcctggcctggcccactgcactcctggcccttgtgccctggaggcaggactcgctgaaggccacagtgtgccgggcagaggcttctcccacgaagtagggattgcggtgattcccatttcacagataaggaaaccaaggcccatagaagcacaataaacagcagttggggagctggtctgtccagaaagccagcactagtctggtcagctaatgccatagcctaggtcaccagcccaattcacactgtgaccgtctcccaggagagaagccaggggtgtatgctttgccttcccctgggaagaccctcagctctttccaggctatgggctccttctccctatctcctgacaacaacctgaagaggagaagggggtaccaccccaggagtctgctctggaatcatatgacccaatgaacgtttctaacttgccttggtcgtggtgttttgtcacagaaaagtgactaacttcctctttagccattgagcaccggtcactgcaggcctacctacagatgcaggaccctgctgccacaacctggcaggactgggtctctttttctcaccggactttggggttgtcttcactgcatcgggagaatcagtctgacctgtcttctgccaacatcatcctgacaggaggctggggcgcagatggcctggaaatcagctcccaggactgctgtcagagcgtcagtgtccgatgattttttgatgattttattgatggaggacacaggacaggacccatgtgtcctggattgcatctcccacagaccagatcaccagctacgggaccaggtggcctgtctgcacacatgtaaccccggtacttggaggctgaggcgggaagatctcaaattggaggtcagcctgggctatgtcagatttttatctcaaaaccaacaaaaaggtgtccactctgggctgctgggcgcgtggctcagtgggagtgaacttgcttagcgagtgaaaacccagtgtcctatcctaagcacagaagaacgaacagaagaccaagagaaagagaggcttgggagggtggctgtgtgtcttgtgctgtccctattgtagagatttggtcaccacagctgcagatgtggccacactcagaactagatttgacctgtggccctccagtcccagcaagtgctactaacaccccacccccacccccaactatagctgtacctggaggtttcatttccttatacttgttctgtgtggacacaaaacacatacacgcacatacatgtttgtgtttgcagagcaccaacctggatattactggaaagacaacttgcaacccactgtgtgccaccaactctctctctgtgacctggggaaatccccttgctcctctgtgcctcagtttccctatctctgcccaaaggatatagaagacctgtccccacatgcctccgctgactcagacaaggacaatcacgcctaagcaggtattggctttatacctggctatgctctgtgttctggccactgggcagttagcatatcctgctcgccaaaaagaaacccagcctcgggcaggtgaatcatcctgtccgtaatcacacagtgacaaagtagccaatcagaagttgactttgggccacaggcccactcacagcattctcttctttattattgctactccatctcctgggtaccagggcttagaataaactgccctaaccatgagtctgtctcctcgacttcccatcctgtgggccaggcccctgacagctgttggcaggtccccagtggcccccagcctagtgggctctgttcccaaagcctgtggtttgttcctcaggccttctaggtcccaagggtttgcggtgtgccccctgcccctgctgctggctggggaggccccagcccccgccccctgtggagacggtgggagggtggggctgtgggagtttcgctagtttaaaaatacacagaggaagccagtgagagggcaagagaaaggggaaggggagcgggggaggcccatcagcccctggtgtcttgagcctggagcagccacatgctagcaaaccagagactctgcacagcttgcaaagatgacagagatgcccaagaaaacaggcagaaagttcagtgagtacagaccagccaccgtccgtccatctgtctgttcagcttagcctctctgcatctgtgtctcacgattgtcttctttctctttctctttctgtccatctgtctctctcctcggtgttggtgttgctatctgcacatgctgtggcccccggtgatctctgtctctgtctgtctttgcatttctgtctttctctctccctgcccaacctctgcttccctcttactacaagtcagcccctcagcctttctgtcttccggatcatcctggtctctctgaccatgagactgtgcatggagagacccccaagtaccccatgttgtccagaacccactcaacaccagatctcagggagctctctagggagtgagtggatgtggggaccgtggatgctgtggtgtgttgggagcagtgaggctgcgagagactagtaccaggtacttgggtgaactacacccacctatttctttctccaggtcaatccattttgggtcccaaacttctgtcccaggttcctctgactttccagttctctctctctctctctctctctctctctctctctctctctctcgtgtgtgtgtgtgtgtgtgtgtgtaaatggagatacacgcatctgtaatcctagcactcagaagtcaaaagcaggaggcgggtgagtagactgaagcaggttagagtgagacattgtctcatataaacatacaaagcaagcaaacaaaatctgcagcattgacaaaggaggcagtcagtgacccttgtgttacaaagatctctgtcccagggcaacctgtctagaaggagggcggtagccagcactgtccgggatgggaccagggggactgggcagggatgaattctgaagtgcagagccccgtgcttccacccaggatcagcgaggttctgctgtcgggtgctaggctgatcccttcccctctccgggcctcagagtctcaggggcgtagacacctgaggatgcagaggagttgggaagagcaaaggccaatgtgttctccttttgctcaagtcatctagaggcctaaggaagtcagagacgggacagtcccacagtcttaggggccacagggaggagggagcaaagagatacacttccgtccctgctggaagattgtatcacaggagtttgtaaggcaggttcagcccactgggaggaaagaaacacccacagacaggggccccaattctcaggcagacagacagcctcatccatgtcctttcaaccccagtgccagagattgccttggacactactctttgtacacaccccccccacacacacacaccatacagattcacacacggacaccatacatattcatacacacacaccgtacacattcacacacagacaccatacacacacacataccacatacacacactatacacattcacacacagacaccataaacacacacacaccatacacactctcacagatacaccatacatacttactcataaactacacacactcaaataccatatgcactcacacatacttatacacacacacacacaaaccccacacatacccataacacacacacacacacacacacacacacacacacacacacacacacatgcacatctaggctttggggtaagctgtggggagctcagaccgtccgtttcacccttctgaatatcaatttccttataaggaaagcggtatgtttgcatattctaagaattcacagtttgacaagtgggaggcatttttggtcatcattgtcatcttccttttgtacctccttttgaggatattttatatgccagatagcacatgaagcaagcatgttatctacaaggtttgcatgtatgctcatgtttatgttcatgttcatacatgtatgcatgggtatgttccgatacaacagcaggcatcgtctttgatcccttgtcatcttactttaaaacagatttctttagaatttgcattttttacaaaatacattgctggggttagtaatgcacacctttaatcccagaacttgggaggcagaggcaggtggatcttggtgaattggaggccagcctggtctacagagtgagttccagaacagccagggatatgtaaggaaacctaccatacatacgtacatacatacatacattcgtatatacatacatgatgatcatggtagtatacctctttaatcccaggactaggaaggcagaggcagatggatctctgtgagtttgaggccagcctggtctaagtaagttccagggcagccagggatgtgtggggagaccctgtctcaagaacaagttacgtctatctgtcatgtttctctgtccaccacatgtgtatagtccccacggatgccagaggccagaataggacactggatcccttggaagtggagttatagacggttgtaagccgccatgtgggtgctggaaagtggattcgggtctggaagagcatctgtcctcttaactgctaagcacctctccagcttcagtgtgtgtgtgtgtgtgtgtgtgtgtgtgtgtgtgtgtgtacagatgtatgtgtgtgagagggtgttcacagaggtcagaaaggggcattggatcctttggagctggaggcggttcacatgatgggggtgctgaggtctgaactccagtcctctcgcgcagcagtgagcccctttacctgctgaatcacgcttccaattcctctctgtttttgttattttttttatggtttattttattttatttttatttttgagactgggcctctgtatggaattcttgctgtgggattcaccatgtagatcaggctggccttgaactcacagagatccacctgtgtcagcttcatgagcactgggactaaaggcatgtaccaccatgcccagcttctatatgggtcctagggatttgaactcaggttgtcatacttgtgtggctcacattttttcaaagtcatctccctaaccctttatttacctacttttctccagtcctcttgctgcatatagggagggtccttgtgttactgatgtgggtgaaggagctcagagaggtctaatgacttgcctaaggtcacacagctagctagaatgtggaagaagggcttgagctcagcactgtgactgcagagctgcatgtcgctgcacttccgggagcagaggaatgaggagggggtgtggagtgatagctcctcttgcagaagatgagttccgtttccagcacccattttgagcagatcacaacctgtaactacagccccaggtgatttgatgtcctcttctggcttccaagggtatccacgctcaggatgtatgtaccctgctcccacacacatacacataattaagaattaaaaacaaaaaacaacttagatgggctggagagatggctcagcggttacgagcactgactgctcttccagaggtcctgagttcaagtcccagcaaccacatggtggctcacaaccatctgtagtggaagctgatgccctcttctggtgtgtctgaaggcagtgacagtgtatatatatatatatatacacacacacacacacacacacatacacacacacatatatataaaatctttaaaaaaaaaaaaacttagagaaagaaaatagtgaaaagcctcccctggtgtgtcctgaactttggtactctcgccgtgcagactgtaggggtttttacattattccattcctgctgacactgtgattaattcttttcctctcctcctctcttgccagagttcttcaagttcaagggccttgggagcctttccaatctcccgcggtccttttctctgagacggtcttcagcctctgctagtatccggtcttgtccggagcctgacacctttgaagccacacaggatgacatggtgacactcccaaagagtcctcctgcctatgcacgttctagtgacatgtacagccacatgggtaccatgccccgccctaacatcaagaaggctcagaaacaacaggctgtccagaaggcccaggaggtcagccgagagtcgcacctggtttctcgaaggctgccagagccaccagacttagaggcagccaaggaggcaggggagggaactgaagccctactggaggacacggcaccttcagcagtagaagtggaccctatgagggaactggaggatctcacagtagacacagagaaggagcaagtccctggggatgtgagcccagaaaggtaggtgccaacagggcacagacatctggactgaaaagaaaaggcttgggcttagggagtggtacatcctgtgggcccagtatggaggcagcggaggctgggggattgctatgaatttgaggtcagcctaaactacaagaatgaaaccctgtctcaaaacataacaggaaatgaaatacaaaggaaatgaagtgagagagggagctaggtgtgcagatcagctggccaagtgctttcctagcgcacaggaagccctgggtttgatccctgcctgaatgtgggtttctattgttgcagagaaaccccataaccaaaaaagcagcgtgaggaggcaagtgcttatttggttcacacttgcacatagctgctcacatcactaaagggagtcaggttggggaactcaagcagggcgggaacctggaggcaggagctgatgcagaggccatggaggagtgctgcttactggcttgctctccatgccttgctcagcctgctttctgatagaacccagcaccaacagaggcaggcaccacccacaatggactgtgccctccaatcactaattaagaaaagctcctacagagccgggtgtggtttaatcccagcacttgggaggcagaggcaggaggatttctgagttcgaggctagcctggtctacaaagtgagttctatacagagaaaccctgtctcaaggaaaaaaaaaaaaaaaaaaaaaaaggaaagaaaagaaaagcaaagctcctacannnnnnnnnnnnnnnnnnnnagaaaagaaagctcctacaggcttgcctacagccccaatgtgttttgtttgttttgggtttttggagacagggtttgtgtgtgtagccctggaagtcccagaacttggtagaccaggctggcctggaactcacagagtgcctcctgcctctccctccctagttactgggattaaaggccggcaccaccactacctgatctacaaccagattttatggaagcattttcatcactgaggctccctcctttcaggtgactttagcttgtgtcacgctgacatgtccagcaccatctctgtcaccacataagttggtgtggtagcacttgagagctgcaagccagaggatctgcagttccgggcgattcttggctttatatgacgctccaggccagcctggaaaacacgagaggaagaatgggagagagaaatagggcagaagaaacccccaagagctttccacaactaggcactctctggaaacatttgtaactaattctcaaaagaaacccagctagagaaatactgtttctacagcagagaaggaagcaggttcagggaaccggtttcatctgggccagccaggctcaacaccatcctgttagcaaccaagctgggtttgaactgcggcccacccaactcagcgcctttagttctgggggccaacatgactaatgcattttctttctttctttttttttttttttttagatttatttatttatttattctatgtaagtacactgtagctgtcttcagacacaccagaagagggagtcagatctcgctaaggatggttgtgagccaccatgtggttgctgggatttgaactctggaccttcagaagagcaatcgggtgctcttacccactgagccatctcaccagcccgactaatgtattttctagaaagccacttgtaaataaggatttacttattgggtcctatacattgagtttaggaaaagatataaataaatagcgagcctgcaagatggctcagttggtaaagacacatactgccaagtggtagagcaagcttgatccccagcgtccacaaggtgaagggagagggctggtatatggtggcatgtgcacctgtccaattccccccacactcccacaaaaaaccagccccccaaaaccaaaccaccacctcctggcttgggaaatggtactttcataattaatacaattaaggctttccccactatttcttgctgccttctccatctaccctctccaaaattcgtcttcattttgcagttaaggatgcaagaggtccagatccttgaggctgtaaggtttcttttccctggtcagagatttcacccgtagcttggctcctcccacttagagacactgattggttcgccggagagctgtgtgctcggaaagaggaacctccttctccagcccagattgtgactgacagggaggggaggaggagccagagaggagcaagtttgaggaggatttgtttttctttggatcctacgagcgggaggcgtgtctagggcgtggtcctcgggtctggccctgcccctagggtcctactctgagctcagtaactcctagccggagtcttagcgggagtgttagactgagccggttcctgggcttcaggttgtgatcacgggatgactgcagtgggccgaaggtgctctgcgctagagccccgaaggtgagtgaccaaactggctctagagagggcaagcggacagcaggagtagaccagtggggagatgctggttgctggagcagctgacacacactgctatggggttttgtttgtttgtttgttttggtttttcgagacagggtttctctgtgtagccctggctgtcctggaactcactctgtagaccaggctggcctcgaactcagaaatccgcctgcctctgcctcccaagtgctaggattaaaggcgtgcgccaccactgcccagcttgggttttgttttttttaacatctgggatttttctttctttttacttattgaggcagggtctcatgtaacacaggctgtgctcaaactttttcccgtagtcctgactgtcctggaactcactagactgttcttgaacccaaagaaatctgtctgcctcccaggtgcagggattaaaggtgagggccatcgtccttagctggtactcaaactcttgatcgtcctgcatccacctgtagcgatgcttcgccttgacctgaccaagagaaacagtggaacttctgcctcccatctcctgaagcgtttgggagttctagggtgggtttagcaggccagatcaagccctgttctggtgcgctaggacccagtgtccccaccccaacctcaacctccagggggactttttgagtggggctctcgggctaactctgtcccgtgctgggcctctgggtctccaggagcccacatgagtctgagatgctctctgaggagccatccagttaggcagaaggctagctcagagcgccagtgagcaggatgggacccgccttcctgagtagatgtcagaatagcccgagctaaggagctggtgtccctcccccaccctgggaaggcagggtgcacctggagcaggaggaaggaaggggaagaggtgaggctgcagggatttcctggtgccctgtctctgctgagatcatgggggatgaggcaggaggggccgaccttcagctggccgagtggagcacagcagccctgcctgcatcctctgcccaagaaacacagccttttgggggggggggggagtgagacagcagggtccagagaactcccctcacccccaaatcagtgtgacacagggggaggccaggcctggagaaggaaggggaacccccataccctccctacccacacaagtgtcaagccaaggtccctttaagctgtcaagcacccatcaggtgcttgactctgttgctccattttcccagtggttaggctgaggctaaaggggaggtctctcctggggttagagggaggactctcctgagatgatagggaggactgtcctggggttatacattgagcatttgtgagaacccaagtttactctcaggcctgagtaactcttagctcaaatcttttgtttgtttgtttgtttgtttttgtttttcgagacagggtttctctgtgtagccctggctgtcctggagctcactctgtagaccaggctggcctcgaactcagaaatccacttgcctctgcctcccaagtgttgggattaaaggcatgcaccaccaccgcccggcttcttagctcaaatcttaaccaccaggccctcaaagaaaatttcaagactttctaccagtatttcaaatggctttccacagtggcctggtattggggcatacttcacacacaaaagggcacattgaagcagagttagtacttcattcattttattattttacacatttttcaacttgtacttatgattacattggtgtaggtcctgttagaatgtgtgtctatgtggaggccggaggacaactatgtggctctctgctgtgtgtgggatccagggaccatgttccaatcaatcaggcttgcaggacaagcacaagtcttcactccctgggataattcaccagcctatcattcattttaatgctcccggaggcaatacccaggcttcacagagagcagtgagcacagaaggttgaatctaatggagacctcctcccagaggcagagggtcagatggcaaagcggactgatgagttacaggggcaactaaagaagatcaagcaaatttacaatcaagcgctgagattggccttgggggaaagtgctagggaggcaaccttagaaaagttagaaaggagcaggaagtgctggtagcagcagccgccttcaatcccagcattccagaggcagaggcaggtggatctctgaatttgaggccactttggttgacaaagtgagttcaaggacagccaggacagaaatcccatctccaaagaactgaaaacaaaccaagccaaacaattagggaggaaaaataattggataatgaaagaagcaaacacattgctctccggggaagtgagccaagctgtgacagcgacctgcacgaagtcctgaaccgggagtgtcttcagccaattggctcatggtagagatcagaaagtctggagcagaggataggagaaggaagcagagagcgaatgggttcaggtcccactcagtcttgttcaggagagtctttctccttgcaggtatggtaaatttaaacctttttgttgttaatttttttgagtcaggggctcatagcccaggctggccttgggtgatcatgaccatctgaccctgctgtcaccacctctcaagggctgggattttgggtgtgcaccaccatacctggccttatggggtgctgtcgatggaacctaggacctcctgcgagctaggcaagcactctacccacaatgcatctcctgcccgtgcccagcctttggacattgtggcgtgaaattgtcatcagcaaagcaagtttacagttgtgtgttgggctttgttcacagctatcctcagcctcgtataagttggtcacatctgcagggggacgtgaacttagctctgtcctgctctgtaatgcccgccttgaatgtcccttgctatcctcccagacagctacttgggaagtacttcattcattttattattttacacatttttcaacttgtacttatgaactgggataaatgatatcctaaaacagaggcagggcaccctaaattgtcccagtcccagtgccaggcactgcaaacagaccaggacaccctctccccttccttatttccttttggaatgttgattctggttcaagaatttccaagtctccccagagtcccacgaccctttcggccctgaagagtgacgttagctgccgggcatctggtagtgattacccgattacccgtggagggggagtcactgggggctgggggcggctggtccatgtcttctgaaggggcccagctgctcctggctctcatttcctgtggagattttctcacagtctgagagaccccaagatgccttgggctgtgggaacctgactatcttaaagatgagctgcgccccacgctgaccttccactcacacgacatcacttgcagccctcgggggaccggtttgcaggttgctggacctgtgtggagtggggcccaagtaggactgggtcagacacccagtgaatgtgtgtcattgagtaagtccctttctgcctctgagccttaatttcccctgatggtgaagactagataggaggtcaggtagaaggtgtggacatgaaccagtgatgtctagtacatggcagttgctcatgctataggaggggaaactgaatcccagggaatgaatgagtctcactcaggatcccagcttgctctctctctctctctctctctctctctctccttctttctttctttttaaagaaacatttatttattttatgtatatgagtacactgtagctgtcttcagacacaccagaagaggtcactggattcccttacagatggttctgagccaccatgtcgttgctaggaattgaactcaggacctctggaagagcagtcagtgttcttaaccactgagccatctctccagcccccgggtcccagctttctacttcctgtttaggtgcctttcagaatccccaaggaacttccccaagtgctactcaccccatttcctgttcccagtcaggtctcttggctgtctgagtaaaatgctatctatctcctgtctcttccccagcttccttctgtttccacctgggattggctcctcttttccagggatgtcactccataggagggacacaacagacacagacctcagaccacttcagctgtagtctgcgctctgtgcctggggccgggcaccctgcttcagctgggctttccctgcttacagtgttgcactcacagtcagcggatgctctatcctccgcactctctaagggcctctctctagctctcagctctctctggcaggctcccagccacctttggtagctcaggctcagcatccttgactctgcccttcctcctaggccagtgcctttcctaatggctcctcacaccaggaggactggatcagggatgtggctgacccagtggtagcctgtactttgggccagggcaggtaataaatcctggcagagactctcagctcccgtggctgttgctgtctcagaggagaccctgctttccatcccagagttctctgcttaggccactgaagctgaaggcacgcagcagaaggtacccactgccagtctccacaatgggtgagaaagatggccctggggattgtgagttcaaggccagcctgagttacagagaatgagaccctgtctcaaaatctaaagccaagccaaccacatatgatgatagcaaacacctgttataatccaacatagtacttgggaagttggagcaggaaggtgaggagttcaaggccagctttgggtacacagcaagtttgagacaagcctagacgtttattttgaaaacataacaaaactgagcaaaacaaaaacagggtctgtgtaaggaaaggtctaataccccaggagagtggcaccaggatctggaacccactggggtgaggggacccggcactgacggtcacatgagcatcatggccttccaggcacacatgatgtcccctcagaagatgaggaagccaagcctcagagagagggaagcaggtgtcagagctgcgaatctcttctcgggccttatgaccagaccctaaggcccaaaggaagaagctcaggacagagggtaaggccacgcctggcagaggggtggggcagcctccttctccacttcttcaggatcctagtggaagttcactcttccttctggtccaggccagaggttcctgaaggtgaagttctgcttccaacccgcattagggaaataaaggataatgggtactaattactactcattaatgcaattaattaaactgatctatgcagctcatggtgtcagttatcagaacaaatcagttaatacaggcaattacagggtcggttatttaaataatgaatgctgcctccgaatgggcctgatttagcccagtcctcactgttgtctgttaactgatctcaccactaatattagaggggaagtgtcttttaagcatatagtgtaagaaataatgaattaattctcgaagctgagttgtaaggaacactttgatttctggatttgatcgttgcgatgaaagggagcatattctaaaaagatctccgaacaaattgacagctggaggctgagcaggacttaccccggcccgtggctgtcaggcagccacagcagcccagaccaaggggatgtaacgtcaggtgcaaaggcccagaggttgcagaccctggagttctttggaaatagtttttggaggccagagatggagtaagagtgaagagggagaggaggcatgtccagagatctgtgtagctcagtggtggagtgtttttctctctctctctctctctctctctctctctctctctctctctctctctcacacacacacacacacacacacaaacacagtgctgcagccaggaggatgtctcagttactacagcactcctttcatagctgtgggtacctgagttcccacagagcagccagatgtgtaatctctgtgttcctaatgtgaagtgggagacaggagagcctttggaagcttgctggccagctgccatggtgaatgcagtaggaagccaacacagagagcccaccccagtcaaggtggaaggcaaggattgacactaagcatggtgggagagtctctgatctccacatgaggacagtggagatcagcatgagggtatggaacatcagcgaaccccaggccccagcgcagtgccaggcagaagagactagaatatgcagcgtcatagtatacatggagtatacatggaggaccagccaacagccatcatgcagtctttctcttaggctgaacaatttgttcccagacaaggacctcagatttcccatctgcaaaatgggactgcatgggtctgcattcacaaacttgcacacacagacacatgtacacacagacacacacatgcacacacacagacatgcaaacagtgtacacacactcacacacacacacacatacaaccatacaacacaccagatgactgttagcttctcaacactgttgtaagctgatgtctgatgtccagagggaaaagaacaagcaaagcccagtggggcacagtggctcaagcctttaatcccatcatttggtaggcagaattctatagcctggcctatagagtgagttccaggacagccaagggctacacagatagtccctgtctcaaaaaacaaaaccaaccaaccaaacagcacagaggccctccggagttggtgctggggcgtgaagggggtacttaccatctggccttggccggagtagctccatgtagtgagtgtgtgtgggcgtggccataaggagcccatccccaggagtctgttagtaaccttgcctcccaggctggtgaagctgggcccctgctgccagacagggcaaagggaaactgaactccagcttttattttaacagagctactaggagttgatgagtgtgtctcagggccacaaatggaggaagggtggcctgtggtaatcttcaggccagtaatggccataggttatcagtggccatagtcatgttgtgtactggaatgactgagctatgactggcaaggtaggggaaggggttgaagttccttgggctgtggctctgccttggacaacctccctggctctgaccacccatgtaagctgggcagcaccccatctttagggctgtattcctgccccaaaacctaagaggaagtggacaggaaacaggaggaggcacagggctaatcccagtgtgtccctgacaatttgttcccagcactgggaggatttccgggcctgaatggccggaaatgttgggatgggacacctcacccgggaagagtggacagagcggacaggggaggggctccatcctccaccccctcccttacagtgtcactgggggaggggctccctcccccaccttcctcacagagtcactggccagggagcactgaagagactttagaagcctgtgctattgcagactgcagcttaaggggcagagggtagaggccaggaaggattttgtagcgggcaaagttaataatagaggactgcagaatgtcagaacaggagtagctacagggagctgggagccttggcctcaggaacttcttcttttccttcctttttttttcttctttcagctcatcttttgttttgaaaattaggcttctgtgtttgagcatacactccattcccattttgcagatgggaaatctgaggtccttgtctgggaacaagttgttcagcctaagagaaagactgcatgatggctgttggctggccctcttcttatccatgtatactatgacgctgcatattctagtctcttctgcctggcactgcgctggggcctggggttcgctgatgttccataccctcatgctggtctcttgttactttccagttgagaaataaaagcgatatggttgttgcaggtagggatcagagagacgagggggacagaagtaggtgggagacagagaataaggctgaagggctgttgtacgtggggtggccaggcaaggcttctctgaggaggtgactttaaactgagccctgaataaagtaggggagaaaaaagccttgtgaaagtctggggaaagactgttccaagtaagtgcaaaggccctgtggcaggaacaagcaggtgaggccaatgcaactggggcaggagggacagcatagttgaggtagacatcgtagagtgttggtgtggtaggcaggggggggagggtgccagcagcacacagagccatagaggtcagggagctaggtcccagttttctgtcatagtaacagcacccctttattctcaagtaggtgagaagtttggtttggatgataaattacattgctgtggaggggagtccagattttattatttagcagatggggtctgaggtcgtggatcggcatagagtacttgcttagagtatgcaaagcctgggctttcttccccagaactggaaaagagggaaagaattttagacaggcctgcagttgttataatttctgctactccagaggctgaggcaggaggattgcttgagtataagaatcagactggacagcagcatagtgagccttggtgggtagggaggggtagggagagcgctggggactgaggccacctgctgtacactgagtcgctgtctggtgtcagagctgaagctgacagtaagggggtagtggacatgggaaaccacaagaaagccatgcaagcgtcagtggcctggctgcagggacagactctgcctttcattctgaagggaggagtccctcctgggtagtgtgtggcctgttacatggatcaaagtctgctgagtggggtgtagtctgctggcctggctggtccagggtagaaagtgaacctgaagctttggctgtctcagcagggaggagggagctggtacccagctgtgaaggaagatagggaggaccaggagctgcttgtgcatagcaaactggggatgcttctcacatagaggacactggaggggatgggtgtgtgtgtgcagagagagagagagagagagagagagagagagagagagagagaaaggtgctgtggctaggagaaagaagtgactcacaaaggggaaggctctctgttcagcatcctggaaaaactgccacctctggcctctctaggcttcattcctaccaccctgaaggcagagagaataggtgtgtgctcgctgtaaccagcagtagccaatacactggcaatgtagaccaaagagtgaagggccagggaggggctgagcctcagactaggttctctagtgtatagactcaggccctctagtgtagactcaggccctctagtgtagactcaggccctctagtgtagactcaggccctctagtgtatagactcctaagtagggattatgtggaagaggcagaaagaggaaactgacatcaggaaaacgcgtgtcatgagctgggtgaacactcatcccgagtgctttcagacaactccattaggcagtggctgtctttgttcctcatttatggagaggaaactcgggatcagagaggggaaggaactcgttcagggctgcacagctgggagtggtggagtagccataggattaagcatcccgggctccaaggccaggaccaggcctcacatcagctggcaggtggacattcggcatctgagaagtgctgatggtactcacctcttttttcttcttccaggactgctgcagagctggaggccgctggggactatgtgaaggtaggctgggggttggtcacagtatgctagatatgatagagcgctcggggtctgctgtgaaccaggcttcctcctgggaggagaaggagaaggttgggggtgggggcagcccctggggacagctatcattctgggaagctattccccatgcctcctgcctctctgctagccccaaactcagctggacaggatcccaagggtgtccccctgcagtggccaccataatgagatcccagtcagcctgggtatctgagggctgaggctgggaggacacagcaggacacagcaggagtgactcagatctttagcagacactcagcacaactcacagacaagagctggatttggggactggggatgggatatggggcggtaggtgagcacttgcctagtatacagaaggccttgggggtcagtccccagctccacataaactgagtgtggtcctgcatgcctgtaaccccagtactcatggggcagcgggataaattcaaggtcatcttcgtctacatagtgagatttgaggccagcttatcttgtcctagaaatgtttaagatgtagtttgtgtgtgtgagtgcacgcttgcatgtgtgtctttgtgtgtctgtggaagtcataggtagatctcacggttgtttctgtccatggtgggtctcattgattggggttcactggcaggcccatgagctcccaggttctttttgtgttcacccccaaagccgaggtttcaaagtaaccatcacaggtggcatttttattttttttaacatggctgctggagcgtgcactcctatcttcaagcttgtatgccaacactttacagagtgagccagccacacagtacaggggttgttgttgttgttgttgttgttgcttgctcagcaacttgggtggttgaggcaggaagattgcaagtgccaggccaacttggaccacggttaagtccctgttttaacaagaaaacattggttttgaaataatagtaataacaataaggctaagtaacattttgaaagccaattgtttgcaaaaccatgctgctgtttatttatttgtctgtctgtctgtctgtctctctctagatgtgtatgttggagtcagagggcagcctgtggttctctgcttcccctgtgtgggatctgggggctgagctaggtcttcaggcttggcagcaggggccttgctcactcacccatctcctgaagcctctgtggcttctttagagaagctgaactcagatttagttttccactgcagattagaaacctatgaaaggggggctggtgagatggctcagcaggtaagagtacccgactgctcttccgaaggtcctgagttcaaatcccagcaaccacatggtggctcacaaccatctgtaacaagatctgactccctcttctggtgtgtctgaagacagcttcagtgtacttacatataataaataaaaaaataaaaaaaaaaagaaaaaaagaaacctaggaaagaaaaaaaaaaaaaaaagcctggtgtggtggcacacacctttaatcccagcacttgggaggcagaggcaggcggatttctgagttcgaggccagcctggtctacagagtgagttccaggacagccagggctacacagagaaaccctgtctcgaaaaaccagaaagaaagaaagaaagaaagaaagaaagaaagaaagaaagaaagaaagacagacagacagacagacagacaggaaggaaggaaggaaggaagaaagaaagaaagagaggggagagggagggagggagggaccacccacccacccaacaaacctatggcttcctcatagtcaaaagggatcttgtggggcagagctggtaccaagccccaaggcggaggctcagactcaggacaatgtccttggccttctccagtcagaagctccaccagagtcagccctagatgagcagcagctgctgcagagagcaggggagaggtgccagctcttcgtgtaaagggttctcaggccaggcagggaaccagagaattgcacagtttggacatattttataatccaacagaactaggatttatctatttatttacttgcttgcttgcttgcttacttattcagtcactaccctgcttggttcctgtggtgctcgtcttcctgcaggcgaggctagtgctctatgcacaaagccatatcccttgctctagattttagtttcaagtctgacagtgacttgggtggcttgcttctctgacacttagcatttgcttatgtgaaacaggggactttgggggctcagtgagactgtgccacgaggggatgcttgagtctgggccagggcagctggcctggccccagatttcagggatactgagtcactgagctgttatagcacgggaggggttatgtgagggagttgagctgaggtaggagatgaaccccacagatctgctctgtctggcaaggcagcgtgagccttctgaggatttgtggctctctcgtctttttatggagttaagatatagattttagggctgtggatatagctgggggtctaacctttgcccagcttgcatgaggccctgggtgccatctcattacagagggtaaaatactttaaacaattataagggggataacacctgctctctgtacccagaacccccagttcttaaaggagtcctagcttctgttcttaaagtctctgcctatgggggttgggatcagctatttccaaacgccattcctgccctgaaagtgttcttctttgaagagtgtccacaactccaaaatccaaacaatgtcagggatcctggactctcagggtttcaaaagaccaaagacagaaagtttcagtcacggtattcagagcttccagtatatctacatctggggaccagagatgtggactcacctgcttgatgtcgcataggctgtggggagagtttggataccagatttatctagatgatgatgatgacgatggcgacgacgacgacaatgatgatgaatctcatgtattcccagaatggccttgagtttaccatgtagccaaagatgatcttgaacttgtaatattcctggtttcaccatctggctgttgagattacaggtgtgaaccaccaggtctccgttatgaagtgcttgggatttacttgctgggcaagcagacattctatcagctaatgtggtccatccagattttgattctttctgtgttgccattggactccatgcctatccctcggtaggcaaacactctaagagccccaagtctaggttttgtgatgcctagttatgacacagtagagcatctttactggataattatctgtaccgggcaactttttttttttttaattgggcgtggtgacattcacaaagttcaacacaggtcttcaccgtgcattccagacatcttcacacaagccagtcggggtttaaagagaagggccccagggtgggaagccccgcgagttagagaggcaggtgagccgcacttggcactttaacagccttaggagtgtggtacagtcagagtgagcctgccagtctaaccctgctattctcaattagagatgagaaacccaaagccacaaaggattgggttaaacatggggatttttgtagctttagatcgaattgaattcaaagtccctgccggttccctccaggtctggagaggtgcgagagaggggaaaagcaggaggctctccgcgtccgccctgggggggcccctactccaccccactgccctgggtggcaacctcttggcaggtcctggggaacccgcacaggggaatggggtggtggtggagggaggaacaatggtcccctcccctccctctcctcgctcccctccctccccagctggctggagggtggggtctccccgccccgcctccctgctcctcccccgaccaggcgatgaggtaatcgcgccgctgagaggcacgcgcagccggtgcccagcccggtcggtccccgcgcccctgccccttcggccgtcacccctggtacgctcgggggacccgggtctcctggccgcaccatgaccgagcgttgcagcctgtggagtgcgctgtccgccgccgcctgctgcttctaccgtggctcgctggtacaggtgcaggtgagggggcggcatggggacccgggtcactgcgccccgccgctgagatggggacctcagtccaagagcatccccgcagggtcgtgcagtccggacagccagcgaagggagggggcggggtcgccatagctcacctcggggtgaccagggcgctccacgggatgcgggtgcagggtgccattccttggactctagactgcaggagacgtgatagggagttggagctggaactcgggctaggagatggggttccttctgtcacttatgaggtccctgctgctgaccccaggccacctggctccctattgtaccaggaacgcagggctggtgtctagaggctgaatgagaggcaggatgcgcagtgcacgctgaggacaccacggtgtcactaccttccttccatctgggtgggctcgaggtactgggttgtaggtctcccagtccagctggcccaggagcgcaggagcgcacagcggcggtgcgagggttaaacggaagggggtggaggggaggacccggaccccgcctctctgcagagcatcctctggggtggctgtgcctggggttgggatacctaagggagccaggggagtggtgggaaaccagctggtaggaaggggctgagaccctgacagaggttctctgcactcctgcctcttgggcatcctgggagatgcggggcacctcacctctgagctcccccaacctcacacacacacttgctccgagcccgcctgaatgacggccccgccggcggcggagcacagcatccctgcacgggccaatcaggcgtgcgcaagccgggaggcggtgagatcatctctgaccaatcgcagtgctctgagcgcaaggatgctgcattcgcaccccccctcccaactcttgggagctaaggaccctgaggcccagggtgaggaagaggtcacagggggtcctagggcttcctaccctagatgtgtggaggaccatcggtccttttaaccccagttctgacctaagctctgcttagggctggaaatgcggtgccagtttccagcatcctttacagatgaagctactcagacctagccaggagaagtgactggtccaaggtcacacaggctgtgtcctgtcttggggccacattctttagtatacagtctgtccctactttgcttcggaactgggaggggagtttcagtgtgtgcagggagtggtgtgtgtgcaaggctgggtacaggttccatttccacatgccgctcacccttctttcccagaattctgtgcaatttgaagggagaggccagggctggtgtgagcactgcagagggaaatgggagaggctaatgaccctaaaaaattagggaactgcaaaggcccaaaactcggcttggccaagaccactctgccctaccatggcattgatttttgctgtgttgtgggtggaggccttgcattatccaatcccggcccttgccttacccttgtgcacccagaccattccgactgtctgtctccagaactctgaaggcttctcaaagcccacgctatcacaggccttacacttcttctaggttgctaggctggtgcctcgggctgctctgccattgactgagggcctcagctgactccacactgcagtgttctgagacttctggttgatctcccagctctccaggcagtgtcgcagccctgccccacctgctacaccatccatagactcggatctgcccacagggccccaccctggcctcagctcttacctgcttatccatcctccacctcctgaccaggcaggggacactgcatctctgaagatgcctgggattgagtgtaggggtctgcatgggctctcctagggcagtgactatcctgatctctttgagttccaaccccagcttaggacccaacgtgaggctggcccatgttgaatgaatgaagttggagagtctagccatctctggagctagaattatggtggttgaaaacagtggagatgagggtggaacctgtgtggagtgtgcgtcttagatctggggaagtctgaggcgtgacttgccagactccaggagtactcaggagagactgttctctggctttacctgtctgttcacttctgaccagttccagaatgggagtcttggagtagccatctgtagggactggcaaagcctcccagggagaagcgtagctgtgaggtgaggcagatcctggagtcccacccattctactgggcagagagttaggcgagttcactcattttactgaggaaagagttaagtcccagactgctcacatggggtgggcttgcctctttgatgggggtgtgcctggcaatgggaacctcctctgacaataggatgcctgggattggtaacctctaagcctacgactgcccaccgtgggtagctgggagggcagatttctgggcattgactctagtgagtgacctttgacttcactgcagggctgcagtttccaatctggcaggatcactctagcttgcgtgtgtttggggggcaggagtgtagaggattacagtaggcattgaagatgcctgtgaggcccacgtccctgctgatggctgcctttgggcccttctgcagggttcatattcctgtcacctcgttggcccaggcactcggtgcctctcagactgacccgtagatggccttccttcacaatagccctactacctctagaaggtttcatacgatagtgtcatcctggaagtctctagaccctcacctctcacagacttaatgccctggcctagagcaggagatggcactttgccgctgtccagcaccctggtgctgatggcagctgctttgcctggcccctttggctatctcttagcctgtgggcttcccggaggacaggacttgacttaggcttcagtgcactcaccttgcctaggtacattctgatagaataagctggggttttactctagctgggatgaggacccacaggtgaggaccatccagcaggacaagtgttttagcattgttgacaatcccagggtgacatggggcagaatgagttggaggaagagagatggggccgtggaaacagatgccaatctcgctctccccgtgcagttctccaaggagaagtacattcttgactcctcgccagagaaactgcacaaggagctggaagaggaactgaagctcagcagcacggacctccgtagccatgcctggtaccacggacgcatccctcgtgaggtgagcaagccccaggcctattcattggcaaggctgaggttttagtcttaccatttactgtgtgaccttgagggaatcaccttgcctctccaggctccagcatcctcatctgaggaatggagagatagttcctcaaaaggcagtcatgttctgcatagagagacccaaagggagggactgttgtgaaggtgagatgagctaaggcagatagggtaggatgcctggtgccggtaaatgcaagcatgaggggtgttgttcgaactgtgtttcgttattcctggtttatagatcagcctcctgtggatttggctagagaatatccatttttgggctactcagttttggccaagtttgagtatctggcctgagataactttataagtcacagacctgaaccggtgggtcacctggccctttgccccagcacaggggctccaggatgtagagaagagatgaggtggcagcttccttagaggatgctaacccagaagggcacagagtatcaagcctttcacaaaggtgtaagtatagaggagtgctgcacagatgtgctgtaggcagagaaagcatctcgagggagcagacacccagagctgtggctggggcctgaatggctacaggagagtgcctggaacttactttgccttgtaggaaccctgagaggggctgggtctgagacctagatctctgatcacagtgatttcagcatttcctgcatccctgcatccaatcccaagtgccacctttggccattcctgggcctctgtgtccctgacccatggcctcagctgaggtgccaccttaggctccggtcctaagcattagatgtctgatgtctattaaccagatcctctacgctctagatgctgtcttggtgtcccaaattcaaagtcaccatgtcccctaaccctttcttctttagccaccacgcctaatttctccgttccttctgtaggtctctgagactctggtgcagcggaacggcgacttcctcatccgagactcactcaccagcctaggggactatgtgctcacgtgccgctggcacaatcaggccttgcacttcaagatcaacaaggtggtggtgaaggccggagagagctacacccacatccggtacctcttcgagcaggagagcttcgaccacgtgcctgccctcgtgcgctaccacgtgggcagccgtaaggccgtgtccgaacagagcggggctatcatctactgccctgtcaaccgcaccttcccactgcgctacctcgaggccagctatggcctgagccagggcagcagcaagactgccagcccagccagcccctcaggctccaagggcagccacatgaagaggcgaagcattaccatgactgatggactcaccactgacaaggtcacccgcagcgatggctgccccaacaggtcagccagatccccacttccctctggcttgttaatgaaaatgctggtatggaagggagtcccagcagagaggaggctcctcctctgagactctgtggggagacctgggaggttgagcttcagtgtggacacagggctgcactgggtgagggcagcagtgagagggggctgtcgacacaagagagtagggtccatggtctgatttacagaaaccataaggataagctgggctctggcctgtgcgtctcttcccatcattttcctagggataaatgagagacagagaggaccctgagcaacctcagcctagctgggtatccccaagttgtgtctctgtgtcttctgatcccggaagaagaaaatgctgggtagagatggagagggagagcaggttaattgagggagggaggtgactagaagataggcaagtggaagccgatagggttgtgccccctgagggtcagggtccactgggggagtgtctgggagtcagaacctgctgtgcgatcatccgaggtcaaggtcagctgtgggagaggactggaggagtcacatctatcccaccttagcccagctctgccttctccagcttttacattcatccattgagagacagaacctgaccagcatacctttttagcatccgaagtttagggggcagggagtgggatcgtacagtgaatcaagtcccctgatctctgacctctgggctcatggaatctctgtccacagcacctcattaccccatcctcgagactccatccgaaactgtgccctcagcatggaccagatcccagatctccactcacccctgtctcctatctccgagagccccagctctcctgcctatagcactggtaagctagcagggggtagtctgtaatgctgttgtcgttggtgggggacatcggttacctgactgtttctgcctctgggctgggagcagtgtccccacgaatgttctagaaaagcctgtggcagaatcgctggtgttgacacacaagcaacatccggtgaatagtgttcccatgggtgccaggcaatgggcacagaatgggttctcagtgagagtggcagggtaaagtctgctgggggtgcagcttgtcacggggccaggccttggggctgtgatgtgcacagtgtttgactccagcagacaaagttcccactacagctgccttaccaagggcgttggtaacaagagcatcattcctacctaggtcctgctttgagcttagaccaggctagctcaggctagctcaggctagtgtgctttgctgctctttttttttttttttaaactaacttttagagcagtttaagatttctgaaaaacttgaaatcatgggatcctgtgcttataaatacaaataaagtaaaaatatgtccccagtttatttctcaaaacaaagcaaaacaaacctcagactgttaagcaaaatgtcttgccccgcaaggcagtcagagcattgagaggggtggcttcctggaagtctcggcctggagggagcactccatgcctctggagtgttactatgtgcccccagaagtctttcctgtcgtcacatacacttgctttcaaaacagcatggtcatgtgaaaacatttatttacttatttgttttattattttagacggagactcagtatgtagccttggctggcctggagctcactatgtagaccagactcagagctctgcctgcctctatctcctaaggactggaattaaacatgcctaccaccacacccagcttatgggtttgtttttgttttttttttttttgttgttgttggtttttttttttggtttttaatgggacaatttccagtaatcacctaggagataacggcttctatcctagccctaccaggttgagtgacctcggcaagtctctaagccctgagcctccactttctcagctcaagactgaggaccataaaagtccttactgccatagaatgggacacttggggtattgtttgtttgtttttgagacaaggtctcactaagtagctctggctgcctggaacttgttatatagatcaggctagctcaaatctacagagacctggtcatccctgagcgctagggctgcaggtgtgcaccaccccactggctttgctgttttgcttctgagttcttttacatccctttacttatttgtgtgtggggtatggggggacacaaaggccaagtgacaacttccctgagttcacttggtgacagcttcaccaggcatcatacttcagcagagcttagcttccctggaccgcctatgtggcttctgatgttctagtctcttggggcagcggctccactgatacagggaagtgctgaggaccatagagtacctccctctacattttgggatgtgggacattactctatacacaggatgcagactattctttgagagaacagggaagggaggccccattaaaaaaaaaaaagatttgtttattatgtatacagtatcctgtctgcatgtctgccttcaggagagaagagggcaccagatctcattagagatggttgtgagccacgatgtgctcgctgggaatcgaactcaggacctcaggaagaacagccagtgttcttcactactgatgtatccctccagcctcggaggcccctttttttttttttttttttttttttttttttgagacagggtttctctgtgtagccttggctgtcctggaactcactctgtagatcaggctggcctcgaactcagagatccgcctgcctctgcctcccaagttctgggattaaaggcgtgggaccaccacgcccggcgggaggtcccatttttaagggtagaggagataactagttttctctttctcctctctgtagtaacccgagtccatgctccttctgccaccccctctacttcagcacagcctgcctccccagttgcccgccgctccagcgaacctcagctatgtcctggaaatactccaaagcctcctggggagtcagacagggcccctcacgcaagcccatcccacaccctctgcaaggcctcgccatcaccatcactcagcagctacagtgacccggactctggtcactactgtcagctccagcctccggtccgtggcagccgagagcaggccgcaggagagactccccggaaggctaggggctccggagagaggcaaaaggaactgttagaaaatggagtctctgacggggagtggggcaagaccttcacagtccctgtagtagaagccacctcctctttcaacctggctaccttccagtcccagctgatccccaaggagaaccggcctctggaggtggcccttctgcgcaaggtcaaggagctgctgtctgaggtggatgcccggacactggcccggcatgtcaccaaggttgactgcctggtaagtattaggaatgctcacagaggggacaatacctttatcatctggctttggggtcaggagtcaagcaagatggtgagggactgattcccaaatcccctaagtacagtgaagccagtagcttgggttttgacatcccgggtgtctttcttggttctgggactatggattgtcatctggcatgtcagtctccattttcttagtttagattgttttgctttgttttattagggtctcactatgtagccttggcagggctggaactatgtagacaaggctggccttgaactcacagagatctgcctgcctctgcctcccagttgctgggattaaaggattatgcccccccccacttgcagtcaccgccttctcctccgccccccttctccttttcatttcagtttttaatgtgcattggtgttttgccagtatgtgtgtcagtactggagttataggcattgtgagccatcatataagtgctgagaatcgaaccccagtctttttggaagagcagccagtgctcttaaccactgagccatctcaccagcccgattttcttctttggaaaagtaaaaaccaagacatttctacagctgcagatgtggaaggagggctgatgttttgggagtaacttaaagaacttcttggttctagtctgcagaaagtgaacatctggttgggggggggcggggaatctgcctgcccccttgccccctaaccccctagtggacaacaagcaaaatgttccttgacccaaaaactgtccagatgccagtgtgaggctttgactccgtacgaaccacagctctttccataccccagtttctcgctatgtagtttggtatatacgctggtctgagaaatcaggaagtgaaaagaatcatgtggggatgcagctgcgggagaagagggagaaactgaggtgcaggctcaagtgtacaaacttggacaagaaagttcattcccttcctgggccttgggttggcaatcggggataatgggatcttggctcttgattttaagtatttaacatggcacacacctatgggcttctttctactccccattttacagatggggaaactgaggctcactcagaaagggggaaatcacttgctccgtgtttgcagaggagctgggattcaaccacccaccccaccctctggacccctctgccaggcgaccctcttagatgaagctctgactcccagatgggttggactaaccctgacaggaaattaatcagccctttgggcgtctttgcaggttgctaggatactgggcgttaccaaggagatgcagaccctaatgggagtccgctggggcatggagctgctcaccctcccccatggccggcagctacgactagacctgctggaaaggtaaggtgcactgcaccagcccacggctaccttacgggctgtcccagggtttctgaccactcttcctatcccactagccaatcgcagcttcgtggtcctcggctcaaagccagtctgatttcccaaagactgctgttttatcgaccgctttagcctctcgcttccccacgtccatcaaccttggccccgcccaccattcctgtccacagtgttctttctaaaactctgccctttggattttgctgatcaattacaagtttctcctcctgccatccagattttgctcctaacttatattgtccaaccaggctcccttctctctgcctgttactttggctgcgccccttagtcgctgtgacctactctgttttctgtcatacttaacagcgtccctgttggccccgccgccgtatgtcacgccccctatgatccaacctctctcacaggttccacaccatgtccatcatgctggcagtggatatcctgggctgcacaggctcggcggaggagcgggcagctctgctgcacaagaccatacagctggcggccgagctgcgggggacgatgggcaacatgttcagcttcgccgctgtcatgggcgccctggagatggcccaggtactgtgggcacctctggacaaccactaggctgtctgcataaggcccgggggggggggggggggggcgttccctgggggaagacatttgcatggaaaatacaagagctcccggagtctctaggcttcctctgggaaggaccagaccaggaagcagaggtctcccaggtgttgcgctctgattcctgccctgggcctcagttgacccgcttgtaagaggaaccagaaaccctgaatttaaagaatatatagtgcttttggtgggacgggaatgcccttgagacggctcagcctttaagagagcgtccgattcatgccaaatgatgcagggttcattcccagccccccataccaagcagttcacaactgcctataacaccgactcccccttctagtctccacatgccctagcatgcacatgtacatatactaaggcacacacacataaaataagtaaatcttttaaaatatagaacatggttctttacattgacctcgggaaggggaggcaagggaattagaaattcaagacttaacaccgcgcctcaaaacaaagacgacatagaatgaccatcagttgatggacttgctgtatgctaggtaccagcactgactcttcacgggggaggggaggggggggaggctgctggatggtcctgtgtcacagagtggccaccagaggcagagcggtaacgggtgaggtcacacagtccagagctgagattcaagatttgtaaaatgtgttgcaacagcttcagttaacagttgacgctgtttccattttctgactgacagccatactcagctgtcattgtgtggtactcagggacagtgtaccctaaccccacagccttcagcagggtgacctgtggccagctgctcctggaggcgccgtctctagccagtctcttatagtctgctcttcccagatttcaaggctggagcagacatggatgaccctgcgacagcgacacacggagggtgccattctgtacgagaagaagctcaagcctttcctcaagagcctgaacgagggcaaaggtaggtgatgtctgcatctcaatgtgacatttacagaggtgtcggcctatgggttcccaaagacttctgaggtggcgaggataatagcgtgactgtcccatggggtagccaggtatgctctgtcatggacaggatagggttaccagggaaagaagggactgtttagggtgacctcggtggtcctcctgaggccccagacatctctggggttgtagtgggtggaagggtcttcaggtctaagagcctgccgcccctctccacagaaggcccaccgctgagcaacaccacgtttccacacgtacttcctttcattactctgctggaatgtgactctgcccccgccgagggtcctgaaccttggggcagcacagaacacggtgtggaggttgtgctagcccacctggaggccgcccgcactgtggcccaccacgggggcctctaccacaccaacgctgaggtcaagctgcaaggtgagtagctgtcatgtccccaggatcctgctgtccctggctcccctccatctgtctctacctatgcctctcggtccgcaagcatccactgacatcttctactcctctgtcttgactcctggctcctttattccatctgtcttgtcactcataggcagttgttagcgagggtatcaggtgaggtgggctgagagacactgaacacctttgccatgtgtttcaatcgcctgcacctcactgttctcatggaagtaagcagctgtctttccgtagctggttacaaggtgcccagccaaggtccagcatgaagaaagacctgcctggtcttcagggagcctctactggggaacatagaattctgggaaaggagtagaggaagtggcttcaaacgatgactcttttactgctttgggcattatttaaaccacacacacacacacacacacacacacacacaatctgggggactggggatgtggcttagtagggtgcttggctagtgtgccaagccctagacttcatccccaggactgtgtgcatggcataaactgggagcatgagcctcacagtcctggcactctgagaggcaaagagtaccagggttcactatcatccccagctgtgtaccgggttcaaggccaagcaggtctctctgacttcaagaccagcgtggtctacatagaaagttccaagccagccagggctacatagggagactgtctcaaaaaaaaaaagaaaagaaaaaaagatttagaaaattattcacttgcctagagatatatagtatgaatattatggtatatctcttttcattttttctcagagaattatatatactttataaatgtctttaagaaaaatgcaacttacagaaaaatacaagaaagctcttctgagatctcacctcagatttaccggagtgtgtgtgtgttacatcttaagggctgagatagcagagcaaagagtgtctgcctagatgcacaaagccctgtgttcccgtgccagcgccacatgcacaaacaccagttatcatctagtcctttaaaaatcatatgttgcaaatagatgaagaaagactaggtaccacctgcaaggtgctgttcttcgtacattgtgttgtgtccctgcggggctggggaggatccctgtgagcaggccctgaagcttgtgaagccctgattacctctttccaccccgcagggttccaagcccgaccggagctcctggaagtattcagcacagagttccagatgcggctcctctggggcagccagggtgccaacagcagccaggcctggcgctatgagaagtttgacaaagtcctcactgccttgtcccacaagctggaacctgccatccgctctagcgagctgtgaccccggagatctcgcctctctgcagctgcgggcagcatcggcggcagaggggctcaggacattccctccagagcaccacagggacactgtgatcagcccaagaatgttctgggttcaaatccaggatctcccttgcacttccagggtcctgaatggactctgagctccattcttccatcacacacgcgccaagtctcccttccaaatggacaggaacctctgctcctcccaccggcttgcgctggccccccttttgctgaggttccctgtttttgagccatgggaggctccccacccctcttccttcctgcaggcatctatgcctagaggtgccacagcctccatcttactgtaaataagtctggtgtaaatgtatgtacagaagccatgctctctttcatataataaactttaatgactctttcttctgtcccatgaggccttggtagaaagaagcaattccacaggtgaacggtccacaacaccaggaaatacctggttagcgccaaagacttcccagatgatatggggaaccaggtttacagcagcccctccctgaccgccatgagctcaggtattagcaggggagacggtcagtccagagcagtgtaagtaggggcctcagtcttctctgagcccagggcttgtcaggagaaaccatagttccccccccccccggccctcaccccatccacaagaagtccagagtttgaggtaaaagggcttttaaaaatctagagaccagaagagatggcttagtggccaagagcactgagtgatctttcagaggactctggctcaatcccagcactcacatggtggctcataatctagaactccagtgctaaggggtcttaagccctcttctgacctccttgggtaccgggcacacatgcggtgtgtgagcaaaatagccatacaaataaaataaaatttaaattaaaaaaaatctttaaactggatctagtgactcatcactttaattccatcactttggactcagaggcaggcaaatctttgaggccagtccaagctgtttagtgagcgccccccccttcaaaaaaaatctttaaatatgaaacctagaatcccaattccccttacacctggtgggtgaggtgactttttctgagctataatagcagaacaagcaagtttgctggtggtgatcacaggctaggcctgggcctcaggaatctgcttactgaattagagacacaggggttctttgctctgagctcttgatattagatcttcgaccacacctggaggtgggttgagttcaatggctcagtgactaggaaacttggataagaagcttaatgtcttgggttccaaattcaatagaaccaagacaataagggaccccctctccttggatttatattagtctttagcgtgtagtagtagctggtaagaaagagcaatactcatttacatatatatgcaaatttttttaagctctgagaaacttttattagggtttaaaagaaaaaccctggggcaggcaagctttaaatctcagatgctgcctggaggaggaggatggagaaagaaaaaaagccatgtcatttggattagttgacaaagaggctagcctcgcgatagtcagagagggctttagggagtgacacccaaagtgttagagaggtgtgcttagaaaaaagaaggggccgggcagtggtggtacacacctttaatcccagcactcagaggcaggcagatctctgagtttgaagccagcctgcctcagagctagtccaaggacagctggggctacacagggaaaccctgtcccgaaaagacagagacaaaggaagaaaagtaaaaagcacacttttggagttccttagacttgtgaagctgcatcactgccttttgatttacttatttatccattttgtgagtgtgtgtgtgaactcacgcacgtgtagagaggttcaaggacaatttgcaggattggttcttgatttccaccaggtaggctctggggattgtactccggtctttaggccggttggcaagtgtctttgcctacaaaaccagcttttttttgggggggggggtttgagacagggtttctctgtgtagccctggctgtcctggaactcactctgtagaccaggctggcctcgaactcagaaatctgcctgcctctgcctcccaagtgctgggattaaaggcatgcaccaccacgcccagctcacaaaaccatcttgaaggttctattttctgagccaaaaacactttatgtgaccacatctcattgagctgaccatccctgggtatagagtaggtactgttgcatcccatgtaaggcgcctgcctgacactggcagagacattctcaaaaggcggttgtgagcactcttccgtcacatttttaaaaagagcttggaaaaggctctcaggaaagtgtaaagtccggctcaagtttttgttattatgttgtttcactctcttaatcttttattctttctgaggtaaggtttcgggccgctagttacccgtgaccatggcaacgcgggactgggtggttcgcgggctcccccaggaggcctatttgcagtactgctgcgagacaacctgtgggttttagagccccaaggaaggggagccgggagttgtaggcaatgggcgtggctgcctcggagcggtgcacaccgggagctgtagttcacaggttctggcggtgggcggcctctgaccgaaatcgggcctcaaccggatggcggtggcgaggcacggctaccggccctggggctcgatcctcgggctgctcgggctggccttggctgccgccgccgcctgggacgtggcttctctgcgctgcaccttcggctcgttctgcgaatgcgacttctggcccgacttgccgggtgaggggtgggagccggtgcggacgggcgggcagccggcagttcgcaggggctcgaaacatctgccgccccgccggccgccggcggaggtggggatccgagagcctctggtgcaaacctgaggagagggtttggagggggcccggtggagggaagcctttgacagaggggcgcccagtggcttgtggtaggcctcccttgtgcggacttgtcacaccgggggagaaacctgccgtcgcctgaacctgtagacagctgtcgtctactcggggctggtgcaacccggagaaccgcctcgagggggcggtgccgcactggcccttgccgaggtgactgatcctgtccctcgtttggacacaagtatcccagaggtcttagacacatgccttcgaccctctgatgctttttgtttgtttgtttgtttgttttcccgacagaatctttctacactgatttgactgttctggacctcactatgtggaccaggctggtctcaaactcccagagatccacttagctctgcctccagagtgctaagagattaagggtttgcaccaccatattctggctctttttgttttttgtttttttaaagatttatttatttttttatttatatgagtacactgcgactgccttcagacacacactagaagagggcatcagatcccattacagatggttgtgagccacatgtggttgctgggaattgaactcaggacctttggcagtcagtgctctttccatctttccagcctcccccttttttttttaatatttatgctttgcctgcaagtatggttacatccatgtgcccatggaagtttgaagacggtgttggctcctctgggatggacttacagatagttgagagctaccatgtgagtggtaggaatcgaacttaagttctctgcaagagcagccagtgctgtttgtttgtttgtttgtttgtttgttttgagacagggtttctctgtgtagccctgcttggctggcctggaatttactatgtagaccaggctggcctcgaactcaaaagagatctccctgcctgtgcctcccaattgcctggattaaaggtgtgttggaattcaccataaacccaggctggcctttgattgggaggattactgctgcctctgcctcccaggggctgagctgacagacatgagtcaacagcctgtcatctgctttgatatgcgttccttctgtggccctaggtctggaatgtgacctggctcaacacctggctggccagcatttggccaaggccctggtggtgaagtcactgaaggcctttgtacaggacccagcccccagcaagccgttggtcctttccctgcacggctggacaggcaccgggaagtcctacgttagctccctgctggcacagcatctcttccgggatggccttcgcagccctcacgtccatcacttctcccctatcatccatttcccacatcccagccgcactgagcagtacaaggtaggccagatgtgtcctggtcccttttctccatcctaatccagagagggctccaaaacacacagccagttggaggctcagccttcagaacctgttaggaacaggggtggtggcagtcttgttgcctgtgagtccgagacatcatgagccttggggattaccccgggcagatattacacagggtacctgtgtctgtgttagcatcctctcttaagctcttagccccatatggtgctttggcaagcattccctggtgactgtcagctctgatatctgttgttcctgatctgtcttagctgtcaacactggggggcaggtctgacctcccctgtcagaagtcacttagctctcatgaacagacaattgagtacatatttgtacccctgttctcctgttgactggctgtgtgactttggacaagtctctgcacctctctgaactacccttttaccatctgtctcaaggggttggtgccatctggatatagattgtgtctcttcggaaatttttcttggcttgggaagaagttccgggttgcggggagtggagtgtcttggactcctttggaattcctgtctctaccctcatagaaggagctcaagagctgggttcaggggaacctcactgcctgtggccgatcccttttcctcttcgatgagatggacaagctgcctcctggcctgatggaagtcctgcagcccttcctgggcccttcttgggttgtgtatgggaccaactatcgcaaagccatcttcatctttatcaggtctggcctctattgcaagcaagtgggggtggaggggcacttgttagaggtctagctgtccagcgtgggcctgtgctcccagcagggtgctctcccaggagcgcatgcatgctctcttgactcctcactttttttttttttttttttccagacagggtttctctgtatagccctggctgtcctggaactcaactttgtagaccaggctgaaattcgcctgcctctgcctcccgggtgctgggattaaaggcgtgtgccaccacgcctggctctgactcctcactttatctctgatgactctcatttgcagtggctgacttctcctttgacattctcaaagcccttctgggctctgacttttagatccttgctgctgtgtagaatcccagcctggtcaacagtcatccctccttggtagttgagaggacacatgcctgagagaatgggactgtgtgtgtccctactctccgacctcagccccatttcccagctgtgagtccttaggcaggagcgttgagcctctctgagctctgccctctctctgcttctgaagctggagcgatggcaattcttccctgccctcctcaggaaagctagttagaggataccaaaggatcttgtagcctgagggtggtaacactttattcgcagtgctctgaaaggtgtgttggaggatggcttcagagttgaaggtagcctgggctgcagtagtgtcagccccaaccctagatggctctgtgaattgtaaagtgcatcccacatacatgttacagtgacgtggctgtcatggggagaaggaaatgggccactttgctgactctgagtcatgttacgtgtgaccctctagttcttccatgaatctcagcctggcttcttgtgattttagcaatgctggtggtgagcagatcaaccaggtggccttggaggcctggcgcagccacagggacagggaagaaatcagcctacaggaggtggagccagtaatctcccgagctgtgatggacaaccctcaacgtaagttggctcggggaccaatgtcggtagggccttcacacttaagtacacctgaatctgaagcactgtccactgcactgtagtcccatctctcccgccacattgtccactgcaccatagtcccattccccccccaccaccacattgtccactgcaccatagtcccattcccccccaccatattgtccactgcactgtagtcccatctctcctgccacattgtccactgcaccatagtcccatccccccccccaccacattgtccactgcaccatagtcccattcccccccaccatattgtccactgcactgtagtcccatctctcctgccacattgtccactgcaccatagtcccatcccccccaccaccacattgtccactgcaccatagtcccattcccccccaccatattgtccactgcactgtagtcccatctctcctgccacattgtccactgcaccatagtcccgccccccccactacattgtccactgcaccatagtcccgttcccccgccacattgtccactgcactgtagtctcatctctcccaccacattgtctactgcaccatagccccgtccccccaccaccgcattgtccactgcaccatagtcccgtcccccaccaccactacattgtccactgcaccatagtcctgtcccctcccccaccacattgtccactgcacagtagtcccatctctcccgccacattgtccactgcaccatagtcccgtccccccaccatcacattgtccactgcactgtagtcccatcaccctctgccacattgtccactgcaccacagtcccgtccctcgccacactgtccacaatgaagcctggattcccgactagaaatgctcaccatggcctctgtgcctccctgcagatggcttctggcggtctggcatcatggaggagcacctgctggacgctgtggtgcccttcctcccgctccagcggcatcacgtgcgccactgcgtactcaatgagctggctcagttgggcctggagcccagcgaggaggtggttcaggcggtgctggacagcaccacctacttccctgaggtagaacagctcttctcctccaatggctgcaagacagtggcctcccgactcacatttttcctctgagaagcccaggtggcatcgctgcctcctctgcctggtcagagcaaacacgaaaggcctgggtggctcctggaagaaatctttcctaagctggttggcaagtgggacccagagcacaatgttaagatgaagaaaggtgttggccaggccaaggaagaaaggtctagaagcatctttgctaagaaactcctgggtaccccgcaacctcacagccgtgccattgccctgcagtctgagcctgagccttctcaatgtgaacggcaactcagggacgaaggctcctggctgcttccagctggggactcttactggcatgccttgtctggctcctttcccagacctcagcccacagactgtggctggacccagcaatccagctaggccaggctagcacctcacaggttccccaaatggaaggactcaagctactacatgggcctgaatttcaaagtttttaattttgtacaagagaacagagattaaataaacttagccttggtattagaacattgaccaaagtttcttactgtcctgggaggaggcagcttggctgaaatctgttcattgctcaggaagggcttcattggccctttgagggagtagttaatcgtcagaggtgagcttctctctgtctcctgggatctgttggacttcctgagttaaaaggttagtcagttccaagaagctttcactactgctgagatctgttgacgagatctcactgaagcttaagctatcagcagccttgctgggccatggagtctggcccggggtatcattggcactctcaccaatgtcactatgggtcgtgctgtgggtcaggctgggagtctttgttactttctggctgctgcgctgggccttgagtttccagccctgggcgcgaacagccttagctcttctgattctctcctttacgctcagggtagacctggacttgctaggccttgggccctcaggggcttctgtcgtgctggtgctctggctaggatccttgggatcctctgtcttcttgggctttgggacttgggtggcctttttggagtccctttggccataggcaggtgtgacctcagtggcgttctggattaggttctctgtgactgcctggacgaccttggggctccaggtcagttcctggctcttcctgggtactgagagctgaggctttagcagtgtggactcagaggattctatagccgtgtgggaagagctcttatactcctgactggttgacatctctggccccgacgtgctgatgctcacaactggaaaagtgtgtcaggagcagtcactgacctctctaggcggctccgggaagacagaacttctggacagcctccaggccacaaccctgaggcctactaactcccaccaggcccaccttctcaatatgtctgggctgtggggtgacaagacgctgctcaaacagtactgagtcagcctgccctctctctgggctctcccacaggcctctgaactctgtatatgcagctgattccagcacttccttcagctcatgcagcccaccctgatccctctaaaggtctaatcacactctgccctctaagccccactcccatttgcccagctggctgctctcccctccatctaccccaccccccagctgacttagcattcacttcctggggccaggactgagtcagtcactcatcaccagtggttggtacaggcctaccttggggaggttaggggatgataaccaaatgaaaggaaggggactaattctggccccctccaccaagaagcactgggaacagccttttctgtcgatgtcacccccacaccaggggacgctagagagcagccttcttgctttactcttttatcccttcttggctggtgatagcaaaagtgggagtcaaaacctgttggatatgtatgaggtatgtggctttgttcagggacatactgaggagaagagagaaagaacgggccttggaaggagaggcagaaatagtaacaaccaggaagggcctgaaggtgatggtgggactgtgaaaagcagcctgttttctggtcgagctggattcaaaccctggagacccagcagattaatctgcaagggacagaaggcctcttctccatgctcccagacataggctcctgacatgaggacccagctccatcattctgtggccatcagtcacgtaggctgtccagactcctccccacagttacctaacaatagccaggtgtgctcctccccacagttacccagccccaacagcaaggtagcccagcctactataaaaggggctgcttggcccctcctctctctcttgcttctcttgctttcgctctagccctcttgctccctccctcccttccccttctcccctctctccacagcctcttctctctctctctctctctcttctcctcctctctctctttctctcctttctctttgtctctctctgtctttttctctctctgtctctctctctctctgcttttctacaataaagctctaaaaccatggactgtctgttcattgagacctgccatgttggagcaataggccttcccctaaagagccgcatttaatctcccgtgggaaggcctcccaacgttaccagccaccagaccggaccaaagactctcacccgagtgggaaccacccaatgtcttctccccctgccctttctctgttcaaccctggggctgactgagccgcctccagggcccccacttctttctcagctcttctgcggtgtccagcgacatcctatgatgcccaagggctagaatctgttgtccctggactatgtgagacccagggaccccagaccgctccctctccaccctcgaggactgaggttccgtggcttcccacagccagacgcccacctggcggcgttgagagcacaaggcagtccccagcatctgcccgaccagtctctccgagctctggcaggactccggtcatctctcccgccccttctacttccccatacctggtgcccaacaggtgactggtctctgccctgtgctggccaccatcccactaggtccccaccacatcccttggg

SEQ ID NO: 370 - DNA, 2946 bp, Mus musculus
cagccacatgctagcaaaccagagactctgcacagcttgcaaagatgacagagatgcccaagaaaacaggcagaaagttcaagttcttcaagttcaagggccttgggagcctttccaatctcccgcggtccttttctctgagacggtcttcagcctctgctagtatccggtcttgtccggagcctgacacctttgaagccacacaggatgacatggtgacactcccaaagagtcctcctgcctatgcacgttctagtgacatgtacagccacatgggtaccatgccccgccctaacatcaagaaggctcagaaacaacaggctgtccagaaggcccaggaggtcagccgagagtcgcacctggtttctcgaaggctgccagagccaccagacttagaggcagccaaggaggcaggggagggaactgaagccctactggaggacacggcaccttcagcagtagaagtggaccctatgagggaactggaggatctcacagtagacacagagaaggagcaagtccctggggatgtgagcccagaaaggactgctgcagagctggaggccgctggggactatgtgaagttctccaaggagaagtacattcttgactcctcgccagagaaactgcacaaggagctggaagaggaactgaagctcagcagcacggacctccgtagccatgcctggtaccacggacgcatccctcgtgaggtctctgagactctggtgcagcggaacggcgacttcctcatccgagactcactcaccagcctaggggactatgtgctcacgtgccgctggcacaatcaggccttgcacttcaagatcaacaaggtggtggtgaaggccggagagagctacacccacatccggtacctcttcgagcaggagagcttcgaccacgtgcctgccctcgtgcgctaccacgtgggcagccgtaaggccgtgtccgaacagagcggggctatcatctactgccctgtcaaccgcaccttcccactgcgctacctcgaggccagctatggcctgagccagggcagcagcaagactgccagcccagccagcccctcaggctccaagggcagccacatgaagaggcgaagcattaccatgactgatggactcaccactgacaaggtcacccgcagcgatggctgccccaacagcacctcattaccccatcctcgagactccatccgaaactgtgccctcagcatggaccagatcccagatctccactcacccctgtctcctatctccgagagccccagctctcctgcctatagcactgtaacccgagtccatgctccttctgccaccccctctacttcagcacagcctgcctccccagttgcccgccgctccagcgaacctcagctatgtcctggaaatactccaaagcctcctggggagtcagacagggcccctcacgcaagcccatcccacaccctctgcaaggcctcgccatcaccatcactcagcagctacagtgacccggactctggtcactactgtcagctccagcctccggtccgtggcagccgagagcaggccgcaggagagactccccggaaggctaggggctccggagagaggcaaaaggaactgttagaaaatggagtctctgacggggagtggggcaagaccttcacagtccctgtagtagaagccacctcctctttcaacctggctaccttccagtcccagctgatccccaaggagaaccggcctctggaggtggcccttctgcgcaaggtcaaggagctgctgtctgaggtggatgcccggacactggcccggcatgtcaccaaggttgactgcctggttgctaggatactgggcgttaccaaggagatgcagaccctaatgggagtccgctggggcatggagctgctcaccctcccccatggccggcagctacgactagacctgctggaaaggttccacaccatgtccatcatgctggcagtggatatcctgggctgcacaggctcggcggaggagcgggcagctctgctgcacaagaccatacagctggcggccgagctgcgggggacgatgggcaacatgttcagcttcgccgctgtcatgggcgccctggagatggcccagatttcaaggctggagcagacatggatgaccctgcgacagcgacacacggagggtgccattctgtacgagaagaagctcaagcctttcctcaagagcctgaacgagggcaaagaaggcccaccgctgagcaacaccacgtttccacacgtacttcctttcattactctgctggaatgtgactctgcccccgccgagggtcctgaaccttggggcagcacagaacacggtgtggaggttgtgctagcccacctggaggccgcccgcactgtggcccaccacgggggcctctaccacaccaacgctgaggtcaagctgcaagggttccaagcccgaccggagctcctggaagtattcagcacagagttccagatgcggctcctctggggcagccagggtgccaacagcagccaggcctggcgctatgagaagtttgacaaagtcctcactgccttgtcccacaagctggaacctgccatccgctctagcgagctgtgaccccggagatctcgcctctctgcagctgcgggcagcatcggcggcagaggggctcaggacattccctccagagcaccacagggacactgtgatcagcccaagaatgttctgggttcaaatccaggatctcccttgcacttccagggtcctgaatggactctgagctccattcttccatcacacacgcgccaagtctcccttccaaatggacaggaacctctgctcctcccaccggcttgcgctggccccccttttgctgaggttccctgtttttgagccatgggaggctccccacccctcttccttcctgcaggcatctatgcctagaggtgccaca

SEQ ID NO: 371 - protein, 848 aa, Mus musculus
QTRDSAQLAKMTEMPKKTGRKFKFFKFKGLGSLSNLPRSFSLRRSSASASIRSCPEPDTFEATQDDMVTLPKSPPAYARSSDMYSHMGTMPRPNIKKAQKQQAVQKAQEVSRESHLVSRRLPEPPDLEAAKEAGEGTEALLEDTAPSAVEVDPMRELEDLTVDTEKEQVPGDVSPERTAAELEAAGDYVKFSKEKYILDSSPEKLHKELEEELKLSSTDLRSHAWYHGRIPREVSETLVQRNGDFLIRDSLTSLGDYVLTCRWHNQALHFKINKVVVKAGESYTHIRYLFEQESFDHVPALVRYHVGSRKAVSEQSGAIIYCPVNRTFPLRYLEASYGLSQGSSKTDDSGSKGSHMKRRSITMTDGLTTDKVTRSDGCPNSTSLPHPRDSIRNCALSMDQIPDLHSPLSPISESPSSPAYSTVTRVHAPSATPSTSAQPDVARRSSEPQLCPGNTPKPPGESDRAPHDSHTLCKDSPSLSSYSDPDSGHYCQLQPPVRGSREQAAGETPRKRSGERQKELLENGVSDGEWGKTFTVPVVEATSSFNLATFQSQLIPKENRPLEVLRKVKELLSEVDARTLARHVTKVDCLVARILGVTKEMQTLMGVRWGMELLTLPHGRQLRLDLLERFHTMSIMLAVDILGCTGSAEERAALLHKTIQLAAELRGTMGNMFSFAAVMGALEMAQISRLEQTWMTLRQRHTEGAILYEKKLKPFLKSLNEGKEGPPLSNTTFPHVLPFITLLECDSAPAEGPEPWGSTEHGVEVVLAHLEAARTVAHHGGHTNAEVKLQGFQARPELLEVFSTEFQMRLLWGSQGANSSQAWRYEKFDKVLTALSHKLEPAIRSSEL

SEQ ID NO: 372 - DNA, 60367 bp, Homo sapiens
  misc_feature (1)...(60367): n = A,T,C or G
gctccgtgttggcctgcatgatggggctgcgggtccacatctctgccatgatgcacccagcaccccacaggtcaatgggggggccgtagtcccgctcccctgggaagaagagcgcaccaggagggccccttgagcccgagggcctcctgaggctcaatgccccagggccggcagctcaagaagccctggcagttggggggaaggggccaggtagatgcctggccctcaccccccttggcccgctcgggagtcctcaccgagcaacagctccgggggccggtaccagagtgtcaccacacggttggtgtagcggttgggctggctgttcttggccaggctgaaggcccgggccagcccaaagtctgccagcttcaggaccccatcacgagtgataagcacattagcagccttcatgtccctatgcaggatctgcaggaagggcaagagtgggtcctttagtgacatccacccgggagtgggagccaagaccagcccaagcctgggtcctcctcccagctctggcccccaccttgtttctgtggatgtagtagaggccgttaagcagcatctgcatcaccctcttgatctcagacagcgtgaacttgaccaaaacattgctcaacagcccagcaaggtcatgctcgcagaagtcgaacaccaggtatatactacccttgcagcggttatagggggaagctgaggcaggaatagaaagaagaaaaagtcaagaaaaccacacccaacacactttcccacaaccagcttctttcttcctgctccaacccacgggcacccatgccctccagagcatctgtctgttccttccttcaccggtcaaatattttctgagtgcctcttctgggccagggcaggccccaaggaagcaccagctacgatgaaagaggaccagaaaaagcagtcaccatgggtccatctgagttaagaagaggcagtttaggtgtgcctagttccaagtttacaaacaaaaccttaggctacaagtgtcatcttctcgtaagaaccaaataacttacctttggttcgacaaatctcaatcaagttgaccacattctcgtgttttagaagctgaaggatcttgatctcccgcaaggctgtaatggggaactgggtgagaaagaggggaaagtggtcaagagtgagcgcagtacagagcccagccctggggtctgtactgacagccaagttgggagacagagcaagatcatgggctctgaaaccagctgtctcagaagccttgtctataaaatggatattagtagcatgcacacttcaagatgatggtttgagacaacaaactgaaacagcaatactttgctattagccactaaatgctcggcggtttcagtcttcaaatttcagctctatggctgtttcgttggcaacaaacatgatgatttaaaaatgtccttgctaatgcacattacgcaaaagaaggtttatgggaagttgtactagagctaagatggggtggagaagggaccgctccttttaaatacattaaataattgagtatcagacacctttcaaaaagcatgcatatataatctttcttttacattaagcgaaatttaacactaaaaaaaggtgtttaaaggcttcctaacttcgtgaaataaagtgcacacgatgcatgcatcaactccccctcctggcctcacccataactgcctaagaatgaaacatttagttttagggtggaagccacattccctggaaatttctgaactactacaaaaaaattaaatctcaacctgagactcccagaagcagcagggtggaaaaccgacccggggtcccgggcagttagccggccggcccgcacgcccgatccgtactcaccccctccttctcgttttccatcagcaccttcttcagagccaccttctggccggtcttgcggtgcctggccttgaacacctccctgcaggcggaaagggagacccgagaactcatcaggccatttccgcagggcccgcccctcccccactacaggaggaggggcagcagcaaagagattcccgggcggggctgggctaggtacccagggcacgcggctaccccgccacccggcagcctgtctcgttcggagcctctgcttccttccctcagtcccttctcctcacttgggcgtcccttggagagatcccgctcccctcacgggcgcctctctgcagcccctccccgcccccaccacgggcctcaggctcctccccaccagccggctccgtcaggccggggcggggtgcggcgcggcctagagaccagcaggcaagcccggggacagacgacttctctaccaactcgggggggggcccgggcatcccgacgtcggccctaggggtgcaggcccagggctcccggccccgaggggcccagccttacccgaaggtgccttggccgatcttggcgagcttctcgtatttggaaacttcatcacaaaaagggcactccaccgagtcgtactgctttgccatggccgcctccaacgcgccgccgccgcccccagtcgctgctgccgccgctcctgctccgggtcccgccgccgccgcactccaggcccctccgcggccgcgccacttccgcctccacggccacttccggcctcgcggcgccgaccccgcctcttccgcccgccgcccaccgccaggccccctgggacttgtagttcccgagaggccagggggagccggagctgcagaggcgcctccgccgccgccgccgctgcccccgcctccgccgccgccactactagcggcggccccgatcgggggcgcggggagccggggcgccggagctggggctcggggtggcgcgtcccgctgcatgggcccgggccgccgctgctgccgaagctgctgccgctctggcgcccgatccggggccagccgcagtgccctgctcctcctcctccgacggcgccgcctccgccgggctgcgcggggcggcgggcggggggtcagcccccgagccgcggcctgggagctccctggccggacccgggcccggggcggccgggcgagggggcgagacgggaagagccgactaggagacggcccgagagcccaagagggggcgcgttataaagggggaggtgcccggcctcgccctcccctcctcctccgcccgcccccgccctcctccctcccaccctccgcggccgcacctgccgccgccgccaccgcccgcccgctcgctgtccgccggccgccctcggcgcgtcaccgcccgcggcccctcctccgccttcggaggtggggccccgcgctcggcacctggctgcgggcgccctgccgcgtgcctcagtttacccccacatgtcggctgcagcggaaagccccttcctccccggctcggagtgcccccacagaggcgaaggcgggaggcgcggagggagcgtcctccggccctgggaggagagaacggcccccgcctccgcctcccccggtccccgccaccctccgttgacatggcaaccgacggccgccagggggcgcggcggcactagcggcgacgagcaagcaacgcccgggccttctatcgctggggtctggctctccgggaggcagggatgggacccgcaggactcccacctccgctgagtcgtgccagagctggtcgggccccgagtcagtaatcgcaaaaaacagctaccattttctcagcactcttgtgtactcaggaagtgctgggcgttcccgccgaatcctgaatcaacagccccatagtcaggatcactaacccattttgcagaagaagacgttgaggctcagaggtgaggtcatttgcccaaggtcacacggcgacaaagttgggacccgaacctgggtgtctgagtgaggggattctcttgactcacgctattcgctgttgggccaggaggatagcagtggggaggcctgctgtccttatgcaggcgcgagctcaccgttcaccccccccatctccctcccccatcgcgcccatcccttccctcgcatcttcctggctccagcggcccccagattccccctccagctctgcccaaggacagcctccagcaaagccgtcttttctgcctcctctgccccgcttcaatctgccccctcctctccagccctctgcgggtggatcctgagacctagccccccagtctggcctctctgtccccgaagaacctgaatgtgacattggaggctctttccagttcacaccccacccctcaagctgtggccatgcaaatctctctactgtctccccaagcctttctgcgttcagggcggtgctcccctgatcctacactcccccagactctcgttaccctctcttcctgcaagaagccattggagtgggcgcggtggctcacgcctgtaatcccagcactttgggagaccaaggcaggcggatcacaaggtcaggagttggagccagcctggccaatatgttgaaaccccgtctctactaaaaagacaaaaattagccaggcgtggtattgggcgcctgtagtcccagctacttgggaggctgaggcaggagaattgcttgaacccaggaggtggaggttgcagtgagccgaggtcttgccactgcactccagcctggtgacagagagagattccgtctcaaaaaaaagccctcggggtggctcccagctctcaccccacactgcttagcctcaaagcctcctaggaggaggcaggaatggctttggtgaccttgatgtcacaagaggtcttgttctggggaagggcactaccagggaggggctggaaggtcaggctgaggaggaaggagccctctcctgagagtaacgtgaagcaagagaggggtttaggcagttagtgacgtagggtcggcttcatggcttacactattagaagcaggaggctgttccctaaattggaggtggggaggataaggagtgagaccataaaaattttagtaatgacaacttattgacggaaaataaatggtccaagccctacacttggcactttatgggaattatctcggttgccactcaaccacatgggtactgttgtcacctccattgtacacatcaggatcccgaggtgacatcacttggcctgggtcaaacagctggtcagtgaccatactggtatttgaaccaggtcagtctggcacaaaccccagcacttccccatctcggggccctgcccatctggcctaggggtggagccacggcattgctggggtctgagcagtagtgcggtgggcggggatctgcggtgggcttgtgtggcctccattatccgactacatctcaagccagggcctgccgtttcccatgagccctccctaagtcacatcctgtgggcaaaggccctagcagaagttccggtggagttgtcacctacaccccgccatccctcgtctgaaccccagcatccgcccgccacttccccttggggcctcagggcctcagtccccactgtgggatgcaggcaggcaagagaggcaggaaaggccggaagcctgtcagaaagctacccaggctgcccaggtccggggccccagatcaccaagctggcaaaacccaggcagaaataagaagaaatgagtgatttctcattgactggaaacgtttcctgcttcccaggggtcggctaagctggcaaggctgggcatgtggccagtccttggtagatgtctgccccaagagagccgctggtcctgctgccatttaacagagaaggtgagggcagcacaggaaagggaggcgctggacagctgtctgaccccagcctggaccccctgttttcctctgagcagagacagacgggaagcataggagggaaggagaagatgggttcatggaatgggctgctcttggcttttggtgcatctgaagagacagtgggtcaactggatagcaggggtacaggacggagaacagcctgtgatacccacaaccctctaaaatcacaaaagttgcctgtttgcagtggctcatacctgtaatccccacttttggaggaggaggcaggtgaatcacctgaggtcaggagttcgagaccagtctggccaacatggcgaaaccccgtctctactaaaagtaggaaaattagctgggtgtgatggcgtgcatctgtaatcccagctacttgggaggctgagtcaggagaatcactggaacctgggaggtggaggttgcagtgagccaggattgtgccactgcactccagtctgggcaagaatgagactccatctcaataataataataatagtaatagtaataataataataattggccgggtgcggtgactcatgcctgtaatccctgcactttgggaggctgaggcaggtggatcacctgaggtcaggagttcgagaccaacctggccaacatgatgaaaccccgtctctaataaaaatacagaaaattaaccagacgtggtggcgcctgtaatcccagctactcaggaggcctgaggcagaagactcacttgagtccgggagtgattgcagagtctgagcaggttgcggtgagctgagatctggagactgcacccagcctgggcaacaagagcgaaactctgtctccaatcaatcaattaatcacagaagttctgcccacactagccaggaactgactcagtgcctggcctggggttgacttgcattgtctccctgaaactctccagcagccctattaggaggttgttattattagacccaagttacgaaaggggaaattgaggcccagattggtgtggcctgccccaggctacacagccaggaagctatgaagctgggatttaaagccaggtttctttactctcaaagcccagggtcatttgccatcatcccacactgtccccaatgtcaggtcaactgagggagaagcatctgttgagcacccatgatccagtcctcatatggaagggggctagtgtggatgggtaaggccccggcctctctcagaaggcttcaggtctgttcggaacatgcaaataaagacacaaggggattaaatcaaaatgatactcttggtataaatattttattttgctgccatgagatcatgtaagggatgttatatttatcctattttactgatggggaaaaaaaaaagaggctcagagaggtgacatgacttgcccaaggtcatggaggtggggattgaacccaggattgcgtgggcctgatgcctttgacgatgaagtttaaggtctccaactctgccctgtctgtgagcctgtcttctccctcctctccataggccccccaacactatccctgcttgagtcacagactgaggaagaggggcaaggataggggacagaagtgagagcagggggctgggcgtggtggcttacgcctgtaatcccagcactttgggaggctgaggctggaggatcacctgaggtcaggagttcgagaccagcctgagcaacatagtgaaaccccgtctctactaaaaaataaataaataaattagccgggcgtggtggggcacgcctgtaatctcagctagtcaggaggctgaggcaggagaattgcttaaactcaggaggcggaggttgcagtactaagattgcgccactgaactctaccctgggtgacaagttttgttttttttttttaagtctctgtcgtaagtttttttaagactctgtctcaaaaaaaaaaaaaaagaaaagaaataacaagggctgaaaaaaatcaattaaacaatacaaggggtttttattccccaaaggggggcggaaacagaaaaaattttttccagggattctggggcactgtagcctcaagccaacctgtagggatccaaaggaggtaaaagcctgaggcggggagggcagagctgcattcccagtggtgtgaggccagcctgagcgaaggcctggaggcaggaaagcactcgggggtgttcaggacaggggaccatgggctgggctgacctgccctccagtgcaagctgaagagctcctgcaggacagccacccaccggcaggtcctcggtcgcactcctaacggccactccaggcagcacaaagggggctctgagctcagcggagccaccacactgagccctattcattctcctaggggtgccagaaactgccctggcgcccgggccaagagcagacaggccccagcactgacgaggcgcctctgccgcagcaacacagcatctctgtggctgagattcccaggtcttgtgccttgtgcctgcctgtccctgtcaggattccctgtcctgtgccaatctgccccttatctgtgtccatctctcagcaaccacagccagggctcgcggaggcccacggtgtgctggcttggaccagtgtttgcttctctcaccctcccaacaaccccatggagggggagctgctgtggctctatttaacagatgaggaaactgtggcccagagaggcaaagtgtcttgtgcgagatcacacagcaagtcgggagcaggcctggccaggaagcagcatagccttggcagctaacccaagtcacactgcaaccccatcctgggacagaagccgcggacctactttctatcttccgctaggggacaccagccagggagttaggacacttggttgtcagtctgtccagtgtctgcctctgcttttttttttttttttttgagatagggtctccctctttcgccaggctggagtgcagtggcgcgatctcggctcactgcaacctccgcctccctggttcaattctcctgcctcagcctcccgagtagctgggaatgcagttgcacaccaccacacccggctaattttttaaaatgtatttttagtagagacgaggtttcactatgttggccaggctgtgctcaaacccctgacctcaggtgatccacccacctcggcctcccaagatgctgggattacaggtgtgagccaccgcgcccaccctggggctgttactgttaatggaggatgcaggaagtgccctatcagatggcagtggactcctctcacagcctgggttgccagcctggggtccaggataaaatgttgaacccccactggttggcaggttggctgcatacctcccacttctccccattctagaaatcaggtgactgaggcttgggaggtggaagtagctgggattggcagccctgggtcttgggccccgcccccagccccagcagctgctgacaccctttgcagatgtccaggatgacccgtggaggggaggttgcatttcctcatctcggtctgcccacctgagcatgcacacatggcaagtttgtagggtggaaaggcaccagcccgtgggttaaggggcctagaagggagagttgtggcccagtctgggccagcaaccagctgtgttacctggggaaatccctctgcctctctgtgcctcggtttcatcatctctgtccagtgagtacagtggaacacatgatgacatctccctgatagcttggaaagtggtgactgtgctttggtaggcaccgattctgtgccaggccctacacccatggctgaacccgatgaagtgggcactgcgagtacccccggttcacagggaggacgtcacaccgtggcgaaatggccagccaagagtggaacttgggtctggggggcccagagtccacaggcctgaccacagcactctcccatctgcagctgccagtccctctcctgggtacagaggctgagaagcaactgccctgcacacaggcctgactcccctcaccttcccagcctgatggccaggccccctgacagctgttggcaggtccccagcggcccccagcccactgggctccgttcccagagcctgcggcctgctccttagaccttccaggtcccaggggcttgcggtctggcccctgcccctgctgctgaggccaaggaggcggcccacaggggctggggctaggagaggccccagcccccgccccctgcggagagggtggggagggtggagctgtgggagtttcactggtttaaaaatacacagaggaagcgagtaagagaaaggggaaggggaggtgggagaggcacctcaactttgatgtcccgagccttgagtggccactcgcaagctggccaagggcttcacacaatttgccaagatgacagaggggaccaagaagaccagcaaaaagttcagtgagtgtggggtgccgtctgcactgtcctccatccctggctctcctctgggcctctctctgcatctgtttcttcatcactgtctcatttctgtttttctctctctcactctttttctttttttgttttttgcttttggacaccagcgtctctgtcacccaggctggagtgcagtggcacaatctcggctcactgcagccttgacttcccaggctcaagtgatcctcccacctcagcctcctaagaagctaggcaagtagctaggactccaggcacaattaaatctttttttttttttttggccaggtgcagtggtggctcacgcctgtaatcccagcactttgggaggccgaggctggtggatcacctgaggtcaggagttcgagaccagcctggccaacatggtgaaacccctctctactaaaaatacaaaaaattagctgggtatggtgacacgcacctgtaatcccagctactcaggaggctgaggcagaagaaacgcttgaacccaggaggtggagatagcagtgagcagagattgcaccactgcactccagtctgggcgacacagcgagactgcatctcaaaaaataagtaaataaataaagtaaaataaaactgatttttttttttttttagagaccggggtgggttctcactttgttgcccaggctggtctcgatctcctgggctcaagcgatcctcctgtttcccgccttgtttctgtttctctttgtccatcactgtctctctgcagacgtctctgcttctgggcatcccgtggctttctggctgtcactctggcccagcatctctgtctctctgactgacttcgttctccatctctgtgcttctctttatccgtctctttgtctccccaccgcgtctctcgatctctgcagtccactgtgtctctggctgtctctgaccttgcggccgggcaggggaggcattcgcacactccatcccctgcccgcaggcctgggctcacatgggatctcaggtggggagttactggggcagcagagggatgggggcgtcatgggatcccaggtggggagttactggggcagcagggggatgggggcatcatgggatcccaggtggggagttactggggcggcagggggatgggggcatcatgggatcccaggtggggagttactggggcggcagggggatgggggtgtcatgggatgctgtctcacattcccaacagcagtgaggctgggacccaatacttgggtggggaaagagcacagaggtactagaatcaggctccacggtgaggggccacacttgcccactgctctgttttcctgtgtctgtccttcccagtcccagcaaactttttctgtctcctgattcctttgatctgaccccaccagggtgggggacatgtggcgtaaagggcagtgattgtgactgcatttcccagatggcaatgctgaggcgattatgactgcatttcccagatggcaacgctgaggcccagagacttgcttgaggtcacacgggctattgagcagggcccaatcccagaccctggactctgggcctcagtttccctcccagcccccactatctcctccaaacgtctggtgcccaggaggcaaaaccagtggtgctgagaaagaaggcagttgggggtcctccctctggccactgattcaatttccacccccaccgcatgcagcagagcggccacatttgccgacacgtttctcaggagaccaaggcaataaccaaatagggccggcagggctgggaagcaaacccctgagcactgacccagctgtgctgagccctgggcctgtgtccaggctcagccatggccttgctgtgtgaccctgggggagtccctccccattgctgggcctcagtttcctcccttgtcaactgggggcatcctacctgcatcccagcacgggtgcgaacagctgaggaggtggaggatgctgaggatgtggaaaatgccggagttttacctttttgctcatctggaggctgtggggaagtcagttggtggtggctgtgagaagggacagtcccacagctgggggcagggggagggaactcacatacacccccgcagaaaccaggagatggtatcaccccagccgttcctcttgagtctggagctgggctcagctgacaggaaggagagaaccacagacagtgcgaccctcaggctcacaacaaccccctcctcattccacccccaccccaggtgcacagaggctggctggaacactccccaaccccctacatgagcacaaaacacgcacacctgctccacctaccagcggtgtgagctcggttcattacactgctctgaatctcaattttcgcatctggaaaatggggattaaactgtgtcactgagttatgctgagaattcatgcagcacatttggcagatgcagaatcattttcagaaatttttaaattattattattagtggccaggcacggtgtcttacccctgtaatcccaacactttgggaggccgaggtgggtggatcccttgaggtcaggagtttgagactagcctggccaacatggtgaaaccctgtctgtactaaaaatacaaaaaccagttgggcgtggtggcacgtgcctgtaatcccagttactcgggaggctgaggcaggagaatcgcttgaacccagaaggtggaggttgcagtgagccaggattgcaccactgcactccagcctgggtgacagagcgagactctgtctcaaaagaaaaaataataaataaataattattgctattagagacaggctcttgccctgttgctnnnnnnnnnnnnnnnnnnnnnnnnnnnnnnnnnnnnnnnnnnnnnnnnnnnnnnnnnnnaatagctgggattacaggcacacaccagcatgtccagctaactttttatttttatttatttatttattcattttgagatggagtctcactcttgtcacccaggctggagtgcaatggtgcaatctcggctcactgcaacctccacctccaggattcaggctattatcctgcctcagcctcccaagtagctgggattacaggcatgcaccatgcccagctaatttttgtatttttagtagagacagggtttcaccatgttgaccaggctggtctcgaactcctgacctcagatgatctgcccgcctcagcctcccaaagtgctgggatcataggcataagccatggcaccaggccttacttttttattttttgtagagacagggtcttgctatgttgccgaggctggttttgaactcttgacctcaagcagtcctcctggctcatctttccaaagtgttgggatgacaggtgtgagccaccacacccagctgagaaacatttattatcgtcatcatcatcatctttgctaattctgattgaggctattctgtgtgccaagcaccatgttaagcatgttatttataatcttttctttctttttctttttaattttgagacggagttttgctcttattgcccaggctggaatgcaatggtgcagtctcggctcactgcaacctccgcctcccgggttcaagcaattctcctgcctcagcctcccaagaagctgggattacaggtgcgccaccacacccggctaatgtttgtattgttagtagagaaggggtttcatcatgttgtccaggctggtctcgaactcctgacctcaggtgatccacccgcctcggcctcccaaagtgctgggattacaggcatgagccaccacgcctggcctaagcttttctgtaattctcacattgccctagtgggtaggtgctagaatctctattttactgatgtggagaatgaggctaagcttagagaggtcaagtgacttgcctaaggtcacacagctaggatgtgaaagagcaggaattcaagtccagggccccgtgactccaaagctcccatcttataccatttctaggggcgtgttaacaattttagaaggggtgtctgggaaaccgccagccctcttcagcccctcaccgagtgaaactgcaggaattgttcattattatcactgatgttgacattgtcattaacttcttttccttcccttcccctctgctagagttcttcaagttcaagggctttgggagtttctccaacctccctcggtccttcactctgagacgatcctcagcttccatcagtaggcagtcccatttggagcctgacacctttgaagccacgcaggatgacatggtgacggtgcccaagagtcccccagcctatgcccgctccagtgacatgtacagccacatgggcaccatgcctcgccccagcatcaagaaagcacagaactcacaggctgcccggcaggcccaggaggcgggtcccaagcccaacttggtacccggaggtgtacccgaccccccaggcttggaggcagccaaagaggtgatggtgaaggccactggccctctagaggacaccccagcaatggaacccaacccttcagcagtggaggtagaccccatcagaaagcctgaggtccccacaggagacgtagaagaggagagacctcccagggacgtgcactcagaaaggtaggtgcccaggggctggttgggacctgcagggatggcttctgtttttttctttttcttttttttttttttgacacagagtgtcgctctgtctctcaggctggagtgcagtggtgtgatcccggttcactgcaacctctgcctcccgggtccaagcaattctcctacctcagccccccgagtagctgggactacaggcgcccaacaccactcttggctaatttttgtatttttagtagagacaggatttcaccatgttgtccaggctggcctcgaactcctgacctcaggtgatctgcctgcctcggcctcccaaagtgctggccggggcttctttttaacccagtacacatctgggttaaaaagaaaaaaacctacacattgaccaggtgcttactgtagaccaggtactgtgctaaaccctttacttgtaattagcaaaagaaaactggcaaggagagactgttactgtttccacaggacagatgaggaagctgagattcacagagtgacatcatctgcctcagtcagggtgcatatttgctaatgacaaagccagcatgtgaaccgagaccccctgccttcaaagtcccagttagcctctagcatgggccctcagctgctggatgggtcctaaacccagtcactagacccctgccctgaaccccctcacgcaaatcatcaccattagttctgctggacaatacctccacctagtctagaaaaccatttgtcagcttaatttggttatagggtgagttgagttcatgtaaaaatacaaattgtgatgataggacaatagctcccatttagtaagcatttttactgggtatcaaaacaagtatctcactgaaaactccatagaagattcaatcattaaggctgggtgcagtggctcatgcctgtaatcccagtattttgggaggctaggagtttgaaaacagcctggctaacatggtaaaaccccgtctctactaaaaatacaaaaactagcagggcgtggtggtgcgtgcctgtagtcccagttactcaggaggtggaggcacgagaattgcttgaacttgggagatggaggttgcagtgagctgagatcacaccactgtactccagactgggcaacagagcaagactcagtcttgaaaaaaaaaaaaaagattcaattattagccccacttacagattgggaaactgagactcagccaaggttacacagaactgggatttgagcaggaatctgcttgcttccagaggctgcacacttatgtaccacattagactcaccaccttctcaatcctagggccatgcctttcacaccccgggagacccctcaatcccagccaaaggagtccccggcttttcaatccttagaacctttgtctcaaccacaccagtcacatgtgcctgttgaaataaagaaaaaaagtcagctggccgggcgcagtggctcacgcctgtaatcccaacactttgggtggccgaggtaggcagatcacaaggtcaggagttcgagaccagcctggccaaagagaccagcctgaccaacatggtgaagccctatctctactaaaaatacaaaaattagccgggtgtggcggcgggcacctgtaatcccagctactgaggaggctgaggcatcagaattgcttgaacctgggaggcagaggttgcagtgacccaagatcgcgccattgcacactccagcctgggcgacaaagcgagactccaactcaaaaaaaaaaaaaaaaaaaagccacctgagcaaaagtaattgtagggccagagttctgggacctttctttcttttgtttttttctggtaactttcttgagcagctttttcctgagacaccaagcacagcctctgtctctgagctgtaattgcctagacccctgatcagtgaggaggaccatgtaaaggggtagagtgaatccagtccagattctgcctcttactggctgcatgactggacaaatctcttcctctcttggagcctcagtttctcatctgataaatggacgtaacaatagcatctacctggtcgggttgtggtgaggattcaagaataacatacctgtaaaatctcaacacagtggctggcatgctgcactcagtaaatgggaatgctgtatttacgattagtagaactcatgtttttccaccatccccggctgccttctgtcatcccctcctacattcgtcctcattcgggagtaaaggaccaaggattgtatgtagctgagagggcctgatgatgggtcctggggcgttctaagacaccccaaggtatgagactgcaccaggagcctggcccctcccacccagggaagccgagtttcgcgggagcggggcggggcggggtggggcgaggcgaggcggagttgagggcgtgtctaggggcgtggcctaccccaggctgcgcggagagctgctggggaagcgagcgttggagccgggcgggcgaggcggaggggtgtgctagggggcgaggccttcccgacactgactgatggggagggggcggagcgagaccgcaggcggagggccgtgttcgaggcggagagcgtccttccctgccggtggagtaggcggtggagtggggccgggcaaggagcgcaggggcgtgtctgggggcgtggtctacaggtcagtctccgcccccggagtccggcactgagctctgcagctcagtggcccgagaaaggcaggagccgctgggtttaggaggtccccgggttgccggcggcgacagcgggggaagcatgactgctgtgggccgaaggtgccccgcgctggggtcccgagggtgagtgaccgagctgggcctggggagggccagcggggagcaggagaggtcgaaggaggaaatctgcacccctggggcagctgacaaatttgggggcggggttagcatcagggacttttctaagccagttttctttgggtgtaactttgtcaccgcaggtcaggcatctgcttatctactctacacaacagccccaggagggaggtactactatcacccccattttatagatgaggaaagaaagatttgcctgccgagtttgacacagccagtgagcgtcagaaccagggtttaaacccagcttcctggcccatgctcttaacacctgggcagcacattcctctccagcagggccagggccgctgagaaaggtggtcttgagaaaccttgagaatggcaagtccaggacccagcccaagccttcttcccctgtggacagagccctggtgggcctaacagtgcctctggcatcatgcgtagccaggagctgaccaaggaaatgaagagactcttctcctccagcatctggagtgtcccgaggaggatggggttagcagaccagattgagcccccttctggtgccccgggacccagtgctccatctgccctccagggactgttgaacattccttccagaagtccctgaacctcaaccctgtgccctggagtcaggggagcagcctggcccatgaaatctcagactagccctgccccattctggtccttagtctccccagtagcccagatgggcctgagatggtctctgaggatccattcagtttggggaggacatttgggaaatgccagtgagcaagttcgggggccgtgttcctgagtgtctagaggaggccatcccaggcctaaggtggggagacagtgtccctcccccaccccggggagacagggtgcacctggagcaggaggaaggaaggggaagaggtgaggctgcaggggtttcctggtgtcctgttccctgctgagatcatggggatgaagaggaaggagggaggagggacctttagctcccccggctaaaaaaggaaagcaccagcctagcctgccccctacctcccaaggaccttcagtcttctgcaggtcccagagaggcaccctccctcctcaatccatcctacagaggaggaagcagaggcctagagagggacaggaagccccagcactccctaccccacgcctacccacactggaattgtcaggcgagggtcccaccaggcatgatcaccagctgacaaccagcaagcacctgacaggtgttgtctagctcaacactagactggggtgtgaggtgggagcctctacttgctccattttgccagtgaggagactgagactcagagaggggaagggactctcctggggtcacagagaaattgggtgtcaggcctcactatttgatcccaggcctgactaagcccaagctctaaaccactaggtcacatttcccctcctgcaagtaaaaatctcaaagtttttcttttgttttttctttatttcttttttttttttttttcgagatggagttttgctcttgttgcccaggctggggtgcaatggtgtgatctcggctgaccgcaacctccgcctcctgggttcaagcaattcttctgcctcagcctcccgagtagctgggattacaggcatgcgccaccacgcctggctaattttgtgtgtgtgtgtgtgtgtttttagtagagccgtagtttctccatgttggtcaggctgatctcgaactcctgacctcaggtgatctgcccgcctcagcctcccaaaatgctgggattacaggcgtgagccaccgcacccagccagctttttctaccattatttcaaatgacttcccatgactctctggaaaggagcccattttacagatgaagatgttgagatttttgtgaggctaataacttgcttgagttgatgcagttagttgaatgggaatgatattcattgtcattttgactgaggtacagctatgcctcagacactgttctaggtcctgggagatagcagtgagcatggcagacaaaaccctgccctcatggagtccccattccagggcaggggagacagaagatagacaagataaatgagttctgtggtcgactagaagagaaaagccttaacgagaaaatttaaaatcagctctagaattggttggcgaaagtggggagtggctggtggtgccaatttaagaaggttagccagaaagaaaggctcagtgaggaagtggtgtttgaacaaaggagacgaagggacaaaccctcttgctggctgggaaggagcataccaggccaagggaacagcgtgtataaaggccctgacgtggcatgtttggggaacagtagagaccactgtggccggggcagagcaaggtggggaggacagggaggggtgggctgggaggctgggatggaaatgggagcagataacgtagggcctggaagagcccagcaaggacctggctttggctctgagcaaaacgggagccattgctggccttgagcagcagcaggccccactgtgacttatgttgttaaaagacctctttttaggagaatcttttctgtgtttgatgtttttttgagacaggggctttattctgttgcccaggctggagtgcagcggctcgatcatagcttgctgcagcctcgaacttttaggaggatctgattgctgttctgtgtcgctttttagtgcctcatctgagtgtcctttgcctcccacctagagatccaagcccctaccctcactcccaaggggctgtttggaaggaaatggagacttgagaaccaggggtaccctgtgttgccccttccccagccctggtgccaggcactgaaaacaggccaggatactccccccaccactccatttccttttggaatgttgattctggtccaagaattcccaactctccccagagtcccacgaccctctcggccctgcagggtgacgtcagctgctgggcatctggtagcgattacccaccaggggtgggggtcgtggtgggccgtgtctgtgcagcctcttcagactctgggaggctagtccttgtcttccgaaggggcccagctgctcccggctctcatttcctgtggagactttctcacagtccttgagacccccggacgccttgggctgtgggaaccgggctggcttgggaaggatgggctgttcccccggcccctagctggatccacatccccccaaacccccaggggacccagttgcaggctgctggacctgcgtggggtgagggctggggaggataggggtcaggtacagcagtagctcagaggcccactgactgtgtgaccttgagccagtcccttttcttctctgagccttagtttccccatcagtaaattgagaacagtgacagcacctgcttcatagagtcactgtgaggacgggatatgtcaggtggagcatttattctgggcttggcccaagcaagtaccagtaaacaggagctactcatgctgtagaaggggaaactgaggcctgatgagagggacttgcccagagccacaccacttcctacctcccagccgagggccctctcaggctccaccccatttcctcttcctgacattggttctgggctctggttgaaatattgtttttttgtttgtctgtttctttgccttccctctctagcttcacctcctctgcacccagaagtggctcccaatgtctgggggagtccgcccatgtaaggaacagagcagggaattagacatcaggccatctggttctagtctgagcagctgcatgccctgggtcaagttacaagcttcagttttctcccctgtaaaatggggcttcgagatccaggcgttccctcatccactagcactcagtagatgccttttcttttctctcttctttggcaggttttgagacttgggtggcagctgtcagggcccagcatcctcagctccgctctgggaagaatggcccctgctctgccttctcctcacaaggctgtcgcccgtcctgagctcctgctggacactgcagcccactcaggaaaactgagggctccagacggtggagagggagcagaatgtgctgggcacaatggtggcccatcttggggagtggggcagggccaaagccaagagccttcccggcagggaatcccacaggccccatggctggtgtcctggcagagacggggctttccacccagctctttttgcccagggcctttaaggactgagaagctcagagcaggcaggtgcccgttgcttctctgcggtgggtgagtgaagatgggcgtgaaggaaggaaagaagctgggcacagggctcacgcctgtaaccccagcactttgggaggccaaggcaggtggatcacctgatgccaggagttcaagaccagcctggccaacatggtgaaaccccatctctactaaaaatacaaaaactagccgggcgtggtggcgcagacctgtagtcccagctactcaggaggctgaggcaagagaatcacttgaacccgggaggcagaggttgcagtgagccgagatcatgacactgcacttgagcctgggcaacagagcaagactccatctcaaaacaaacaaacaaacaaacaaacaaaaacaggaaggaaagaaacttcagccccccaggaggggcatggtgggagggtggcagatcttcatgggtggagtctggagcaacaagaggagccccacatgggccaggaaaccttgcacccctccttctcatgtggtcctcacagaccctctgggaagatagttataatgtgcccactttacagatgacgaagttgagcttcagagagggaaggcagggagccagggatcaggggcaggggaaaagctgaaaggcaggtggcagaggttggggaggtctccacttgaggacatatgtccaggcctcaaggcccaagggaacagacagggagagagagcagacaggcctatgcagaggaccaggtcactatcatgaaagagggccagggtggggcaggatggcagcctctccccaccccttctcctacagggcccctgggggaacgtcacccttccttctggcccaggatgaaggccctgagggtgaagctcagatttaaacatgcattgggaaaataaggataatgggctttaattgctgctcattaatccaattaattaagctaatgtatgcaataagtggtatcagttatcagaacaaatcagttaatacaggcagtgaaaggggttggttatttaaataattaatgctgatgattaatgggactgatttagctcaattatcactattatttattaattgatttcaccactaatatggcaggagaagtctcttttaggtttgtaaaatgaggaataaataaattaattagtggagctgagttttaaaaatggatgctttgattcctggatttgatcattacaatgggagggagagttttctagaaatccccaagcaaactgaactctgaaggctgagtaggaatgaccctagccaaaagggagcaaagacattctaggcagagggaacagcacgtgcaaaggccctgaggctgcagggggtggagctctttggaggaagtttgaggaggccagagtgcaaggaagggagaggagagagaagagatttgaccagcagaggctgggtcacagatggcccagccaggaggactagactttgtcctcagggctgcagggggctgctgtgacactcattcattcattcaaaaaaatatatttactaagttcctgatggttcctgacgttgtctagacagaaacacaaacccttgtccttgtggggctgacattctagtgagaggagctagtccctgcatgagaggaaatgcgtgctaagtcagatgaggggtcagggcagaattaagcagggaagggaatgtggtagtggaggaagatcacactttcagaaagggtggccagggaagaccttgctgagaaggggacattttagtgaagaactgaaggaggggttgggtgaggtcgctcacacctgtaatcccagcactttgggaggctgagacgggaggatcgctccagccaggaggtcgaggctatggtggccatgatctcaccactgcatcccagcctagatgacagagtgagactctgtctcaaaaaaaaagaactgaagggccaggcatggtggctcatgcctgtaatcccagcactttttgggaggctgaggcaggcagatcacctgaggtcaggagttcaagaccagcctggccaacatggcgaaaccccatctctgctaaaaatacaaaaaattagcccggcgtggtggtggtcacctgtaatcccagctacttgggaggctgaggcaggagaatcgcttggacacgggaggcggaggttgcagtcagccaagatcgcaccactgtactccagcctgggcgatggagcgagactccatctcaacagcaacaacaacaacaacaacaacaaagagcaggagggagggaacccaggggatatctgccggaaaaatattccaggcagcaggaatagaaagtgcaaagaccctgaggtggggtgggggagatggagcagcgcaggtgagggggagtgtggtgggccatggggtcagtgtgcaaggctgtttccaggaccttggctcttactgtgagtgaagctggggggccacgcaagtgggttggagcagaggaaagctgtgatctggccttcctttgaacaggactgctgtggctgctgtgcggggagaataggtctcagggacacagatggaggcagggaagccagtgggaggtggtggtgatagtccaggcaagtgatggcagcggattgtaactggacacggtgattgtgtcttggacatgtcagagtgttgtagcgccaccccatggtgaggccatggggcgaaagagtggccccagagcctcagcttccctgagctggtcctctgccctgagcacccctataggctctggccaccctagtcaggcctgatctcttgtgcaggcaccctgtctccaaggctctgcccctgtcccagagcccgaggggaagtacaggaagcaggaggaagcgctgggttgatccagtgtcctggccaatctgttcccagcagtgggaggatttccgggcctgaatagcaggaaatgttgggatgggatgcctcacccgggaagagtgggcggaggtggctgggggaggggtccctactctacctcactcccactgctgctggacagagagaacccaaaagcctactgttgctgggctgtagcttgagggactgtggttagttaccagctagggctttctaggagagaagattagcgatgaagaaccctagtatgttagaacagggagggctatcagacaacgtcttaaggaggagcttttggctttaggattgggggaactcacaattttattttttatctcagctttcttttgtttgtaaatactaggctcctgtatttgaggaggaggtccaatatttgactcccctccccattttgcagatgggaaggctgaggcctttcttaaccagagaacctggacccagcctaacaaaattaatgatgacagcgatcaacaattaaaattggctctttactattcatgcatccctttaagcaatatttctttctttcaacctcttcttcttgggttcaagtgattctcctgcctcagcgtcccaagtagccaggattacaggcgttcactgccacgcccggctaatttttctttaagcaatatttcttgagctcctgcaggcactgtgttggggactgggtctcagtggtgatttagacaaagtcaacactttcataagggcatcagataattaagtcaataaataaatatgaagtggccatttcaggcagaaattgcaaaaattgaaaataaagtagggttgggaacacagagtgaaggaatgagggactattcaaggtggggaggtcagggaaggcttctccgaagaggtgacattaagcaaagccctgaataaagagggaggagggacaagcttcatgaagcccttggggaagagcattccaggcagagggaacagcaagtgcgaaggccctgtggccggaacaagttgccaaggagggtggggcagaggcagaataagggacatgaggtgcaagggagacagcctggagggtcggcagggtggctgtcgggtaccagcaggccacacagggccttgtgggttggagaacagatgagccaatttatgcctgtttttctggcataatcatggtaccgtctttactctcacaaaggaagaaaagttctggtttggatgataaattgcatggccatggagaggagtttagattttgttcttctagagatgggagccgctgaagggctgaggatggttcgtttgccatcaaatgcttaggttgtaagcttaggtgccttctggccttggggcagaagctgactgtgggtggcagtggacacggagcccgagggaaggctcctctgctccactggagacacgagggtggccccactttggggacggggtggacatgcggagaggattctgacggcggagcggcaggatttcctggtggactgggcgtggagctgaatggaagacggggcacaaaggaccacaaggtttttggccaaagctgcaggaaagaggaaactgacatcagctgagacggggaagatggggagggggcagggaggagccacagttctgctttggatacacaagttgtagatggccttcagatatccaaggggaggcgtccaggaggtagttgggtttccaagtctggggttggaggggcaggtccaggctgcctgagggtaggggtagcatttaaggccatgcggtggggggagtggttcacggtggccctcaggaggaaggaaggaaaaacagccgtctctggcctctggcctctccaggctctccaccctgggggcagaatcaattctgtagccctctagcaccggcagtggctccgcagtcagctgggcagtggccgtgactgggtcactctaccctaggaagtgagtgcagggtaagaggacgggctgatccccacttggggccctccagtgtttagagtcagggatgatgggggtggggtgggaggagggggtagggaaggcagacagaagaagaagaaaaccagggaggcgtggtgtctggagtccagtgaagaaagtggtttgggaagcagactccataataagcatgtaatgttcatcacgccctgggtccttgagtcaatgccattaggcagaggctgtcattattcctgatttacagatacgaaatgcaggctcagagaggtgaagggacttgcctaggggtgcacagctggaaagtggaggagccaggccagctgataagtgccccctcctgccttcagggtgatcctgctggggtcctaagggccaggtgctggccccaggcaggcaggcaagagaccggcagctggggagccaagcagggctggggatgctcacttgtcttttctccttccagggctgctggagagccagaggctggcagcgactatgtgaaggtaggaggggctggccaggggttggtcagaggacactgaaggtctcagagcctgctccattacgggtgggcagagcccttcctcaagccttgttaggagccagacctcactgtgtattcccaggaggggaggttctcggagtcgaggcagcatttggatccagtttcattctcagcaccttcttcctacaccagccattattctttcctggccccaaactcagggcaacccaatatttgatatcatctgaccccactcacttgccagctggacggggccccaacagtgtctccatgtaaaggatgcagctttccaatcccacccaatctttgtgcacctactgtgtgctggcgctggaagcagggagcaggagaggatgactcagttctttatcacagataatgggcacagctcagatttatccaaagcttcatttatcctgggtactgggaacattgaaatgcagttttggccgggcacggtggctcatgcttgtaatcccagcactttgggatgccaaggcgggtggatcacctgaggtcaggaatgcaggaccagtctggccaacatggtgaaaccccatctctactaaaaatacaaaaaattagccagaagtggtggtgcgtgcctgtaatcccagctactcaggaagctgaggcaggagaatcgcttgaacccaggaggcggaggttgcagtgagctgagatttgcgccactgcactccagcccgggaaaaaagaaaaaaaaagaaaatgcagttttgaaataacaatgatagtaataataataatcataaataacatattgagtgcctactgtgtgcagaccccgtgctggctgctagacactggaggagaggcattctttacatgagaggtatttgattttctccctcatcactgggtagggagagccttcttgtgcccgtttacagatgggaaacttgaggtccagagaagtgcagtgacttgccctgggtcacattactttttttttcttttttttatttttatatactttaagttctggggtaacacgttcatgtgcagaatgtgcaggtttgttacataggtatatacatgccatggtggtttgctgcacccatcaacccatgatctacattaggtatttttcctaatgctatccctcccctagccccctacaccacatactcttaatggtgaaaaccacagttacttttgcaccaacctgatattatgaggaagaactgggattacaccccaagtttgatgccaggactatagccaaagcccttgaccttctacccccaggagcccccaccctaagcaacgccctgtgctgagcactgagagtaggcagagggcaaggagcaccaggccctgaattcaaagggctcccggtccatgtgggacccatggaagaagcatatagtgctttgcgcttgttttttgcaatccatcagatccaacttttatttttattattatttttttaagagccacctcttaaaagatctcgctctgtctctcactgcagccttgagctcatgggctcaagcaatcctcccaccttagcctcctaagtccctgggactacatgtgtgtgccactgctaatttaaaaaaaaaaaaatttttttttttttttgagacggagtctcactctgttgcccaggctggagcacagtggtgcgattttggctcactgcaagctccgcctcccgggttcacaccattctcctgcctcagcctcccgagtagctgggactataggtgcctgccaccacgccgggctaattttttatatttttagtagagtcggagtttcaccgtgttagccaggatggtcttgatctcctgacttcgtgatccgcctgccttggcctcccaaaatgctgggattacaggcgtgagccaccacgcccggccaaaaaacaatttttttttaaaggtggggtctcactgtgttgcccaggctggtctcaaaagcctggcctcaagtgatcctcctgcctcagcctcccaaagtgctgggaatacaagcacgagtgaccatgcccagcaaatccaaattttagtcccgtcaaagcatgatgggccaggcccagtggctcaggctgggcacagtggctcatgcctgtaatcccagcactttgggaggccaaggcgggcagatcacctgaggtcagcagttcgaggccagcctggccaacatggcgaaatcctatctctactaaaaatacaaaaattagccaggcgtggtggcacatgcctgtaatcccagctactggggaggctgaggaaggagacttccttgaacccaggagggagaggttgcagtgagtggagatagcaccactgtactccagcctgggcgacagagcaagactccatctcaaaagagattaaaaaaaaagcatgatgtaggctgatatagaaaaccccacaaaactaaaaaacaaattttagtctgagatctgccacttacttgccactggatttgggtgtggcattgcctccctgagcctgtgtttgactgtgtgaaatggtaacaggggtgcctccaacccagggttgctatggcttcagtgagcccgtggccgtgagtgggcgacctgggcctggaacagggcgggctggcctagctcctcactgcagggacatttcatcaccctgagatgctatctgcacaactctatgtaagtgactagtaatggagcagcgagggaagtcctcagattgctgccccctcaccatcaccagaagctgtgggagctccagaggtaggggatgacttttagttggggagctggagagctggagatcaaggaaagctttctggaggaggaagcattggagccaggccattgcagttgactgggaacattcactgagatctctccatgtatgaaatgctagaaaggagacaaagttaagcagagatgggtaggagagtggccctggcagaggcaggagtgtggacaaagtcagaaagtaaactgcgtgagcccagaaacagagcccagggtagcagcaagttgagcagaaattccagaacccttatgccaccgtgggagggaggacctggggaaaaccaacaccaaagccaatgggtggaatgcagggggcatatttcagcatcccattgaccccagctgcctggtaaggtagtgagatccctgtgaggaatgttggctttatatttttttcctttagtttatttttagggtttaaaaatgtaggtttttttttttaacattgtaaaataaataatacctgctcagtagaactgattaaacagtctgccaaaggacaaagtcaaaggaatgttaattttagtttcaagactcagatgaggttctgggcacggtggctcatgcctgtaatcccagcaactgggaggccacagtaggagggtcatttaaggccaggagtttgagaccagcctgggcaacatagcaagatcctgtctctagaaaaaatatataaaaattagctgggaaggctgggtgcggtggctcacacctgggctcacacctgtaatcccagcactttgggggccttgggccttggaattgggaggccaaggcgggcaaatcacttgaggccaggagtttgagaacaccctggccaagatagtgaaaaccctctattaaaaatacaaaaaactggccgggtgcagtggctcacgcctgtaatctcagcactttgggaggccgaggtgggtggattacttgaggtcaggagttcaagaccagcctggccaacatggagaaaccccatctctactaaaaaaatgatataaaaaagttatccaggcgtggtggcacactactgtaatcccagctactcaggaggatgaggcaggagaattgcttgaatctgggaattggaggttgcagtgagctgagatcttgccgctgcactccagcctgggtgatggagcgagactccatctcaaaataataataataataataataatcatcatcatcatcatcatcatcatcatcatcatcatcatctgggtatggtggtgcatgcctgtaatcccagctactcagagctactcaggtggctgaggcatgagaatcactcgaacccaggaggcagaggctgcagtgagccgatattgagccactgcactccaacctgggtgacagagtgagaccatgtcttgaaaaaaaaaaatagctgagcatggtggtgtgcacctgtagtcccagctactcgggaggctgaggcaagagaattgcttgagcccaggaggtcaatgctgcagtgagctgtgattatgccactgcactccaaccgggcgacagagggataccctgcctctcaaaaaaaaaaaaaaatcaaatgagggttaaaaggaatcaatagttgggttccaaaagccccctcctaggctgggcacggtggcttatgcgtgtaatgcgggcagatcacttgaggtcaagaggtcaagaccagcctggccaacatggtgaaaccccatctctataaaaaaaaaaaaaaaaaaaattagccaagcatggtggcaggcacttgtcacttgtaatcccagctactcgggaagctgaggcaggagaattgcttgagcccaggcggccgagattgcagtgagccaagatcactcaactccacttcagcctgggcaacaagaacaaaactctgtctcaaaaaaacaagaacaggccaggcgtggaggctcatgcttgtaatgccagcactttgggaggccgaggtgggcggatcacgaggtcaggagatcgagaccacggtgaaaccctgtctctactaaaaatacaaaaaattagcgggcatggtggcaggcgcctgtagtcccagctactcggagaggctgaggcaggagaatggcatgaacgcgggaggcggagcttacattgagccgagatattgccactgcactccagcctgggtgacagagcgagactccatctcaaaaaaaaaaaaaaaaaaaaaagccccctcctaccttgagatactcatctttgaggagtcagcttccagaacttcagagttctcaaactattttgtgcatcctttgattctaaggcaaggattcttaaattccaagaccataaaattccaggctgcatgcccagagcttcagatgtatttacagaaaacaaacaaacaactgaggcccagagaggtggactcacccacctgcggtcacacagcctgtcagaaggatttggacctgaggcctgactgatggggaatcagcaatggctccctttgcattgaagagcctatggttctgagacaaaaagtccagtttctttttctttttctttttgagacagagtcttgctccatcacccgggctggagtgcagtggtacaatcttggctcactgcaacctccgcctcctgggttcaagcgattctcatgcctcagcctcctgagtagctgggattgcaggcatgcgccaccacacccggctaatttttttgtgtttttagtagagacagggtttcaccatgttggccagactggtcttgaactcctggcctcaagtgatgcacttgccccggtctcccagggcgtgggattacaggcgtgagccaccatgccaggccaaaaagtccagtttctaagacaggaagcttgaaaataatagcgtgcacttattgagcgcttacttcatgcctggcaacttacatgcaccagctcagcgaaagctcagaagagttctgtgaggtcagcacaggctttagctgcgtttgacaggtgcattttccacaagtgagtcgtagatcccagggaaagagctggtgggagtgggcgcaccagtagttaggggacagttgaatccaggctgcccctctaaccactgggctttactggctctctgcacccccagagtcttgtcagtgaacatcctcgattcccagcagagtctctgattccaaaccagggatgagaaatcctgggctctgggagatttcctgaggccacagagaatttggtccagcacatatacggatttttccagttttagatatgatttaattcaaagtctctgcccgctcccggtctgttagaggtgcggcgagtgggggaggcagaacctcccctcgctggcccatgggtccccacccgatcccgctgcccccggtaataccctccttggcaggtcctccgctccgcgcccgcagctccaggcagcccgagcgcgcggaactggagggcggggggcgaggggctgggagcggggggcgggcggagggaggaacaatggccccctcccctcccctggccggctggagggtggggtctccccgccccgcctccccgctcctcccccgacaaggcgatgaggtaatcgcgccgctgagaggcacgcgcagccggtgcctagccggttggtccctgcgcccctgccccgccggccaccgcccccccacaccgtcccggccccggcagcctggccccaccatgaccgagcggtgcagcctgtggagtgccctgtcggccgccgcctgctgcttctaccgcggctccttcgtgcaggtgcaggtgagggggcggctcggcccccgccacgcgcgccgggctgggacccccggccgctccgcccggggccctagagccagccggggagctgcagctcagcggcgcccggcagggtcgggctgggctgggcccggccgacccggggagggggcggggtcaccccagcctcacctctgggcgcccaggcgctccgcggggtgagggttcggcggccactcctgggactctgggctgcggtagatgccggtccgtttctgcctcctccgcaggagggagagagctggggcaggggggactgggagatggggtctccggcgtcctgccggtcctccgcctggtacgctggcccttgcggctgacctgggcaccctggctccccattgtaccgggggcgccggactgggatctgaagactgagtgaggagcaggaaacgcgggggatgcttcggatgccagggttggggccagagcgcccgccaccctcccgccctctaggtgggcttggacatgcctggggcgcgggtctctcccagcccagctggccgggcagtgcaggacggcgccgcggcggtgagagggttaaacggaagggggtggaggggaggacccggaccccgcctctctgcggagcatcctttggggatggctttgcttggggttgggacgccgaggggagctggaggggatgctgggctcgggctggcgggaaggggttaagaccctgtccgggggtctccgcgctcctgccccctgagccccctgggagatgccaggcgcgtcggctcttcgctcccccaggctcacacacgctcgcggagcccgcctgaaggactgccccgccggcggcggagcgcagcatccccgcaccggccaatcaggcgcgcgcaggccgggaggcggtgagatcatctctggccaatagcagggcgccgagcgcagggatgctgcattcgcaccccagcacccccaactctagggaactgggggctcccaggtcgaggtgagatcaaggcacagggaccctaggattcctcaccctcaggtgtgtgggaggaccaagttggtccccccaaactctccgtgaccagtgattaagctggaaaaggggagcccagtctcccagcccctttaacggatgaggctgcccaggcccagagaggggaagtgactggctcaaggtcacacagtggcagccttggggcggttcttcaacatccagcctcctccctcctttgcccacgtccctctagctccagctgtggaactgggggaaggtctcaatcgcatgccctttgtcaaggaggacgccagaaggctgaggtcttggttccctttttccctgtgacgcccactctcccctttccagggtttggtgtgatatgaggaaagaggactagcctggtgtgagcaccgcagagtgagagggagagagaccagggacccccagaagtaggggaccccttggagaagtgtaggtgtctgagaaggcccagatcctagcccagccctgggcctctctgcccttcgggggcatcggtttctaccacggccggaggatgtgcagaattcccactcccaggccccgcctttctcctgagcacctgtgcaaaccgcccactcccaccatctgtccccagagccctgcaggctcctcaaggtccaaattttcatgggtccaccaccaagctgctcctgccccagccttgcccactcagagcatgtcccaatcatccttctaggatctcggccaggagtcctctctgacccctccgccctgctcccccacatgaatcaatggccatctaaactccctttcccccactccttctgcccacgccttatctgccctgccactgcctggaaaaccctaggctgctctccataagtggactaaacctgccccaacacttccaaacccctccatggctctgctgtggcctccagataaaccccagctccctgaggcagccgtgccacacctgcccctgcccccacagccccttggaagcttcttattcatctcccctccctccccttggctctgcccgtaggaccctgactttgccgctctctccccagaagctcttccctgtccacctgtccacctgccctctccaccctggtgcttttgcttggctcacccagtccttcagacctcagcagaaacaccaccttttcagggaagtgattcctgactctgccccctgactagtttggtggtgcaccatctctgtgcatctcgggacattcaggaaacctggaattgattgtcagtgtctgcaaggcctcccccagggcagaggccaccttgggtcctcagccctggcacaggaccaggatagggacctagtcaatgttgaatggaatcagagattctagatatctctgacactgggaatcatggtgtcttgggagcaatgcagactaggctaaacccaggcagtatgggagcagaggggtgagggatgtagccacagaattaggaggcgagatctgtggatagtctgaggaggcagggagtggactggaggaccttcggactctcaggagcgaggggccccagggagagactcacctgggatgaaggccctttactgccctccctcatctgtcctgccttctggccagcgctggggtctgtctgtcttggagtagccatctttggggcctggaggtgggggaaggagaggaagaaccatcccatgtcctcgcagtgatgaggatgtccatgtgctagtagtactctggagtgctgtctcttttcatcttcgcagtgaggtgaggcaggttctgtcactgtacccattttaatgaggaagaaattgaggcccagagagctcacaaggcacagccaggattgggctgggctctggtgggcgtacacctggcattaagggcttcctttcctcttcccttagggcccctgggatccatcagcctccaacttcaggccacagtaatcaagaaaccaggagtttctgggccaggtgggagggtggagtactggacattatctccctcagtggccttgggcttccctgctgggccatggtctccccatctgggtgaggattgctgaggatttcaagggagaaatggccttggaaattgtaaggggcaatgcagatgtctgtttggggtccccgtgtccctgtttatagtcccttccccacccttgcattgtagaatgcaccatcccagaacgtatccttgtccaaccagttctgtggttttgttcatagcttttcctgcagttacctgctgccttacctccaagattcacctgtagaaatccccctccaacacttcaagaacagtttggtgcccttggtatataatgagtgttttcttactgccatctcctccaggaaggcttccgagacccctctgtcgtgcccaggcttaatcccgcttgtaaaagccacccggctctttgccgctgtccagcgctgtggtgctgaccgcactctactcagaggctcctgttgcttttgcctctcctcagactaggcactgccttgagggccgggcttggtttatatatcactgcatccacccctggcatatagcacagggcctggaatgcagctggcattgttttgtggaaggaattgagatttctttactctttctgggacccatgggaaagggtctggcacctgtgccttagtgttcccagagtcccaggataggaggagttcatccatggtagaatgaagttgggagggaaagaagaaggagactttaagttggatgccaactcttgctgttttctacccagttctccaaggagaagtacatcctggactcatcgccagagaaactccacaaggaattggaggaggagctcaaactcagcagcacggatctccgcagccatgcctggtaccatggccgcatcccccgagaggtgagtaggccccgagctggacttcaacccgggaccctcccacccactgccttggccagccccagccctggctgcagccacctgggaggctctgacctgttgcttggtggattcaatcagaatggactgggatgaggtctagctctgccctttactgactgtgtgaccttgaacaagttgcttcacctctccgagcctcagtatctactgcaaaggggtgttgtgaaaattaaacgaaataatgcaggtaaaatgtttaacatgatgcttgacaccatgaatgttggcctttgttcttattattatgctgttattgttactggtctacatatctgccttttgtatgtttgcttagtgagtaccaatctttgggctacttagttttggcaaagttgagtttcttggctgaggtgactttataagccacagaattaagttgatagatcacttgttccttctttcatttatgctatgatctttgccaaacaccaactctgccaggacctgtgctaagcaccaagggtgcagaggtagaaaaggtggtggcttctcttgatggctaatggcccagggtgggggactgacaggcaggatgacagtcagagcctagtggaagaagtacaagaatagagtgcctggtaagaatatgggcgagtcccgaggaggggacactgaggatggaagcctttgtgaggtggataggagttcaccaggtggggccaggtgcgatggctcatgcctgtaatctcaccactttgggaggctgaggtgggcagatcacctgaggtcaggagtttcagaccagcctggcccacatggtgaaacctcgtctctactaaaaatacgaaaattagccaggcatggtggcatgcacctgtaatgccagctactcaggaggctgaggcaggagaatcacttgaaccaaggaggcggaggttgcagtgagtgtgccacctcactccagcctgggtgacagtgagactccatcttaataataataataataataataacaataataataataataaagaagttcatcagatggacaaggcaggaagggtgttccaggacaaaaaagcagcttgagggtgcaagggccagaggcatgccagagcactgggtggttggaagaatgaggattaggaattcactctgcccaaccggaaccctgagaagggatgggtctgagacctgggtctcaggtcacagccattctcactcctccagaccctgggcctctgtgcctcccattccaaggtgttgggtcctcccattcctgagcctctgtgctgcagactcagggcctctggctgaggtgccccctgtgaacctgggtcattgcatccccgctctcagatgtcagatgtctctgttcattgggtcctctatgccctgggtctggtcttgctgtgccccctaatcctgggttgctctgtcccccagatcctgggtctgaccctctcctggccccaccctactccagcctaaccatgccttctgcaggtctcggagaccttggtacaacgcaacggcgacttcctcatccgggactcactcaccagcctgggcgactatgtgctcacgtgccgctggcgcaaccaggccttgcacttcaagatcaacaaggtggtggtgaaggcaggcgagagctacacacacatccagtacctgtttgagcaggagagctttgaccacgtgcccgccctcgtgcgctatcatgtgggcagccgcaaggctgtgtcagagcagagtggtgccatcatctactgcccggtgaaccgcaccttcccactgcgctacctcgaggccagctatggcctgggacaggggagtagcaagcctgctagccccgtcagcccctcaggccccaagggcagccacatgaagcggcgcagcgtcaccatgaccgatgggctcactgctgacaaggtcacccgcagcgatggctgccccaccaggtcagccagggccccatttgtcaaatggggttgtgggtaatgagagggctagtgagaaagagaaggcctaggtacactgaaatgggatgaaattactctcctggagcctctgtgtgcagggaggaatgggaggaaggttgggccatactctgtggatgtacagaacacagggcttgcagggagtcagacccaggttgcagtcccagctctgccactcgctggccatgtgcccttgaccctgtcacctctcctctgttatccccatgttcctacctataaaggctttcattcaagcagccctccctaccccaggggagccctgagtcctgaaccggagaggggcctggtccccgccacctgatgccacccctcctcatcctacccagctaggccaaggtgggcatctgagcagagggctttacagcatgcaaatcactgcacagggaatgggatgttctcagcaaattttaatcacacctggttgtctccggggctaaaatcaggccccagatgctgggaaaagccacagcagctgacggttcctgagatcctactaagtgttaagtgctgtatgtgcccaatctcatcaacgcccatttcctcctgggaggtgggtcctgcccatacacccaatttgtagatgaggacataggcttagaggggggaagccgcttgctagagagtggtaggatcaagattcaaacccaggtccgtagactctgaagtctgtgccccaagtttctgtggtttccctggctgtttgcaaagagatctgctgtcctgtgccacctgcacttggataggcccttgaggctccgtctccctggggctgggttgggtgctcccagtcaaggaattgatgaatggataccctgtgggctgcagccacttggcctgtggttgggaaccagtaaacataatggtgtcaggatccacggaccatgtgtgcctgaggcatcctgagcatagttgggagcagtgaggagaggttgggatggtgggcccactccttaaggctcactactcttcctgctagcccctctccccagaccattctccaggttggaggaaagattctgcttatcaagctgagggcactagtgaggggccgtgtctgcccagagaatggttgtagttgactaatttgcacaaaggcacctcatggggtagttgaattctggcctataccccctttcccatcctctcctccttgggaaaggagagggacagaggagcttgagaagtgttggctcagctgggtgcccccaagcctcatcctcaggctgctctaagctttgtgggaggggaagctggataggaaaggaggagagcagggtcatgtggaagataccgactaggaaccgggctaatggccaagcgtggtggctcgtgcctgtaatcccagcactttgcgaggatgaggtgggtgaatcacctgaggtcagaagtttgagacaagcctggccaacatggtgaaaccccatctctactaaaaatacaaaaaattagccacgcttggtaacgggcacctgtaatcccagctactcggaggctgaagcaggagaatgtcttgaactcgggaggcaggttcagcagttgcagtgagctgaaatcacgccactgcactgcagtctgggcgacagagtgagactccatctccgaaaaaaaaaacaaaaaagaaaagaaaaaagacaaaaaaagaaaaaaagaaaccaggcgttctagccaccagggttcctagctctgctcctgactcgctgtgccccctccctcatctgggcttcagtttttttggtacctgtcagtcgggaggttggatttgataatctccaagccttctctgcctctgaagttcaaggtgcagaggtggggggtcccagaggcaggctgaggcccctgacctccgggctccctgcccatgatggtgtctgctccacagtacgtcgctgccccgccctcgggactccatccgcagctgtgccctcagcatggaccagatcccagacctgcactcacccatgtcgcccatctccgagagccctagctcccctgcctacagcactggtatggccagcagagggggtggagcaggtggagggaatctgttgttgaagacttctgtcacctatgtgtggttatgtgtgtttccgcctcttttatgaggcgcgacctttaccaagagaaagaactgacactggaatcctgctaacagaactgttgatatcaacatataagatgtatccatggtttgtttatttagcaactatttatttgtttttgtgacagttttgctcttgtgggctggagtgcagtggtgggatcttggctcactgcaacctccgcctcctgggttcaagcgattctcttgcttcagcctcccaagtagctgggattacagacccctgccaccacgcctggctaatttttgtatttttagtagagacggtgtttcgtcatgttggccagagtggtctcgaactcctgacctcaggtgatccacctgccttggcctcccacagtgctgggattacaggcgtgtgccaccatgcctagctaatttttgtatttttagtagagatggggtttcaccatgttggccagggtggtctcgaactcctgacctcaggtgatccacccgcctcagcctcccaaagtgctgggattacaggcatgagccactgcacctggcctctatttttcttaatagactttattttttagagcagttttaggtttgcagcaaaattaagtggaaagtacggaacactgtgctttcttataaatacgaagaaagtttctctgttagaaacattccaatagatcatttctggaaaaaaaataaaaagaatgttttcaacaggccgtattgtccacgtggcaggccaagtgtcacgagagggggctgactcaggaggaactttcgcctagggtggcattccattgaagtgttgctgtctgtatcggttgtcacaaatccttccctaaacacagagccaccaactttgtcataactacaaacttgatttcaaagcaataccctgagtataaaacctaaaattccttgccagaatgacttattggacagtttctaagcaatctggtatagtaaagcagcccagatgtcaagacttaaatctcagctgtaccacttgctggctgggtgaccttgggcaggttagtgcacctctctgagcttcacttttctcatctgtagaatgaggattataaaagtacttacttcataggacattgaaaggattaaatagactgaggtacaaagaagggtcttgcaggcactaagagcttagtaaatatcgcctttgaggtttgatgatggttttactgtcattatgtctccagcatgttgccagctcctagcacacaaggtttagcaacaaatcattattgctaattcaggccgggcatggtggggcacatctgtaatcccagctactcaggaggctgaggcacaagaattgcttgaacctgggaggcgggggttgcagtgagctgagatcatgccattgcactccagcctaggcaacagagcgagactctgactcaaaaaaaagttagccaggcgttgtggcacatgactgtaatcccagctactcgggaggctgaggctcaagaattgaagaattgcttgaacccaggaggtggaggttgcagtgagcctagatggcaccactgcactccagcctgggccacagagcgagacagtgactcaaaaaaaaaaaaaaaaaaaaaaaaaaggaaatcattattgctaattcgtcgagaaacaatcacatgtggcacaagaaactccagcaggtactcagcttccccggatcactgaagctcctccaagcagtgggtccccaaggctgcagcagcctcagggtggggccatgcaaactcctgggtcctggtgatttcagagcatcacctgggctggtcagcttgccagagtcaatcggccctggtctctggtgatgcagggaggtggggacatcacctctgtactccctacaaggagtgagggagcctgttctttgggaaggggtgcgggaatctcactttggtggggagctgctataacggggcctctctctctacctttctgcagtaacccgtgtccatgccgcccctgcagccccttctgccacagcattgcctgcctcccctgtcgcccgccgttccagtgagccccagctgtgtcccggaagtgccccaaagacccatggggagtcagacaagggcccccacaccagcccctcccacacccttggcaaggcctccccgtcaccatcactcagcagctacagtgacccggactctggccactactgccagctccagcctcccgtgcgtggcagccgagagtgggcagcgactgagacctccagccagcaggccaggagctatggggagaggctaaaggaactgtcagaaaatggggcccctgaaggggactggggcaagaccttcacagtccccatcgtggaagtcacttcttccttcaacccggccaccttccagtcactactgatccccagggataaccggccactggaggtgggccttctgcgcaaggtcaaggagctgctggcagaagtggatgcccggacgctggcccggcatgtcaccaaggtggactgcctggtaggtgctggctgtgcactggggtggagggagcatctctgttctgtggggcagggcagtgagaagctggctcccagattccccaagtacagcaggtgggcctggattctagctccatggctgtcctttgcctgctctgtgactctgggctggtcatttagcctcactgggcctccagtttctccttttaaaaaggccgggggtggtagctcacacctgaatcccagcactttgggaggccgaggcgggcggatcacctgaggtcaggagttcaagaccagcctgggcaacatggcgaaaccccgtctctactaaaaatacaaaaattagctaggcgtcgtggtgggcgcctgtaatcccagctacttggaaggctgaggcaggagaatcacttgaaccttggaggcggaggttgcagtgagctgagatcacaccactgcactccagcctgggcaacagaacgacactattcaaaaaaaaaaaaaaaaaaagcacataagatatccttgcttcctccagatgtcagtttggcactaaaactgggcagccctgaaacccagtggtctctggctccctgaggcagttggggacacttctctagtgtgccatagagcctcttgagggttagccagcttgtcctgggactagaaaaggcctgactctctgcccccaccgcccccccgccactggacaaataagcagaaatcattacctcctcggcccataaattgtcaatgcctgggccttagctttgttaaatctttgaacatctaaagaccccagttctctctgtgcttcagtttctcctttcacagtttgggagaaactgattattgggttatactggtctcagagcgcgggaagcaagaaaagaaacaaggcaaagatgtcactccatgaagagtccagggtggcagggaggacccaggttctaggcccagtgtgtgaccttgggcaagcccattccctgcccgggcttcagggtttccctctgcaatgaacaagtatccagctcttaaccttaactgaatatttatttatttattttatttttattttttgagatggagtctcactctgtcaccgaggctggagtgcagtggcgtgatatcggctcactgcaacctctgcctcctgggttcaagcgattctcctgccccaacctcccgagtagctgggactacaggcacgcgccactatacccggctgatttttgaatttttggtagagatggggtttcgccatgttggccaggctggtctcgaactcctgacctcaggcgatccgcccaccttggcctcccaaagtgctggcattacaggcgtgagccaccccgcccggccgaccgtaactgaatatttaattgccaggcacctctggacattttcctattaattcctacttcacagatggggaaactgaggctcgctgagaaaggcagagtcacttgctccatatcagagggttagcggtggagctggaattcaaaccccgcctcccaaccaggctacctacccccttagataaagctctctgactcccagatggctggggccagccctgacaggatattaatcagccctctgggcgtctttgcaggttgctaggatactgggcgttaccaaggagatgcagaccctaatgggagtccgctggggcatggaactgctcaccctcccccatggccggcagctacgcctagacctgctggaaaggtgagacagcgccggcacccggggactcgcggggaacccccggctaccgcactccccgctggacggggcgggttggccaatcacagcctcagctcggctcccagggggctctggccacgcctcccatcccattgaccaatcgcaagccctgataacccgctctaaacaggctgatttcccaaagactgaatcctgtatctccgcattcgccttcctttcgcatccccttgaccagtcatccccttgaccatcagcctggcctcgcccatcagctggggctcctccttgttcgttcttaaaactgctctgcctggccgggcgcggtggctcgagcctgtaatcccagcattttgggaggccgaggcgggcgaatcacctgaggtcaggagttcgacaccagcctggccagcatggcgaaaccccgtctttactaaaaatacaaaaattagcagggcgtggtggcgcgcgtctgtaatcccagctcctctggaggctgaggcagaagaatcgcttaaacccaggaggcggaggttgcagtgagcagggatcgcgccattgcactccagactgggcgacaagagcgagactccgtctcaaaaaacaaacaaacaaacaaacaaacaaaaacaaaacaaaaaactactctgcgtgatgcatttccctgctgacccacagctctggccccgcccctgatttatgctgaccaatcagaagcccgaggccttgctttccacgctctggccgcgcccccttatcccattgacccttacaacctctcacgttggctccgccctccgcctctcccggcccaaccacaggcagcgccccaggcccgcacccctcacccctgtccccgagcccgccgcctctgaccccgccgctctgacaggttccacaccatgtccatcatgctggccgtggacatcctgggctgcaccggctctgcggaggagcgggcagcgctgctgcacaagaccattcagctggcggccgagctgcgggggactatgggcaacatgttcagcttcgcggcggtcatgggtgccctggacatggctcaggtactgagagccgcgcagagctggcacccggtagactgtctggaagagccctggggtgcctttgggatggctgtatatggaatcaggaggagctttggaatttctaggcagaattggtgagactacccgggagaactgagttctgcaagtgccgacccacagcaagttcttccccttctctgggcctcagtttcctcgcttgtaaaataaaacaaatgaggagcattatatgagtttaaagaataagaataggccgggtgccgtggctcatgcctgtaatcccagcactttgggaggctgaggcgggcggatcacgaggtcagaggttcaagaccagcctaggcaatatggtgaaaccccgtttctactaaaaagtacaaaaagccgggcgtggtggtgcgcacctgtaatcccagctactcgggaggctgaggcaggagaatcgcttgaaccacggaggcagaggttgcagtgagccaagattgcgccactgcactccaccctgggcaacagagtgagactccgtctcaaaaaaaaaaaaaaaaagaataagaagaaagtggcaaccatttagtgagtatttcctataggctaggtgctatactaagtgcttaaccagcactgatttctcagaaccatctcatgaagtaggtgcctttagcatccacattttacaaatggagtgtttgagacagagcagtccttgcctaaggtcatacggtcagaggctgaaagaattaggacttgaaccaggtctggctgacttcagagctgagcctgcctctcctatgactaataaataacaacagccaggcgcggtagctcacgcctgtaatcccagcactttgggaggccaaggtgggtggagcacaaggtcaggagattgagatcatcttggccaacatggtgaaaccccgtctctactaaaaatacaaacaaattagccgggcgtggtgacacatgtctgtagtctcagctactcggcaggctgaggcaggagaatcgcgtgaagccaggaggcggagtttgcagtgagccgagattgcgccactgcactccagcctgggtgacagaatgagactccgtctcaaaaacaaaataataaaaaataaataaataagaacaacaagttcccagaggcagtgtcctgcgttcaactcccacccagctctgccactttttttcagaataaccttgggcaagtcattcctgtctctgagccttagttccctaatctgtaaaatgggttgtgagagcttcatggtagacatgaaaagtagtcatcactgtccctggtacatgaaggatggccataataataataacgatcccacatctgggtgtccactcagcagggcagcagggtggcccctgcaggccctctgcctggctggtctctcacagtttggcctccccagatttctcggctggagcagacatgggtgaccctgcggcagcgacacacagagggtgccatcctgtacgagaagaagctcaagccttttctcaagagcctcaacgagggcaaaggtacttccttgttgcgtgaccttggacaggctgcagccctccctggggttgcaaagactcccagcatggacagtgatgacagcctggctgagctctgtgcaagctactttccctgagctcactgttcctgctggcagctgtgtcagccctgttcatgtccaggctcagcccttggggctgggccagggctgcagtgggttcagttgggggaatccgaaagaaagggtttgtcccaggagtcaggagcccttggggctctctcccggacctcagccaggcccgttccctcctgcacctcagcttccaggactgcagtggatggtggggcactacaggatctttaagcgcctgctgcctttctccttgcagaaggcccgccgctgagcaacaccacgtttcctcatgtgctgcccctcatcaccctgctggagtgtgactcggccccaccagagggccctgagccctggggcagcacggagcacggcgtggaggtggtgctggctcacctggaggccgcccgcacagtggcacaccacggaggcctgtaccacaccaatgctgaagtcaagctgcagggtgagtggcgggtggcatcttggggggcttgcaggcctgggcctccctccacctgcctcactgcttcccttttctccaaggcatccattcacatttctccactcctctgtcctgccctgtctccctgaccccttcctctcatgtcttttcttttcttttttcttttttttttgagatggagtctcacactgtcgcccaggctggagtgcagtggcacagtctcggctcactgcaacctccgcctcccaagttcaagcgattctcctgcctcagcctcccgagtagctgcaattacaggcgtgagccaccatacctggccaattttttgtatttttagtagaggtggggttccaccatgttgggccgctggtcttgaactcctgacctcaggtgatccacccgccttggcctcccaaagtgctgggattacaggtgtgagccaccgcacccagcctaaaatgtatacatctttcttaggaaataatttggaacttaacagaaaaatacgaaaaaagaaaaaaaaatcaccaaaaatctgcaaacatatttaacattaatattttatggtctagtcatttttaaattatatgctgcaaataacaggacaaagatgctaaactacagggtcgtgttgattcacaaaccttgttggatccctggcggagttgaggggaggtccctaacaggggggtcctgaagaatgctagggctctggacaggaaccccagcctctgccctgaccctatgccccaacactgcagggttccaggcccggccggagctcctggaggtgttcagcacggagttccagatgcgccttctctggggcagtcagggtgccagcagcagccaggcccggcgctatgagaagttcgacaaggtcctcactgccctgtcccacaagctggaacctgctgtccgctccagcgagctgtgaccccagggacatttcccctctgcagctgcggacagcgtcaggggcagaggggcacacaactttccccagagcaccccaaggacactgtgatcaacccgagaatgttctgggttcaactcaagcatctcccttgcacctccagggtcctgcgtggactctgggttccatcccacctgctacatgctcaccaggtctccattgaggaagaacaggaacgccggttcccccaccagcttttgctgctccccttcctgctggggttccctgttttcgagccatgggaggcaggctgctcacgcctcctcactctctgtctgtccctcaccaacaccaaggcctccatctcactgtaaataagtctctgttctgtaaatagatgtacagaagccatgttatttctttcatataataaacttttatgactctttattctgtctctcgggctcctggggtagaaggaagcaccttttctcaggcgaaaggtagaaaacttcattcaacaaatgttgtgagtgagtgccgagtatctggggccagtggcatgggagtaagaagaatttaccaagacagttgtaggtaaagaaaggcagatttatttcaggaagcatgaaaatgcattgcaaggtagcaacgggcagatcagcagaagaggagctgactgcaaagagacaaagccttgctgtgagtttttatgggatggcatttctgctgtgtgctgaacagggctttctgcagtactgataatgccaaggttgcagtgggctaacctacatgtgtccggtgagaagttgggcacaggagggctgtgtgtcctgaaccatcaagaaggcagacttctggccaggcatggtggctcatgcctgtaatcccagcactttgggaggctgaggcaggcggatcaccaggtcaggagatcaagaccatcctggctaacatggtgaaaccctgtctctactaaaaatacaaaaaattagccgggcgtggtggtggacgcctgtagtcccagctgcttgggaggctgaggcaggagaatggcgtgaacctgggaggtggagcttgcagtgagccaagatcgcgccactgcactccaacctgggcaacagagcgagactccgtctcaaaaaaaaaaaaaaaaaaaaaaaaggcagactttgagcttatctgctttctctttttgctttcccctggtcccatcagcatgactcattttccctaattaggactcaacaacaaatacttctttagcacctgggacagtccagattgtgccaggagccagggttacagcaaatatgaaaacccaatccttgctttctgggagctcacagaccagcgggagagataaatagctaattccaacccagtgctcctatcccctgccctgccctgggatggatgccatggcaacagttcccacaaatgcacaaccaaaaatccgaggatttggggtggaagggctttttgaaatctatgatcccaactcccctcttgaagactggtacctgaaaggagaagggacttttcccgggtcacagcagcagcagagtgggaaaggctccacctggcttcctggacccagacttctctccttttttctccttgatagtgggaactactcattttcttcttttctttctttctttccttttctttctctctctctctctttctttcttgtttttttttttttttttttttttttttttgagatggagtcttgctctgtcaccaggctggagtgcagtggcacaatcccagctcactgcaacctctgcctcccgggttcaagcgattctcctgcctcagcctccccagtagctgggattacaggcatgcgccactacgcccagctaatttttgtgcttttaatagagacggggtttcaccatgttggccaggatggtcttgatctcttgaccttgtgatccgcccgcctcggcctcccaaagtgctgggattacaggcgtgagccatcgtgcccggcctccttccttccttccttcctctctttctttttctttctttcttctctttctttcttctttctccttccttccttccttccctccttcctttcttttctctttctttttctttctctttctttctttcctttctttcttccttccttcctttctttctctctcttttcatcctttctgtttctcctttcctttcctttctttttctttttgagatggagtttcactcttctcactgcaacctccgcctcccgggtttaagcgattctcctgccttagcctccagagtagccaggattacgggagcctgccaccacgcccggctaattttcgtatttgtagtagagacggggtttcgccatgttgattcacgcgcctcggcctcccaaagtgctgggattacaggcatgagccaccgcacctggccggaaatacttatttctttttcaggctctgatatttggccccagaagtcgtgtgtgtgtgtgtgtgtgtgtgtgtgtgtgactatgtgttgaggttggtagggacagggtctttgaggtgggccatgaaggctgttgtcttggttcccttactccagtgggtgggggaggtgggcaacgtggatcaaaacgaatccaggccaagctggaggcctagggagcctgcgcgctgaacctcaaacgtctggagtcctttgccttctgaatcctttgaccaagagaggctgataacatgcaaccacgcactacggctctggttgcagccagacttgggtttagttctattgtttaccagctgcgtgacattgggtaagaggcttaacctcttcggtcccaaattcctccttattaagatggggacaacaacagaacccatctcccaggactgataccaagcatttggccacagttgctgctaggtgagggacagtcctgtttaatacacaacggaatgttgatgatcatgtattgaccactttctgagccagacaatttgtgtgcctttatctcattggaacaccaccatttctctggatagcagatactattaccatattataaggtatataggcacttagcactaatggcacagagtaagtgctcaccaaaagctgttagtgagggcacttttgtcatatagaagaaaaaaggagcatggaaaaggcgctttgcaaggtgtaaggttccgcacaagtttttgctgtaattgttacgtcgccctttgtggtcgtgatcctttatttattctttctgagccactacgatggtcccctagttaccgtggccatggaaacgcggcccgccgtcccggattggacggttcgcgggttccccctggaggccaccttctggtcctgctgcggaacgacgggcgggccttggaggcggggagaggagcgtcgggagttgtaggcgatgggcgtggctgctgcggagcggtgcacgccgggagttgcagttcccgggcgaggcagttgactgccccacaacgagctcgggcctcacccggatggcggctgcgacgcgcggctgccggccctggggctcgctcctcgggctgctcgggctggtctcggccgcggccgccgcctgggacctggcttccctgcgctgcaccttgggcgccttttgcgaatgcgacttccggcccgacttgccgggtgaggcgccagggagcccggagcgaggggcgggcggacgcgggcagacgcgggagcgctgggagccctgggagcccggctggcgccggccagagaagctgaggacccagagggtgggaccgaggggcggggcccgcagacttgggagggtggagggtacccgttgaggtccaggaggccctgccaacctggagagaggcctcagccagcagaacccttggtggaagttcttgggcctccccggaatggcctggccgtcaaaggagaagtgcagtgcgccttggggatgggcggggtctgcggctgaccccgttgacagctcgcatttagagctgagtgcaatctagaggaccgcctggtgggggcgctgccgagctgaatcaggcccgaaggtggctcttttccgccacagaccccaaggtttgcgtgccatgtgcataggcagcttggacaaacgtaaggacacaggagtcccagaccaggttccagacatgatgttctccttgaacctctgcctcggtgggatgtgtcctcaccatcctcctgtggccctaggtctggagtgtgacctggctcagcacctggccggccagcatctggccaaggcgctggtggtgaaggcgctgaaggcctttgtgcgggacccagcccccaccaagccgctggtcctctccctgcacggctggaccggcaccggcaaatcctatgtcagctccctgctggcgcactacctcttccagggcggcctccgcagcccccgcgtgcaccacttttctcccgtcctccacttcccccaccccagccacatcgagcgctacaaggtaggctggatgcgtccttgaccactgttctcaccatggggtgccaccctagggagtaagtcctgagcccagacaggggagtcacctgctccaggccacacacggctgcagccccagccctcaggacccatcctgcacagaacttgggaaggtgtcattctacctggcagggagtactttgattccttggggcagtaaggaaccctggcagtacctacatgccagggttgttgtgagggacatgagattataccattgcagatatcatttatggagcacctatgtttgtcagataatctgcactgttgtcttgctggaaatcagccccaatttgtggctcagaggaagcatcaggaaatattggctcttactactactgttgttgattgcagggtacccaccaggctgatcagtttcagccgtcaacactgctgtgtagtttcagggagcaggaaggagccttccccttttatagaaagcagcaagtgtcgtggaaggagctctgaacagggaagtgggaggcttgggtttgagtccctgttctgactggctgtgtgactttgggcaagtctctgccccaatctgggatacagtttcaccatcagtctcactaagaggttggtgctctctggaagaccacatccttccctagaaaggagattagttttggtttgggaagaggtctggtgttgggggagtttctccagctcccctggaactcctgtctctcccctacagaaggatctgaagagctgggtccaagggaacctcactgcctgtggccgctccctcttcctcttcgatgagatggacaagatgcccccaggcctgatggaagtcctgcggcctttcctgggctcctcctgggtggtatacgggaccaattaccgcaaagccatcttcatcttcatcaggtggggcccggctttgcagtgggcacagtgcgggggccacttctcagaggttcagctctacagccttagcctgtgctcccagcagaatccagttccccatgggcttagctgggctttcccagtgccctccgccactctcagagatgacattgtcattccgcctggttgatttccctttggacattctcagcaaattctgggctcagtctttttgatcgccacttctttgtggaagccctgccaggtcaagaagttttccctcttttgtggtgaggaggacacaggcctgggaaaaataggaacagagttcttgtcctttagtcccagctctcagaatcctcgctgtgtttcctcaggcagcatggctccgcctctctgagcctctgtctctgcttctgaacagcggggccaataatgatgccccgatgccttcctggaagttcagtgagggaaagtcagttgagggacacaaaagtgttttgtaaactataaagtacgtggcatgtgtaggtgaattacaggggccatggatgtggacaccatggagggggaagtggagcgttttcagtggagttggctcctccccgcactgagccatgttcctatgtcaggtggcagcggggaagcgagggtccaatcctgccctgcgctagtcctcatctgagtctcagcctgggtcccccatggttttagcaacacgggtggcgagcagatcaaccaggtggcattggaggcgtggcgcagccggcgggaccgcgaggagatcctcctgcaggagctggagccggtcatctcccgcgcggtgctggacaacccgcaccgtgagtctggctcagcagccccctcccgggcggcttcaccccacacccaggggccaggctctcccggggtctcatgctttgcccactgacccggcagttctgagcctggctttggcactcccagctttgtgactttgggtgagccttacagcccctgagtcctacacccagaaggtggctgagggaactgaggccagcatttttcctcctgcccctgggggtttggggccggcttctcccctcttgtgaagcacaaagtcccctccccacctacccttcctgcagatggcttctcaaactcgggcatcatggaagagcgcctcctagacgcagtggtgcccttcctcccgctccagcggcaccacgtccggcactgcgtgctcaacgagctggcccagctgggcctggagccaagggatgaggttgtccaggctgtgctggacagcaccaccttcttccctgaagacgagcagctcttctcctccaacggctgcaagaccgtggcctcccgaatcgccttcttcctctgactctctgagtggtgtcctcggcccccctgatggccaggccatgcaggaaaggccaggggcctctgtcacaggaacccagagcaccaagtgagatgaacggagtgtcggctaggccacgggacagatggccaggaagggccctggcctctaaactggctcgagagcatcttggccccggccaccttccccagggaaacccctggtcaccccagaacctcactgagccttgacctccccctgcagcctgagccttcttactgtgaattataactcagggactgtggctcgtggcggtgctccctcctcagtctgccacccttgccccttgcctccttggtcgggcaccatacctcctcccctccaccccacaccctgtgtccatatcaagccaggtggagccttctcagtttccagaaatggagggactcaagctgccacttgggcctggttttagatgtttttaattttgtaaaagaaaacaagtataataaactcagctgtgggaccagaggactgttgctaagacttttaattgctctggaaggaggcagctggctgagtgccagtgtggggaggtgggtagaactcatcccctccccagcaagaagggagggtctggatggtcccttcagacagcttcatagtaggtgaggtcctgatcaacctcagttttgctgagacttgggctgggtccccaggtggactcggccttgctggaagttgagctcatgccctggctcttgccctgggcaccctcagccttgctggacctctggccctggccttgggcatactcagtcttgctgaggctccagtttgagtcatagaaagcctcagtcttggtggaacttcggagcagtcccctgcttcggccctgggtggcatcaaccttgctgggtctccagctccggccacgagcagccttgacctttctgggcctctgccttgggctccgggtggtcttggtcttgctgggctcctgccttgggccctgggtggcctcaatctcgctggagctctgcctctggccctgagtggcctcagtcttgctggagctctgcccctggccctgggtggccctggtcttgctggagttccgcctctggctttgggtggccttggtcttgctggagttcctcttgtgtatagtggccttggtcttgctggagttccgcctctggctctgggtgggctcagtcttgctaaggctctgcctctggccctgggtggccttgatttttctgggaccatggcttagtgcctccctgttgttcccagagtccgaggattgcgtcttcaacagtgacgagtcagagaatgtcacggcggtggctgaggtgctcctgtattcctggcagatagccgacatctcagtctctgaggtgcctgtggtcctgactaggaagggggtgccaaaagcacccatcaggcctgccgcacctgccctggacagctctgggaaaaggggcttcccaatctcacactggcctgtggcccagaggcttcgcatcaccaaagggaaagacctgcagatcacccccgcccagcccccagcgacccagaccctgaggggtggggctgtgagatgggggagatgcctaggagcccccttctcccagtcccaggcctctgctctgtggctgcccctgccctctgtgctcctgttgcagcagacagccccagcagggcccctgcgtccccccgcctggcaccctcctgcttttccatcctcgtccccactaaaaggcgctaaatgcacccacaccccggcttcccccgcactgtgtctgccctgtctcctggctgtgggtcacctgggagccttcttcctgttggagcttagaattcatgtctcagggcaaggactatgccagtcattcctgtgcctagtattgagcacaggcctggcccagggcacttggggagtttgctggattcacaaaatgaagaaggggcctgggccctgccactcgcctcccgagcgaggactgcgcacacccgccttggggcctctgaggagcagcctccccattcttcacttctgtctcctccaggctagggccctatgtactggggctaaaagccccctggccatgcacaaggtttgtgggcttatttcagggacagggctaggaggggatgagagcagagcagcagctaccatgaagtgcctggagcaagcctcacctcgtcctgggcagccccgcaacagtgttactcccgctctagagccactcgccccaggccacccagctgtcagcagcggggccgaatgcacacctaggccagcggtcttcgacccctgagctttgaccaccctgctgccttagcttcctgaggcctggcggaagcaccagggacttacagctcatgctggaggctgaagaggtctggtcaaggtagctgtcagacagggacgccaccttgctaggtatgagctctgattttttctcctatggcaagaaacaggctttgtagttcagatggtaggaggcccgtgcagctgcacctctagaaggccagcagccctgggcccctcggtggtcattctcctgagcttggaggtctttgaaggtgccaggttagggtggggtggggacacgcagaggctaagcctggcaggaaggggagcgaccaggctagacaggcatggtgccgtgagaacggttgtgttgaaggggctgctagcgccttggtttttttcaactgcaaaatgaaaattagttcaggtgtggaacaggcttctgtaaattgtaaagggctgtgccctggggaatgcttacggaggacttgaggagcttctgtaggctttacccccatccattctcctaatacaagtgaagacggagggatggggagagctgctaatgaccatttcactgaacaggaaaccaaagctcagagcccctaagcaacctgtccagggccactcggctaagaagcagagaggccgggtttgaatccaggtctgctggctgccacagccagaccctacctaggctgcgggtctctgcccacgttcacacctgtagacagcgaggtacaccatagtgctccaggtgccagctgggagttgcgctctgggctccatccacttcagcccaacgtctccctgggggagggggcctctgacttcaggggtcacacagagggaaggtgtgtactttaatattcattctaacatgagctagaaaactgaagagctagcactttctttccttttttcttttcttctttagacagggtctggctctctcacctaggctggaatgcagtagtatgattacggctcactgcagcctcaaatgactctggggctcaagagatcctcttgcctcagcctcccaagtagctgggactataggtatacaccaccatgcctggctaatgtttgtattttttgcagagacagggttttgccatgttgcccaggctagtcttgaactcctgggctcaagcaatctgcccatcttggcctcccaaagtgctgggattacaggtgtcagccaccgcgcccagccacattttctattgatggcaagggatgctggtattcctctacttcaattgcttcaagtttcctttgaacattagtgtacttgatgtctaccagcagtagaacagaggaacacactgtgggactgtcaaggacggaatattctgcagcaccagcgagagggagcaggccgctgccacccgccgcagcgtgagtgac

SEQ ID NO: 373 - DNA, 3182 bp, Homo sapiens
gtgggagaggcacctcaactttgatgtcccgagccttgagtggccactcgcaagctggccaagggcttcacacaatttgccaagatgacagaggggaccaagaagaccagcaaaaagttcaagttcttcaagttcaagggctttgggagtttctccaacctccctcggtccttcactctgagacgatcctcagcttccatcagtaggcagtcccatttggagcctgacacctttgaagccacgcaggatgacatggtgacggtgcccaagagtcccccagcctatgcccgctccagtgacatgtacagccacatgggcaccatgcctcgccccagcatcaagaaagcacagaactcacaggctgcccggcaggcccaggaggcgggtcccaagcccaacttggtacccggaggtgtacccgaccccccaggcttggaggcagccaaagaggtgatggtgaaggccactggccctctagaggacaccccagcaatggaacccaacccttcagcagtggaggtagaccccatcagaaagcctgaggtccccacaggagacgtagaagaggagagacctcccagggacgtgcactcagaaagtttaggaggtccccgggttgccggcggcgacagcgggggaagcatgactgctgtgggccgaaggtgccccgcgctggggtcccgaggggctgctggagagccagaggctggcagcgactatgtgaagttctccaaggagaagtacatcctggactcatcgccagagaaactccacaaggaattggaggaggagctcaaactcagcagcacggatctccgcagccatgcctggtaccatggccgcatcccccgagaggtctcggagaccttggtacaacgcaacggcgacttcctcatccgggactcactcaccagcctgggcgactatgtgctcacgtgccgctggcgcaaccaggccttgcacttcaagatcaacaaggtggtggtgaaggcaggcgagagctacacacacatccagtacctgtttgagcaggagagctttgaccacgtgcccgccctcgtgcgctatcatgtgggcagccgcaaggctgtgtcagagcagagtggtgccatcatctactgcccggtgaaccgcaccttcccactgcgctacctcgaggccagctatggcctgggacaggggagtagcaagcctgctagccccgtcagcccctcaggccccaagggcagccacatgaagcggcgcagcgtcaccatgaccgatgggctcactgctgacaaggtcacccgcagcgatggctgccccaccagtacgtcgctgccccgccctcgggactccatccgcagctgtgccctcagcatggaccagatcccagacctgcactcacccatgtcgcccatctccgagagccctagctcccctgcctacagcactgtaacccgtgtccatgccgcccctgcagccccttctgccacagcattgcctgcctcccctgtcgcccgccgttccagtgagccccagctgtgtcccggaagtgccccaaagacccatggggagtcagacaagggcccccacaccagcccctcccacacccttggcaaggcctccccgtcaccatcactcagcagctacagtgacccggactctggccactactgccagctccagcctcccgtgcgtggcagccgagagtgggcagcgactgagacctccagccagcaggccaggagctatggggagaggctaaaggaactgtcagaaaatggggcccctgaaggggactggggcaagaccttcacagtccccatcgtggaagtcacttcttccttcaacccggccaccttccagtcactactgatccccagggataaccggccactggaggtgggccttctgcgcaaggtcaaggagctgctggcagaagtggatgcccggacgctggcccggcatgtcaccaaggtggactgcctggttgctaggatactgggcgttaccaaggagatgcagaccctaatgggagtccgctggggcatggaactgctcaccctcccccatggccggcagctacgcctagacctgctggaaaggttccacaccatgtccatcatgctggccgtggacatcctgggctgcaccggctctgcggaggagcgggcagcgctgctgcacaagaccattcagctggcggccgagctgcgggggactatgggcaacatgttcagcttcgcggcggtcatgggtgccctggacatggctcagatttctcggctggagcagacatgggtgaccctgcggcagcgacacacagagggtgccatcctgtacgagaagaagctcaagccttttctcaagagcctcaacgagggcaaagaaggcccgccgctgagcaacaccacgtttcctcatgtgctgcccctcatcaccctgctggagtgtgactcggccccaccagagggccctgagccctggggcagcacggagcacggcgtggaggtggtgctggctcacctggaggccgcccgcacagtggcacaccacggaggcctgtaccacaccaatgctgaagtcaagctgcaggggttccaggcccggccggagctcctggaggtgttcagcacggagttccagatgcgccttctctggggcagtcagggtgccagcagcagccaggcccggcgctatgagaagttcgacaaggtcctcactgccctgtcccacaagctggaacctgctgtccgctccagcgagctgtgaccccagggacatttcccctctgcagctgcggacagcgtcaggggcagaggggcacacaactttccccagagcaccccaaggacactgtgatcaacccgagaatgttctgggttcaactcaagcatctcccttgcacctccagggtcctgcgtggactctgggttccatcccacctgctacatgctcaccaggtctccattgaggaagaacaggaacgccggttcccccaccagcttttgctgctccccttcctgctggggttccctgttttcgagccatgggaggcaggctgctcacgcctcctcactctctgtctgtccctcaccaacaccaaggcctccatctcactgtaaataagtctctgttctgtaaatagatgtacagaagccatgttatttctttcatataataaacttttatgactcttt

SEQ ID NO: 374 - protein, 881 aa, Homo sapiens
MTEGTKKTSKKFKFFKFKGFGSFSNLPRSFTLRRSSASISRQSHLEPDTFEATQDDMVTVPKSPPAYARSSDMYSHMGTMPRPSIKKAQNSQAARQAQEAGPKPNLVPGGVPDPPGLEAAKEVMVKATGPLEDTPAMEPNPSAVEVDPIRKPEVPTGDVEEERPPRDVHSESLGGPRVAGGDSGGSMTAVGRRCPALGSRGAAGEPEAGSDYVKFSKEKYILDSSPEKLHKELEEELKLSSTDLRSHAWYHGRIPREVSETLVQRNGDFLIRDSLTSLGDYVLTCRWRNQALHFKINKVVVKAGESYTHIQYLFEQESFDHVPALVRYHVGSRKAVSEQSGAIIYCPVNRTFPLRYLEASYGLGQGSSKPDVSPSGPKGSHMKRRSVTMTDGLTADKVTRSDGCPTSTSLPRPRDSIRSCALSMDQIPDLHSPMSPISESPSSPAYSTVTRVHAAPAAPSATALPDVARRSSEPQLCPGSAPKTHGESDKGPHTSPSHTLGKDSPSLSSYSDPDSGHYCQLQPPVRGSREWAATETSSQQARSYGERLKELSENGAPEGDWGKTFTVPIVEVTSSFNPATFQSLLIPRDNRPLEVGLLRKVKELLAEVDARTLARHVTKVDCLVARILGVTKEMQTLMGVRWGMELLTLPHGRQLRLDLLERFHTMSIMLAVDILGCTGSAEERAALLHKTIQLAAELRGTMGNMFSFAAVMGALDMAQISRLEQTWVTLRQRHTEGAILYEKKLKPFLKSLNEGKEGPPLSNTTFPHVLPLITLLECDSAPPEGPEPWGSTEHGVEVVLAHLEAARTVAHHGGHTNAEVKLQGFQARPELLEVFSTEFQMRLLWGSQGASSSQARRYEKFDKVLTALSHKLEPAVRSSEL

SEQ ID NO: 375 - DNA, 3181 bp, Homo sapiens
tgggagaggcacctcaactttgatgtcccgagccttgagtggccactcgcaagctggccaagggcttcacacaatttgccaagatgacagaggggaccaagaagaccagcaaaaagttcaagttcttcaagttcaagggctttgggagtttctccaacctccctcggtccttcactctgagacgatcctcagcttccatcagtaggcagtcccatttggagcctgacacctttgaagccacgcaggatgacatggtgacggtgcccaagagtcccccagcctatgcccgctccagtgacatgtacagccacatgggcaccatgcctcgccccagcatcaagaaagcacagaactcacaggctgcccggcaggcccaggaggcgggtcccaagcccaacttggtacccggaggtgtacccgaccccccaggcttggaggcagccaaagaggtgatggtgaaggccactggccctctagaggacaccccagcaatggaacccaacccttcagcagtggaggtagaccccatcagaaagcctgaggtccccacaggagacgtagaagaggagagacctcccagggacgtgcactcagaaagtttaggaggtccccgggttgccggcggcgacagcgggggaagcatgactgctgtgggccgaaggtgccccgcgctggggtcccgaggggctgctggagagccagaggctggcagcgactatgtgaagttctccaaggagaagtacatcctggactcatcgccagagaaactccacaaggaattggaggaggagctcaaactcagcagcacggatctccgcagccatgcctggtaccatggccgcatcccccgagaggtctcggagaccttggtacaacgcaacggcgacttcctcatccgggactcactcaccagcctgggcgactatgtgctcacgtgccgctggcgcaaccaggccttgcacttcaagatcaacaaggtggtggtgaaggcaggcgagagctacacacacatccagtacctgtttgagcaggagagctttgaccacgtgcccgccctcgtgcgctatcatgtgggcagccgcaaggctgtgtcagagcagagtggtgccatcatctactgcccggtgaaccgcaccttcccactgcgctacctcgaggccagctatggcctgggacaggggagtagcaagcctgctagccccgtcagcccctcaggccccaagggcagccacatgaagcggcgcagcgtcaccatgaccgatgggctcactgctgacaaggtcacccgcagcgatggctgccccaccagtacgtcgctgccccgccctcgggactccatccgcagctgtgccctcagcatggaccagatcccagacctgcactcacccatgtcgcccatctccgagagccctagctcccctgcctacagcactgtaacccgtgtccatgccgcccctgcagccccttctgccacagcattgcctgcctcccctgtcgcccgccgttccagtgagccccagctgtgtcccggaagtgccccaaagacccatggggagtcagacaagggcccccacaccagcccctcccacacccttggcaaggcctccccgtcaccatcactcagcagctacagtgacccggactctggccactactgccagctccagcctcccgtgcgtggcagccgagagtgggcagcgactgagacctccagccagcaggccaggagctatggggagaggctaaaggaactgtcagaaaatggggcccctgaaggggactggggcaagaccttcacagtccccatcgtggaagtcacttcttccttcaacccggccaccttccagtcactactgatccccagggataaccggccactggaggtgggccttctgcgcaaggtcaaggagctgctggcagaagtggatgcccggacgctggcccggcatgtcaccaaggtggactgcctggttgctaggatactgggcgttaccaaggagatgcagaccctaatgggagtccgctggggcatggaactgctcaccctcccccatggccggcagctacgcctagacctgctggaaaggttccacaccatgtccatcatgctggccgtggacatcctgggctgcaccggctctgcggaggagcgggcagcgctgctgcacaagaccattcagctggcggccgagctgcgggggactatgggcaacatgttcagcttcgcggcggtcatgggtgccctggacatggctcagatttctcggctggagcagacatgggtgaccctgcggcagcgacacacagagggtgccatcctgtacgagaagaagctcaagccttttctcaagagcctcaacgagggcaaagaaggcccgccgctgagcaacaccacgtttcctcatgtgctgcccctcatcaccctgctggagtgtgactcggccccaccagagggccctgagccctggggcagcacggagcacggcgtggaggtggtgctggctcacctggaggccgcccgcacagtggcacaccacggaggcctgtaccacaccaatgctgaagtcaagctgcaggggttccaggcccggccggagctcctggaggtgttcagcacggagttccagatgcgccttctctggggcagtcagggtgccagcagcagccaggcccggcgctatgagaagttcgacaaggtcctcactgccctgtcccacaagctggaacctgctgtccgctccagcgagctgtgaccccagggacatttcccctctgcagctgcggacagcgtcaggggcagaggggcacacaactttccccagagcaccccaaggacactgtgatcaacccgagaatgttctgggttcaactcaagcatctcccttgcacctccagggtcctgcgtggactctgggttccatcccacctgctacatgctcaccaggtctccattgaggaagaacaggaacgccggttcccccaccagcttttgctgctccccttcctgctggggttccctgttttcgagccatgggaggcaggctgctcacgcctcctcactctctgtctgtccctcaccaacaccaaggcctccatctcactgtaaataagtctctgttctgtaaatagatgtacagaagccatgttatttctttcatataataaacttttatgactcttt

SEQ ID NO: 376 - protein, 695 aa, Homo sapiens
MTAVGRRCPALGSRGAAGEPEAGSDYVKFSKEKYILDSSPEKLHKELEEELKLSSTDLRSHAWYHGRIPREVSETLVQRNGDFLIRDSLTSLGDYVLTCRWRNQALHFKINKVVVKAGESYTHIQYLFEQESFDHVPALVRYHVGSRKAVSEQSGAIIYCPVNRTFPLRYLEASYGLGQGSSKPDVSPSGPKGSHMKRRSVTMTDGLTADKVTRSDGCPTSTSLPRPRDSIRSCALSMDQIPDLHSPMSPISESPSSPAYSTVTRVHAAPAAPSATALPDVARRSSEPQLCPGSAPKTHGESDKGPHTSPSHTLGKDSPSLSSYSDPDSGHYCQLQPPVRGSREWAATETSSQQARSYGERLKELSENGAPEGDWGKTFTVPIVEVTSSFNPATFQSLLIPRDNRPLEVGLLRKVKELLAEVDARTLARHVTKVDCLVARILGVTKEMQTLMGVRWGMELLTLPHGRQLRLDLLERFHTMSIMLAVDILGCTGSAEERAALLHKTIQLAAELRGTMGNMFSFAAVMGALDMAQISRLEQTWVTLRQRHTEGAILYEKKLKPFLKSLNEGKEGPPLSNTTFPHVLPLITLLECDSAPPEGPEPWGSTEHGVEVVLAHLEAARTVAHHGGHTNAEVKLQGFQARPELLEVFSTEFQMRLLWGSQGASSSQARRYEKFDKVLTALSHKLEPAVRSSEL
